United States Patent Application Publication US 2026/0092266 A1 - sequence listing, part 16

SEQ ID NO: 2611 - DNA, 25115 bp, synthetic construct
  misc_feature 1..25115: note = Synthetic
  source 1..25115: mol_type = other DNA
cattgatgttaaggctatggaaaggcacgctgtaaatatcagggcggtcaacaattccgacatattgaagtgtttgtccctgtacattgtaataaactcctgcatcgagacctcttccaaaaccattttcactgccatcatacgaaagacctgcgttgacaatgtatggcgcctgtccggccatgtccctgtattggtctataatttgcccggtccgggcattttcaacccgcgagttgtactcggccgaacccatctcaatttgagaatgggtaaatgtgaagtttaccatcatgctgaagtttttaagcggttcgcccaagagcttcaggctttggcgcaattccacttcaacccctgcaactttgccatcgcccacgttccgtggttggtacgaacccggctgggtcacatactgcacaatctcgattgggtttttgaattgcttgtaaaatgcaccggcagaaatggtctgtccacctgtttgaaacatttcccaacggacatcaaagttctgtatatctgtttttgtcagatttccatcccagtattcaacgcctgcaatgtcgtcggcatcgcggaacatgcccccgataaaggtacgcccgctgatggggtcaaatatctcagcgtatgacaattctttaaacgaaggacgggcaattgttttagaccaggaaaatcgcaggttttgttgctctgtaagattataaatcaggttaatggtcggaaaaaaatccaaattatcgagaaccttttcgttatccagaatttttgtacccaactgatcctggccggtataatattgcacgtaattttcagccctcagtccggcaatggctctcagctttttcaccgggctcatttcaaccgaagcataaccggcagtattgcgcacattggcatcgaactggttcgggtttaccgggataaaaggagcttcgtaggttgtaccgcgggaaacatttccgttgtaaggccataaattttcaggccggaatatttcgttcgggtcgccggtcaagggaacattccgaagattgaccgcgtaattccggatgacaaaatcacgctctttatacgcataggcgccaccaaatttcagcttggcagcttcgccattcattttaaaatctttggtcacatgaaagacccccgacaggtttatctcttccagctcgcgccatatccgttcaggaaaaccaacttccgtaccaatggtaaagtttccgttgtttatgccataccgggtgaagcgaatatcgggatcgctgatttttgacaaggtgggtgaaactttccattcgatgtcccaacctttttcataccatgtatattttccgtccaacagaacattggtcaacgaacgctggctgtattccagattatgctgaaaaccggaaaattcagttcccaggttggtttttgcatagtcgaaaatagcggcttgtgattcgccgttttgcaagtgcaggaagttgatccggtacttggcttttttgctttttaatgctaccccggccaggccgctccacagaacgctgttcaccccgtagtcgcccgactggatttcacgtaattccatttccgtttcgttcagttcactggacaatccataccggccatattcggcatccggataaaattcggtatcgtttttatacgaaaatgccaaaaggtatcccaaattgtattttcccaaaatcatctggttcccgaatgtagcgccaatactgtaatccatgaaactacgttgcctggaagcagccagaaccggattgaacgacttcagtatttcctggtaacgaatcgctttctctccggtcgggttgcccaccacttcggagaacaacgggatattttcggtcgcgggaatgtcacgtgtaccgtcatcaaacccaagccagtcggttttccctccttcgtacgaaaggtaatcgttgttgaaatgggcttttgggttaaatccggcactcattgatattccggcattttttgtttccggaaaatctttgatattgatgttgataacaccgcccgtaaaatcggcaggcaggtcggcgctaaatgttttattcaccaccatgttatcgatgatactggtggggaaaatatccatttggagagtattcctatcgggatcaagtcccggaatatccaatccgtttaagatcgttttggtataccggtcgccaaggccacggacaaaaacatatttcccgccttcgaccgacactccggtaacacgtttcatggaagcggcagcattggaatcgccaatttttttcagacctgccgaagaaatcccgtccaataggttcacagatttctttttcatggcctgcatggcggtttcattgttccgtatggcttttgccgttacaactgcttccccgatttcaatggtggcctcgttgagtttcaggttatcgaggacaatagctttaccggcctctataactacatctttaatgttgatggtctcataagaaataaaagatactctgatttgatatgtgcccgggacaatgctcaggttaaatttgccatccaaatcagtaatcgttccggttgtggttccttctgcaaatatggttacgccgggcaaaaattcacccgtttttccatcgaaaacagtacctctcagaaatccgttctgcccgaacagaactgtggaacaaaaaatggacaggaatagggtgatggacagttttgttactcgcatgattgttttttgttgttctttactaataaccagaactcacagacctgaaagtctgtgagttcttttatgaagttcttttaatatgaaacattttatttgaaagaagccagcgcaccggcaacggcagcccaggaccagccggcaaatttagctttatcggcgccaaccgtattgctgtttgcggcaaccgcagttgtgaatgcgtcagaaccacctttgaagaaatcggtaacaactgttccggcaggaagtgtcacctgaaaatttttaaggacagatacataatctgttgggatctggtcgaacgtttgtcctgctttaatatcgaagaaataaatattctccatgttaacattcgtgttcggatcattgtcaaccaggccaacagcatttttagcctgaacacttccgtttttcaatgtgtaattggcagttgcggcagcgccttccggtccgtccaactcaaaacatttgtctcccgggttaatcacgatgaagttatccagtgtgccaagccatttctggtcagcatcaatggcatcgtcaccggtattccaaaccaacgcattttttacatttacagcaccaccaaaccattcaataccatcgtcctggttcgaaacaatttcaacgttttcgataaccgttcctgaaccaatgccacccagcgtaagaccgttaatttcgttcccttctccaatgttggctccaccatggcggattgatacatacttgattacacccgagttatccgcagcatttgcacctccatacaaaccattttgatccgaagcggggataccttcaatttgtgctgtttcaccggttttaacagaaatcggagcatttccaagaataattaaaccaccccacaaaccgttcagggttggatcaaggttcgggctggcaacttgcccgggttcaattttatcagccaccgaagtaaaaataattggtgacgaagccgtgccttcggccataattttagcgccacgggcaataatcagggctgtcgcattggaacctgttccggcttctccttttacgattacacccgcttcaattgtcagcgtaacgcccgacaaaacagcaatccggcttttcagcacataaatcttccctttttcccaggttgtacttgcgctgatattggctgtcacagcaacctctttcgcgattgttaaaacagcggtcgactggtatgactggttttggttgtcggtcacagaaagggttacagaacctgcgccaacattcgtacctgcagtaaaattcacttttattgtacccgatgttgaacctgaagttccgtcgttagcaatggttgcagttccgttcgttgcctgaaccgatgatgatttaaacccggcggcggcagtatagctgaattccatttctacagtctcttctatcaccacagaagtttcagaaggagcagttaaggaaggtacagcaaacgtttcatcttcctcgcaagaatttaacattaccaatcctccgagaaaagcaaataagaaaacatgtgttaactttttcatagtatcaaaatttgttttaattgatacaaagcaacatcccgaatattacaatctgattaaagactatttaagcttggattacatttctgaaacagaattgcaacaagactcgcacgttgcaatttccctggtcttcctgattttcaggaaacggcaccaaccactaaaaaaagttaatacagaacccgccgcctcaaaatttcaattaaatttctatttttgttcttgccctgcctggcaggttattttgactattaccaaaaacaataatcatgaacgaaaagaggcgctatccttttttctgaataatacttaaaaaaatgaaaaaagtaacaattggtgtggatattggcggtacaaataccgcaatcggagtggttgacgcagaaggaaacgtaatggtaaaaaacaacattccaactccgtcgcacggtgatattaacaagtacatgaccgaattatcggatgccatcaaggaactcatcagatcagttaatttactgaatgccgacattgaaattttgggtatcggcgttggtgcaccaaacggcaattattacaacgggactattgaatacgctcccaacctttcgttccgcggagtaattcactttgtaaccctgctgaaagaaaaatttcctgaactcccggcaattgccttgaccaacgatgccaatgccgcagcgattggcgaaatgatatacggcggcgccaaaggcatgaaaaactttgtgatgtacacactcggaaccggtgttggcagcggtatcgttgttgacggcaacatggtttacggacacgacggttttgccggagaatgcggacatagcatgttgattcccggaggacgcctctgcggatgcggcaccaaaggacatctcgaagcctattgttcagcgccgggcatgaaacgtactgctttcgaaatcatggcacgcgataatgcaagcaccagcttactggccgacaaatcgttcaacgaactggattcgaaaatgattttcgatgccgcggaaaaaggcgacaaagtagcgcttgaagtattcgaacaaaccggcaaatggctcggacaaggcctggccgataccgttcatcataccagccccgaagccatcttcctgtttggcgggccaacggctgcgggcgactacatatttaaaccgaccatcgggagtatgaacgaatacttgttgccaatcttcaaaaacaagatcaaagtgcttccttcgcaactaaaagccggcgatgcggcaatcgttggggccagcgcactggtttacaaagaacttgaaaaataaacccatcaaatatcatggaaagaagcggggccgtctggttccgcttttttattttctttacttttgaaagaaaaagcgatggcttcggtaaaggtaatccgcattccagtcggttacgccaatacatttttagtggcaaacggtaaccgttcgatcctgattgacacaggactgaaaaatcatgcaagctatattttgtcgaaactgaaaagatacggagttgaaccctccgatgtagcattgatcatacaaacccatactcatttcgaccacgccggaaatactgccgaactgaaagccctgaccggcgcccaggtgatggtgcatgaaaaagaagccagttgcctcgcaaagggatacacccgtattcccaacggggccattgcctatacaaaatttattgcctcactgggacgaaagatttatccgggtctcgccgcctaccaagctattgaacccgatgttattattaacgagaaattcagccttgccgaatgggatatcgatggatacgttttacctacaccgggacatactgaaggttcaatttcggtggtgctcgaaaaccggatgatcattgcaggcgattgtttttttccggtctaccggcattcggtattcactcctttctgtaacgatgtccccctgttgatgaaaacatggaagctcatttttgatctaaatattgatgaaatttatgccgggcacggaccaaaatttctcagggaacgcggactgaaatgttaccaaacaaaacatgcaagatttaaaccggtataaatgacatttttgccacgacgtcagtaatggaacaggatattgatatgcaatgatttttataccgaatccggttaatatttctctactgaaataaaccgcgacaggtttctcgacatctcgatacgtttgtaaagcgaccgcatcacttccagatacaattcctctttcagcaccacatcttcaatgccggcatcgatattcggattgtcgtttacttcgatcagatatactttattatcgatcattttcagatcaacgccgtacaaaccgtcacccattaatgaggcggcttttaccgcggttttaacaactttctccggagccgcttcaataggcactgtctcaaagtcgccggaatggtcctcctcccgtttaccgtcccagttgtaaatttgccagtggttatcggccatgtagtatttacaggcaaaaagcggtttttcgtcaagtacgccaatacgccagtcgtattccgaaggaagaaattcctgtacgataatcaaatccgactttttcagcagacggttaaccgatatttccatttcttcggcattattcactttggtcactcccagcgagaaagcgctgtcgggctgtttcagtaccagcgggtatttgtaatatttaaattccgaaggtttgtacatgcctttcccgataacccaactgaccggggttgttatccggttctgcttcatgcgctcgttcagaaagattttgtttgagcagcgcaggatcgaccaggggtcgtcaatcaccaccagaccttcggcatacgccatgcgcgaaaaatgataggtatggtcgttcacattggttgtttcacgaataaacagggcatcgaattcactcatccggtcgtaatcgtctttccctataaattccgtatagaaaccaacttttcgtgcagcttccctgaaattctccagcgcctgtttgttcgacggcggatttttttcttccgggtttaccagtattgccaggtcgtatttgtaattctggaaacggggtttaaaaaatcgtttcttcgagaaataatgttttgcaaagtcctgaatccgttcaaaatcgtttttgtcgattttgtcgagactgaggggggtgacccgctgaagtacccaccggtcggtatggttgaaaataacctgaagcaaaggggtttcgaacaggctatacagtttttgtcccaggtgacggaaagcagggtcgatagtgtgcccgaaataaatattgaaactgaactgtgccgggttgattttgctcagggtgctttgcatcagctcgtcgatatcgctggcgatggtgcgaataatggacacattgcggaaatcgcggatggtggtgacattcggtatcgcgcgatgttcgcgtgccgacgccatcagcgatacataataaccgatactctggtaacgataggtatttgaaaggttgaaaatgcgaacgttttttatttcctgaaattcagggtccgacaggtatttctttgatgaaatcacccgcagtccctccacttcgagggcccattgcttgggattgtcgaccacaataatattggaaatggctttcttttcctttatctgcggaatcatcaggtacattctgatgccgtgttcaccggccgtgtaataatccgtcagctcttcctctgcaataaatccttgttgcccgtaccagtcaaccaatttgcagtcagccatccgcgcttcgagcgaaattctttcgaaacctttgacctgagcctgttcaatgcaatgggcaaccagcttgccccctatcccctgcccctggaactcgggcaaaacagccagagagaacaaacgcagggtatgctgataaagaattagtaccatggaaccaaccggaatggttttcccctctgtctgtatctcggcaatccaaacctgctgggtgggactggtgagactgaggcgcagcgaacgtcgggaactacgctggaagtcaggaaaacaaacctgctccgttttttcaaggaagggtaagtcgctaatccttgaacttctgatatttacagacatgtgtcataagtgataaagaaaggacaaatataatcgattatcaaaccggcaatcattgtcatgtatactttttgaaattattttttaaggatttgagtggaaagtatttacgaaaacgaagcttgattaacgatgtgttttggaatcaattacaacagaaaattactgaccggacgatttggagccatccggtcagtatcataaacaaattaaccttctgtagtttcttcgccggtttccgtaatttccgtttccgatggtttcccatcatacagtttataaatggccatccgtgcagcatcatcaataaagataatttttgccgcagtattaatctttaccagtttgtcccaaattgaattgtataaatcgattctttggctggtaaccagtaactgttgttttttcaacatttcctgttggtcgtcggcttcagcaagcagttccgccagatgttctatttcctgaattaatctgggaggcattccctgggcttcaagtcctgatttaaattgttcgagcgaagcagcttttgctgcctgtttcagaagcgggaccatcagtttctctgattttctggctttcagatactggtaccttccaaaagtattatcaatcgcttttgtacttccaaacgaagaatgtacaaaatagataagtttttgatacactttcgcagagtcgtcgagcaaaccggttattttttctgtcgcccggttaatttctgccatgtggctgctgccggaaaaatcctccaatgcttcacgggtttctgttaacaattcttcacccaatacggaggtaaaagaaggatcaaagcttgtaaacgaatttaaatcttgcatgtacagaggctgaatggactgggacttggcaattacatcattgaaggaaatcccaaacttacgagggggttctttttttctcatagaggtaaaaattaaaggttaatataaatttattccaatttacttacaaaatatttaattgtcaatacttgaacattaaaatttaacaacattgtttgactttagatgtataaagtattgtcaccaacataaaacggaagctaaaacaacagtacagtcctgctaagtccaaatattatattgcggggtcccggcagtttcctgcaaaccatttccacaatcttgcggattccgggcagtttcttgcgatgcgtttccaccatcttgcgaataatttccaccgtcttgcaatgcctttccactgtcttgcagacaaattccaccgtcttgcgagcaaattccactgtcttgcaaccggattccacagatggaaggaacatgcaaggacgtatccaaacgaaccgaacaggaaatagggacaaaaaagaaaaatgaatgaccgtacaaaaaaataatattgcctgttatctgcttgaatatgaacaaaagattgcataacttgtaggggtgtaaattttccggtctgaatgcaaataaataaagctgatatacatttaaaaaggactgttcaaaggcagatagtgactgccaagaccttacggagaaacatttatatgtctgcggtctggaaattaagaaagcgacccgttaaggccgctttaaatgttttcacaacggaataatccttattgtgatttgctttcaaaattgtagtttaaagataaacagattagataataaaaaaccaaatgatatgaaaaaaattttaggattggatttaggaaccaatagcattggttgggcactggtggagattgaccacgaaaaaagaatcgtaagaattttagggcttgggtcccgtattttaaacatggattcctctgagatagcaaagtttgaaagcggagctaaactttcaagtgctgccgcacaaagaacagagagacgtacacctcgaaaattaaacgaacgataccttttaagaagagatagactacactgtgtgctgaacctattgaatactttgcctccgcattataaactttcaattgagtttgaaaatgaaaaaggaaaacgaagtggaaagtttaaaagtggtacagaagaaaagtttgcctacagtaaagatgagaatgggaaagatcatttcctttttatgaatgcctatgaaaaaatggaagctgattttaaactacgtcacccggaactattttatcaaaagagaaatggcaacataacaaaaataccatacgattggacactatattatttaaggcataaagctgtaaccgaccccagttttgaattaacaaaagagcaattggcttggataacattaagtttcaaccagaaacgaggctatgaaaaagttattggacaggatgagaaagtacaaaaagagggagaaagatcagatacttttattggcaaagttaaaagtgttcaaaaacttcaagagaaagatatttatgaaatagtactctcggatattaataatgaagcacttgaattatttcgctacaaagaagaatccacaattcccattacagagatcggtgatttgaaagaaattgaaagggtttcgaaattcaatgataccggtgagatcgataactctaaaacagaatacatagtcaacgagattagagaattactcattaccaacgtccaaaatacttggcaaaaaagaaaagagaattttgttttcgagatagaattagaaacaggctggattaaggaacagcagagtcgattcactcctaagtggaaagataccaagagagatttcattataaagacaaagtatgatgaacaaggggatcgaatattaaaaggtgcagacaaagggcgaaatattgggatacctaaagaagaggattggacattgatgaagctaaaaacagaaacttcgataaccaatttcaacacaaagaataatacagtaggaatagcttcttttgtctattacaatctattgcaaaatccgagacagagaatcaaaggtgatttagtaacagttattgaacgtgattattacagagaagaattggatagaatatttgtaaatcaagaaaagtttcatcctgaattaaaaaacagaatactgtatgaacaggcaataaaactattgtatccaaacaatattaatcatcaaaagacaatcaaagagttagattttaattatctgattaaagaagacattttgatgtatcaacgtgatttgaaatccaaaaaatctttaattgccgattgtgtatatgaaaaaaggaggtacagaaacggagaaactcatgaaatggtagatgttccaattaaggcaatccataaattcaatccattatttcaggagttcagactttggcagtttgttaagcgactcaaaatattgaagaaacaggacgttgtgaacaacgagacaaaattaaacattgatgtaacatcccaatatcttaattctatagaaatcaaagaaaaactgtttgactatctcaatgataaggactttgttacagagaaaaatattcttgattttttgagcaaaacgtacaatgataaaacaattaagtccgaaaactacaaatggaatttagcttcagagaaagaaccctgtaataccacaagacatgagtttatattaaggactaaacgtgttaatggctttgattataagtcattcttgtccagtgaaacggagtataaactatggcatttcttctattcggtaaagagaaaagaagaattttacaaaggattaaatagtttattcagtcaaatattggagaaatcaggactatctaaagattatctgcccgaattagtgagaaactttagctcttttggaggctatccaaatgattacggaacttattctgaaaaagcaataaaaaaattacttccgttcttacgattgggaaaatactgggatgcaaaagaagttgagaacaatctaaaaaaagatttaccagatgaaataagtaaaaaggtaatagataaagaaagtattaatggagagataaatgatttccagggtttatgggtttcaagtgcttgctatcttgtatatggcaggtattcagaagttggggaagttgaattttggaattcaccttatgatattgaaaagtatttacagaatgaattcaaacagcactcattgaataatcccgttgttgagaaagtgcttgttgagactcttcacttagtaaaagatgtatggaaatactatggtgaaaagttgagtgaagatgaaaaagggaatcctgtttatgccaaattgtttgataaaattcacattgagcttggtcgtgagatgaagaaaaacaacaaacaaaaagagaaggatgataagcaaaacaaggaaaaccgaaaagcgaacgaacgtattattgaaattcttaaagaactgaaaaaagaaaatacttcacttgaagttaaatcccctttccaacaagaaaaactccgcattttagaggaaggattactatcgtctattgagtttgacaaggatactacggagtataatctgccagaagggaaaatttcaaaaaaacaaattaaagaaataaccacaaaagagatatcgaaagtaagtagaagtgattttgaacggtacaagctttggctagaccaaagataccaatctccatatacaggtcagatcattaaattatcagatttattcgatagaaaaaaatatgaaattgaacatatcttcccgcaagagagaattactttaaatgcgttgtcaaacaaagtaatctgtgaaactgagatcaacaagattaaaggatcaaatactggttatggattcattataggtgcaaatgaaagagaaatattttgtgctgcacataatgagaagattaaaattctcagtgtggatcgatatgagcaactagtcactcaaaatttcattgataagaaacgagaaattcttttaagcaaagatattcctggtgatttcacgaatagtcagaaagttaacatgcaatatatttctaaaatggctatgaagcttttgagtaatgttgtaagggatcaggatgatgattcttatcgttcgaaaaacgttttagcaacaaatggaacaataacttcagaactgaaaagacattggaaactaaacgaagcctggaatgaattaacttctccaagatttaaaaggctgaacgaattaacaaactcgaatctctttggtgattatcgaaaaataaatgggcatgatgtgtttgtgaatgatgttcccgaagcaactaagaaagattttgatcccaaaagaattgaccatcggcaccatgctatggatgctttagtaattgcttcgacaacagaagaacatgtacaatatcttaataatatttcttcacaagaggaaaatgatgaacagaaactgaaaacccgaaaaggcttgaaatatattttgaccaattcccgtagaggttttaatgacgagaaagaatggtattttctacctcctgcgcaaacaaaatcatcagatggaatttctgaatttgaataccattataaagaggttaaaagcaaagtatttaaagatattgccaaagaagctcttgataatactgttgcaagtttcaaacaaaagaaccggattatccgtcaacgctggaataagtatctcaagtataatgaaaacggacagcttgatattcacgaagaagaaaatctaaaattgaaaaagaaatataacgtccgtcaggcgttgcatttagatactttttatggaaaagtcaagattcaaaacaatgaaaagaccaatacgaatgtagtcgaagttgacttaggaactgctattaaagataactatgatttttttgaaacagagattattgatagaataagaattcttcgtgatcaaaaacaatctaatagcgaaattatcagtttattaagcattgaatatcccaaagttagggtctttgcaaaatttgttgcctcaagatttgggaatgaactaacctctttggcttcatcggatatgattcttaaggcaatagaatcaattactgatacaggtattcagaaaattcttttaaaccatctcgaaaactataaagaaaaaatagatgaagagggaaaggaaattgctccgcagactttggctttttcacctgaaggaataaaagaattaaatcagaacattaaatcattaaacaatggtaaatctcatcaaccaatttataaagtaaggatggctgatgcgatggggaaaaggttctttccagtttcagaagaactagctaaatcttcgaaatacgttgcaactgctggtgatagcaatgctttttgtgggatatatgaaaatggtaaaatgagaaaatactatgtgccaacattaagagagtctcttataaatttaaaagagggctatgatccttgcccacagaaacatcctgaagatacagactactcgttgttatttgtgcttaaccccaatgatttagtttatgttccgacaatagaggagtcagaaaggcccaaattagttgacttcaataatttaaactcagaacaaatgacacgaatatataaattcagagatggcagtattaataaacatggaggtgttcaatataattttatgccatctaattgggctacaatgatttttaagagtacaaaagaactggaaaagataaaaatgagtaatgaatccgaattaaagggtgaaattacgttgactacagataaagataaatcgcagaattcgttagaaggaaatcagattcgttctatttgttggaaactaaaagtagatagattaggaaatatttcaagaataaattaaatgcagccccttcaacccgatacctgctaccatattttcaaccatgccaacgggtttgaaaatgtgttttgcaacgatgaaaacttcagttatttcctggagaaataccggaagcatatttcacccattgctgaaacctacgcatattgcctgatgccaaaccattttcacctggttgtcaggatacgaaaacgcgcggtcattgaagagttgattcaaaataaaaacaacccgtacccgacaactaataacaacttttccaaagtttcgaactttggaaaagttgaaaaattaaaaaacgagatcagcgacagcgaaatagaaaaatttctatcgaaacaatttgcgaacttgtttagcagctacacgcaatcgttcaacaaggtataccaccgaatgggctcgctgtttattaaaaattttaaacgggaaccaattgataataaaacccactttatcaacgccattgtatacactcaccggaaccctgttcatcacgggttttgcaggtattacgaagaatggaatttcagttcgtataacgaaatcatcaatggcgtttgtactttcgtaaacgccgaaggcttgttaaaaatgtttggagggctggaaccgtttaaagagacacattcgctgagccgaaagaatttcgaagagtcagttcattttgaaataccttaaccaatgattaaacgcaccctgtattttggtaatcccgcttacctccacaaaaaagaccggcaattgaaagtaattgatccggaaactgaaagagaaaaagcatccatcccgatggaagatattgccgtggtggtactcgatcatccgcaactaaccctgacccatgccctgatgtccgatctggtcgaccgcaatgtggccctgatcagttgcgacagccgccacatgccttcgggactcatgcttccactggacggaaaccacgtacaaaccgaacgtttccgcctgcaaattaatgcttcggaacccttgctgaaaaacttatgggcgcaaactattaaagccaaaattgaaaatcaggcagcgttgcttaaacgtctaaacttcgacaataaacggttgctggcgctgatccctcaaattaaatcgggcgaccccgacaacatagaaggcagggcggcatcggtttactggaagatacttttcgaagaacatgatttcacgcgcgaccggtttggggtggaacccaactctcatctgaactactgttacgccatactgcgggctgttgttgcccgcgccctggttagcagcggcctgctgcccaccttgggaatatttcaccgcaacaaatacaacgcctattgcctggccgacgatataatggagccttaccgtccgttttgcgatgaactggtgtacgggctatttgtaaagggagaaatcgaatcggaggaactcacccgggaacacaaagcccgcctgctctcaatcgcaagctgcgacgtgctgatagacggaaagaaaagccccttgatggtagccatgagccgcacaaccaactcgttgttcgaatgcttcgaaggtacacgaagaaaaattgtgtaccctgaatttgcagatgactgaacgttaacctgaaaccgtatgtcgtcgtttgacgccttaaaccaatatcgctgtatgtgggtacttgtatttttcgacctgcctaccgaaacccaaaagcaacgcaaagtagcggctggctttcggaaagaactggtaaaagacgggttcagtatgtttcagttttcgatatacatgcgcaactgtcccagccgcgaaaatgcagaagtgcataccaaacgggtaaaagggatgctgcctgaatacggacatgtgggaatactacaaattacagataaacaattcggaatgatggaactcttttttgcaaaaaaagaaattgagaaaccagccacagtacagcaacttgaattgttttagaataaagaaacaccgatacaagaaataaaaaacggggcaaaaaccccgtttttttgtatcctgacaacttttacaattctctgttcgccagtcgaatatacggcacacgttgtcagagaactttataaagatacaatttgaaagcaaatcacaacctaaacaccagcttcattaccattcctatccgttgtcagagaactttataaagatacaatttgaaagcaaatcacaacacggaacagcatctattttaatcaaaactcgttgtcagagaactttataaagatacaatttgaaagcaaatcacaacactgcattctgagccatttgaaggtcaatcgttgtcagagaactttataaagatacaatttgaaagcaaatcacaactagaaattgtcacctttgtatcaacatcatgttgtcagagaactttataaagatacaatttgaaagcaaatcacaacttattggaaattcaaaacatcttcctcgtcgttgtcagagaactttataaagatacaatttgaaagcaaatcacaaccaacacaatcaataacaggttcggttgccggttgtcagagaactttataaagatacaatttgaaagcaaatcacaacatattgtcggctagttattttaccggaaaagttgtcagagaactttataaagatacaatttgaaagcaaatcacaactacactgaaaaccacatatatcctctgattgttgtcagagaactttataaagatacaatttgaaagcaaatcacaactatttgatggactaggcaatgcagcttatggttgtcagagaactttataaagatacaatttgaaagcaaatcacaactgtcaacaagttctaatgccaatttttcttgttgtcagagaactttataaagatacaatttgaaagcaaatcacaacatgcctcatattttattgacattcgtgatggttgtcagagaactttataaagatacaatttgaaagcaaatcacaacaccggaaacttagccactaaagtagcgggggttgtcagagaactttataaagatacaatttgaaagcaaatcacaacacattgcaggttcagccttatccaaacttagttgtcagagaactttataaagatacaatttgaaagcaaatcacaacatctgatagttttagataatcctctttcttgttgtcagagaactttataaagatacaatttgaaagcaaatcacaacaaagcgctattttaataaaatcaatgggtagttgtcagagaactttataaagatacaatttgaaagcaaatcacaactacttttacagcttaaagttttattttatagttgtcagagaactttataaagatacaatttgaaagcaaatcacaactacaggcatgcggtattctgattactcgagttgtcagagaactttataaagatacaatttgaaagcaaatcacaactaagatcgtattctttcctttgcgaacatggttgtcagagaactttataaagatacaatttgaaagcaaatcacaactgttagttcgttgaaagtataaaattacatgttgtcagagaactttataaagatacaatttgaaagcaaatcacaactttgcaatattaccggatgaattgatttgggttgtcagagaactttataaagatacaatttgaaagcaaatcacaactgaattcgaactcgtcttcgatgctttcgagttgtcagagaactttataaagatacaatttgaaagcaaatcacaaccaacatcaacccattactacatactcgaaagttgtcagagaactttataaagatacaatttgaaagcaaatcacaacatacgaacatcaacaggattgtgttagttggttgtcagagaactttataaagatacaatttgaaagcaaatcacaactttcagaatttaaatccactcttgagaagagttgtcagagaactttataaagatacaatttgaaagcaaatcacaacttgtttcacgttttaataaaactaaagctcgttgtcagagaactttataaagatacaatttgaaagcaaatcacaactagtcggaacaagtggaagtgctattttaggttgtcagagaactttataaagatacaatttgaaagcaaatcacaacattacgttcagcctattttttgcctgtgccgttgtcagagaactttataaagatacaatttgaaagcaactatttgtctttctgatacaccctcacgtaatcaatacaatactgatgcggaaatgcggcatcgttaatccccttttgtccgccccaggcgccgccaatggcgaggttcagcaaaaggtactgcggtttgccgaaaggccaggtttgttcattgtttgcgccatcattgaggtaggtaaaatacttctgcgaatcaacgaaaaagtcgagccggtctttgctccattccagcgcatacacatgaaaatcatcccatggcttatcgataacaacagtacttccttttccagtcccttttacatggttatattccccggtatggatgttggcatgtatcttcagcgaatcgaaacccacattttccatgatgtcgatctcaccgcagacgggccaacctttttcttttttgttggtacccaacatccagatagcaggccatgtccctttcccgacaggcagtttggcacgcacttcaaatcgtccgtataaaaaatgtttcttgttgaaggtattgatacttgccgaagtgtattcggcgtcctggtatttttccttcctcgcttcgatgatcagcatcccgttttcaacccgggcattctcttttcggtagatcgtgtaatactgtgcttctttgttacggacaagacccgattcgtagccccatttatcggtatcgggcaaaccattggaaccaaattcatcagaccagaccagttcgtatttttgggcagttatttcttcccggcatccggaaaccaaaaaaatcaggaaaataagaattagtagcttcatggtattctgttttttttgattggttgtatttctggttctattcaaaggtaaaaattgtaaaccggaaacccaattgtatatctgcaatgttattaaaatatcacattatcacctgattgattgttcctttctctgaaatgtatacttttgcagtcccttttttcgggatttttacacattaaatacagaatattaaatgattaccgtatcgaatctaagtgtgcagtttggcaaacgggtgttgttccgcgaggtgaatatgaaatttataccgggtaattgctacgggattatcggtgcaaacggcgcaggaaagtctacatttctgaaagccctttacggcgaggtggacagcactaccggctcggtttcgtttggtccgggcgagcgcctgtcggtactgaaacagaaccactttgagttcgacgattgccaggttctcgataccgtgatgatgggacaccgccatctgtgggatgtgaaaaatgagaaagatgccatttattccaaacctgatttctcggatgaagacgggatacgcgctgccgagctggagtcgctgtttgccgaaatggacggttggaatgccgaaagcgatgcggccagcctgctcagtgggctgggaattaaagaagaacatcattacaaactgctgaaagagctttcaggaagagagaaagtaaaagtactgctggctcaggctctgttcggaaaacccgacaatctgttgctcgacgagccaaccaacgacctcgacctggaaacggttgactggctggaaaattacctcaccaatttcaataataccgtgctggtggtttcgcacgaccgccactttcttgattccatcagtacacatacagtggacatcgattacaacaacatcagcctgtttgccgggaactacagttactggtacgaatcgagccaactggccttgaggcagcagcaggcacagaacaaaaaagccgaagaaaaaaagaaggagttacaggaatttattgcccgttttagcgccaacgtggcgaagtcgaaacaaacgaccagccgcaaaaaaatgattgagaaactgaatattgaagaaataaaaccatcaacccgcaaatacccgggaattatttttacgcccagccgcgaacccggaaacaatattttggaagttaccgaactgggaggttcgttcgaaggacagatgctttttaaaaacctcagttttacggttgagaaagacgacaaaattgtatttctgtcgcgcgatacccgctcgatgacggttcttttcgatatcctgaacggactgaaaaaagcagataaggggaccttcgaatggggacaaacaatcaccactgcttacctgccgctcgaaaacagcgaattcttcaaaaaacctattccactgatcgactggctggcgcaatattctgacgataccagcgagatgttcatgcgtggatacctcggtaaaatgttgttctcaggcgaagaaatatacaaaaacgccaatgtcctgtcgggaggcgaaaaagtacgctgcatgattgcccgaatgatgttgcgcaatgccaatgtcatgatcctggatacaccgaccaaccatttggacctcgaatcaattcaggcattcaacaacacgctgatccgtttcaaaggaaatatcctgatgtcgtcgcacgaccacgagttcatccagacggtttgtaaccgcatcatcgaaattggcccgaaaggcgttatcgataaacggatggattacgatgattacattatggatgaaaaaataagagagttgagaaacaggttgtattaatagatggtttgattactgaacggttgtagaaaatgattttcaatttttctgattactgagaattacgaggagacactttttacccggctgttaatttggaatcttcagaaaatcaatccgcttaaccagccccagacaagataacgaaggaattttccggccagcatagcaatggcggtaattttccagtttgcgcgtagcacgcccagccccacggcaaatacatcgccaaccaacggcagccaactgaaaaaagcgaacactgcgccacgtttgtacatgcgttcatgccattgttcaatcttttcacgtttaacccggagatatttttcaatccattcccatttgcccagataccccagatagtagctgctcataccccccagccagtttcccagagttgccaccgcaatgcacaaaccggtatcaaaatcaccggcaataagcaaactcagtaatgcttccgagctgaaaggcaaaaccgtagccgccaaaaagctggccagaaacaaacccaacaatccgtattcgtagaaaagttccatgaagcgaaaatacggatattcttcgggtgtcgcgagttttaatcgcggatttgaatgaaccaactttaaccggaagtttaaaacttccacacccggtataaacttctattattcgggattgttgattacctttgaagcctgaaaaacgaaacaaaatggaatcgacacgacaaaataaaatatcacgactgatacagaaagagctggctgaaatttttcagaaagaaagccgcgaattgtttcacggtaaaatgatcagtgtaaccaccgtacgggtaaccagcgatttatcacttgcccgggcttatcttagtattttcccttcagaaaaaatggaagaattgatgaaagaaatcaaacagcttacaccgaaaatccgttttgaactgggcaaaaaaacaggaaagcagcttcgggtaattcccagtctcgaattttatatcgacgacagcctcgattacattgataatatcgaccgccttttaaaatagaaatatgcagtacgatcccatcaaacggtcgctgggccggtttttcaaccgcctgcctgttctccggaaactgttttaccgtctgctcgactggttgctgctccgttcgtggcacatccgaaaagaactgcgccaattgaaaaacgaaggtttgtcggcccctgtaattttcgatgcaggttcaggcttcgggcaatattcgtaccgcatggccaaaatgttccccaaagcaagcatcgttgccgccgacattaaagaagaacagattgccgattgcaaggactttttcagcaaaacaggtctggctgaaagggtgcgtttccggctggccgatctgaccaaatatgcagtaacagacaaatacgacctgattatttcagtggatgtgatggaacatattgaagaagaccggaaggtattctcaaatttttgcaaatcgataaaacccggcggggtattgcttatttcaactccatccgatcagggtggttccgatacacacgatcatgaagaaggagtgcatggctttatcgacgaacatgtacgcgacggttacaacattctggaaatagaagaaaagctgctgacggctggtttccgtatggtggaagcacgctattcgtacggaactccgggcaaaatttcatggaagctttcaatgaaatatccgatcctgatgctcggcttcagtaaattgtttttcatcattcttccattttattacatggtaacattccctttttcggttgtattaaattatctcgacatcagcacaaaacacaaaaccggaaccggtttaattgttaaagcgaccaaataagtgattgatgatttatattggctattattattgtttttagcatgaaccaattttgttagctcgaacttgaaacttgcattttacatagcccgccgctacctggtctcgaaaaagtcggtcaacgtgatcaacattatttcgggggtttccgttgccggggtttgcaccgggacattggcgctggtaattgtgctttcagtaatgaacggcatcagccagttgattgccaccaatttttcgtcgttcgaccccgacctgaaaattactcctgttgagggcaaatcatttctgacaactgatcccgaattcgaccaggtgaagcaacttcccgaagtagcctcgttcaccgaaaccattgaagaaaacgcactgctgttctacaacgaacgcgaatacccggccactgtaaagggcgttcccgaccgctacgaccagattatcggacttgattcgacatttattacggaaggaaattttatactgaacagtcctccgcaccgctttgccgtggttggacagggaattgcatggtatctttcgctgggcgtcgcgtttaccgaccctgtaagtttttacgcaccgaaaaaaggaaagacatcgcgactgaacctgaacgacgcctttatacaggatcatctttttgcttcgggcattttttcggtccaccaggaagttgattcgaaatatattctggtacctttcgactttgcccgtgatctttttcagatggaaacccgggtcagttcggtagaaattcagctaaagggaacggccaatataaaagaagttcaaaagaaaattaaaaatatcctcggcagtagttttgaagtaaaagatcagtacgaacaacacgaactgatttataaggtaatgaaatcggagaaatggtacattgtgctgattcttggttttattctggtaattgcctcattcaatattctaagttcgctgagtatgctcattatcgacaagaagcaggatgtggccatattgcaaagcatgggcgccgaaacgaaattgatccggcaaatattcatggtcgaaggctggctgatctcggttgccggggcgctggcaggaattgttctgggagttattctggtatggttgcaaactgaattcgaattactgaaactgcccggagccgaggggacatatatcatgtcagcctatccggtacaacttcaaattcctgatctttttattatcttttttttggtagctggtattggctttcttgcttcctggtatccggtccgctacatctcaggaaaatatctggtattcaaccaggaatagaaacacgtattctaatcctgatattattcaaccgtcacttccacccagtacccgttgtgtttccggatat

SEQ ID NO: 2612 - DNA, 25070 bp, synthetic construct
  source 1..25070: mol_type = other DNA
  misc_feature 1..25070: note = Synthetic
atagctaaaggaaatacaaaagaaggcgagcatatcacgtataaatttacccataaaagtcttcagtataagtctttaaaaatcgtggtaaccagagggaaagacaaaggagagttttatataaagccacaggaagcagaagagcccaaaataacccgtgtggatatactggatattaatggacaaagattaccgaagggaaagcggctgcattacactgaaactttaatcgtcaaggcgcattgcgtaggaatgttcgggcagaaagtttcttttaccctttgggaagatgatgcaataggaaaggggcatgatccggtgatcaatatgatgaatagaattaatcctatgcctttgatcggagaagtggatcatcaaggtattgcccgggttgttttcaggcttccaagttatacaatggcagttcagattgccaatgccgggctggcaaaaggtgaccggagcgaaggcaatactcatgaatattatgtgactgcagaattggtttccaaacatattctggtagcaagccctaatgtaaacgtcgtgaatcctacccatcttcctgatcccatcaaaaaaccgaaaccagatgaggttaaatctacctctgcaaaacctccggttaattcgccccataaagaaaagataaataagcccaaacctaaagaagaaaccgctaagtttccccaaagtccggctgctaagaaacaggcagatcctgaaggaaaaatcttaagcgccgagtttacggacggaaccggaaagaccctggaaaatgctaaaacaggtgatgttgtatcaattaaaatggtcactcagaatatgaaagggaagaatgtaatagtgagaatctgggaagaagatttttcccgatacagcaatgaccttctatatgaaaaaacagtgactttacgatatcataccagtaatgtaatcaataatgtaaagctgacccgtctaatgtatacgaaaagcaacgaatggggcgaaggcagcgaacgagagtattttatagaagttgaacaccttaatacctccgtgacctctcaggtgattccggtaagtgcagatggtgaacatgtggaagtggatgggaatgattctgttgctgtgattaaagagaagagggaagaaaagaaaggttgtatttgtgaagaaagtaaattgtattggggtaaatattttacatgtctggaacgcaagaaaatcatagaaatttcaaaacggttgttatgtgatcctaatcatttgacttctgcgatagcattggaaacaatgggtacatttaatacagcattagtaaatcctttggagtatactgggttaattcaaataggttatgatgctgcaaaggatattaatagacgaaaagggacaaatataactgcgggaagaaatggaaaccttaaaaaaatgtccaaaatggaacaattgacttatgtggaatattatcttgaaccatataagggaaagctaaataccttagcagatttttacttagctatattaatgcctgttgattgtgggaagggaagtataagagatcatgtggttttcgataaaaatttaaaattagattataactctagaggagaagtaattaaaaatacaaaatgggtgagaaagaatgcttattcaaaaaatccggtttttcacaaagaaggaaatgatgaagaaggcaaaacctatgtatgggaaattgctagagaaatagaaatatggtataagaaaggagaagctaataaggaatctatattttcctgtcagaaaaatatagaagtaaaggaagaaaagaaagcttccaaatggcatgatccaatagatgatccggaaataacactattcaattttaatggagactataatccaacaggatcctcttttgggcttgtgagaaatgggggtaagaaaaaacatcagggactagatatttttgcacctaaaggaacgcctgttaaagcatgtttggatggtacagtcgttttaatatcagaaaatgctggtgcatttgggagatttgttgtaatagaagtaaacaagacagacttggacaagtctaggaacaattatgaattagaatataaaggagagaaagataaaggacctggttttggtgattctgaaaaacgattcttaagatatggacatcttagcgaaataaaagtagaagataaacaaaaagtaacagcaggtatggaaatagggaagagtggaaatagtggaaatgcatctaaacaaagtatcaaggcaaggcatttacatttcgaaattactgatgcgaagactgctggtgatggtttaaataatagagagaatcccgcattttatgtaaggctaaaaacaccaaatagaaatagacaagagaataataaaaaataaccaatgaaaaaaaatattgtagctatttcatattttattggaatactaatttcatgttctggtgatggaagcagtaaagaaaaaagtgaaataaaaaagaaaataaatgttgatacaataaaccttagtaagactgaaaatttaaatagtcctgatgagaaactggaagctaatgatgaaattatagaagataaacaattttcaaaatggaaaggagagtatcattactttttccaatatatagatcataatgggatatcatcagatttgaaagctaatattaacttaataaaatcagatagctgtgtttttgaaagttggtttgaagatccaaatgatgaacagcataatagaaatgggtacttaaaaatgcttgggcatatatatgtttcagatgataaaaatcttaagattatttttttagaaaatacgatattaaacggtgaatctcctaatttggatccggtttttacattgatcgataaaaggaaccagttttatattgaaagttttttgacctctcctcctcataatgggattgttgaaatgccgttacaaaaagtaaaatgataagtttatgagaatagtcttattgatcacatttctctttgtgataggctgtcagaataaaaaaaacaatgatcttatggctcaaaaaactatacaatctgtacggaatagtacattaattgacggcatacatttagaaaataatttgctttttaatgagaaaagcattcctcttaaaaagtttaaatataaaggagattacatagaaaatgttaagataaaaaaacttttagataagagcttcaggagtagttttatcgaacatttagcggatattaagacagaagatgatgagctaaagtcttcattcatttgtcagctgttattattgagaattgcagaattatcagatagcaatgctttttatatattatctgaaatctcaaaaaatgaaagcgtttcttataatggaattgagttatatgagaatcttttcattcagatgtttttgaacgatccttatttctttattcaacaaagtgtaaaatataatgactcttcattgattgattatattcttgcaacatctcaaacttattttgttgatcaggatttcttggatatgaatttagggtatatcaaagataaagagcctgatgtattgcttttaaagcttgaagctcaaaaggaaataaaatatcttcctctgatcaaaaagattgagggaatgcctaaagttaaagtgcagctcggaccatcattctatactggttttgaaacaattaataaagattttgtaaatgttaattctatttttgggaaagagttgattcaaaagatgaatggaacagagaaaagctactttaaacagcatattcttattagtgtacaaaagtttcgagtaaattcacagcaatgaaacaaattaaaagacaaagaatggaaataaagaaaaataataaaattattctattactgatagtattattcttttatggctgcaaagagcaaaaagaaaatcaaataaagaaaaaagatgtttcactaaatccaaaaatagcaggaaacttggctgttaaatggctaggaaaatatcatacaaccctgactaatgataagaaaagtacagatagtagagatacagatactgtggagttaattattaaaaaagattctgtagtttttcatgtcgacagatattggggagaatataattacctgcttcgggcgtcagaagtagaaaacggcattaaactgacttttgataaggtactggatggggatgcagctgatgtattacaaaagactaacgactttggaaaattgttctttgatgggaagaattactattggcaatgtccttatcttgatatgtattacaataataataacaaaaaatatgtacttaataaaatgaagtaattgttaaatcttaggaactacagaatctgaaagtgaaaaagacctaatttcaacactcatcatcctttgttatcaccaatatttatactgaaaattaaaatgaaaaataaagtaaagagactatcatatattatcttcttgatctatatgggttcctgtcaatcaaaagaacagaaaccattaaataaaagtaatatatcgtatcaatccaataatgatgagcctaatctatttattagtgaaaaaagattagagggtattgaaaaaagatctgatgaacccaaatcaaagtcatgtacattagataatctttctgctcaatatagttttatatggaaagcaacagcatattccaatgaaaaagatcaggaataccctacatcagcattgatcattataaaaagtaagcaaaatggtaaagagcaggagatttattttgaacctaattcatggacatcttataaagatttgccttgtaatgaattggttgtgaaagattttaattttgatggacttgaagatattgcaatagtatgggatgagggcggaaatgcaggaaaaatatatgagtattattttcaggataaaaatggtgctttttcaccagtggagtcttttcctttacaacatgggatgcttgctgaagaatttgatgcagcccataaaacgattactactcgaagtattgtaggatgttgccatgcaaatatcaatacctataaactaaagcctaatggaagctgggaatctctttcagaacaaaaagaaataaaacagaataaatgataaaatatctatggatagtggtcactttgggaatgctttcatgtataaaagatagaacaataaaaaaggatagttcaaaggattctgtaccattaatgggtcgaaatattagtaatgttgagatcgaaaataatgattcattgagtgaaaatgaattggaaggagaagatgaatttatatcagaaaaattgtttcaaaaatggaaaggctcgtattatattgaaaatagtgatataattgatggctgggggagagaatctattcattatgcagaactggatataatacaacccgatagttgtgtatttaaaagttggttagcagataacaatggcaataggtataataagaatgataattatcaagaatacattggaggaattttagccacaactcataaagattctatagagttttttacaaaaagaatagtggaaggtggaaatgaaggtctttctcctctattaactttgattaagcgtaagaatgaatattttatatatagttttcttacttcacctcctcacaatggaatcatggaaatgccaatacagaaaataaaataggataattctaaagctttaatttgttcaaaatacaaaagagctgtcacaatgacagctctttttatgggttaaacataagttttcaaatcagagaactttatgattgacggatcatattctgtggtgagttccccaaagccatatttacaaaaaataaaaggcagcccgttggaggtggcagaatcataatcggtttgtgtatcaccgatgtagacagagttttctatagataaatgatttctatccatgagaagctttatattctcggctttaggcttttgcgttcgtccgtgagattcaaaatctgtaaagagcctattgaactggtaatattctaaaaacgattcaatatatccatcctggcaattgctgacaataaagaggttgtgcgtattgcttaagctttttaaagtatcttcaacaccatcgtacaaaataccgccctgcacacgcaatactttattctcctgagaaacaatctctgaaagaatatcctgaacctcgctgtctgaagttcccgggataatatcctttacaatatcttttgctaacagacccatatattgatccatatcctccggttttaattccctgttgatcagttggcgtcgggttaaaacttcattccatatcccgataatcgttgctctggggtcccataaagtgccatccagatcgaatattaaatttttatatttcaaagtgtattttttaataggtaaataaattatacttctgagattatattttgtggtttctttccttttgaaagaattagacttaaagattgttcatggatttgtacatattcatatgtcttatttacaatgaattgtatgagctcatgtagaataggcggattatcatgtagaagctgaagaaaatcaatatcagaaaaattgatagaataggatttaaaatctccaatagtctctacacctctccaccatccatgaaattttaattcggggatatactctttaaataatgtttgatttatgttttcgaaatccagaattccaataaataactcattttgattatttccatacccgctaaatggttctatgccaaaacaagtgatttgtttatcgttttctttaaattcttttaaactaaaccagatatgtgaatttttctcttcagccttaggtgtattttcaaagaaaaaatatttctcctcataaatttttactaattccttttttaattctttcctaattgtatttaatataatagcctttgcctcattaaaattatcaactatttctttggcactttttaaatcttttagaagaatattctttatttctttactcatatcattattgatggtttgattagttaatttttttaccaaatgaagatattgcttaatagattctcttaagactggttgatcggtggtttctttgtgacatttttcaagccaattcttaatatgatttttgtaagtaatcaaatggaaatcttcatcgattttcagaattcctttactttcattagaaggctcatcaccaaataaatttagatagagtagtactgaggatttatagtgatttttatacctttcaagctgagctgcctgatcaggagcataaattttattctcaataataatggtatgcttatcatcttcaagaatcagatcaataaatcctccggtttttctttctatatctacaattccaagatatttttcagaagtaattttagcattctcaaaattaaactcttgaatagattttaaagattctacttcatcgaagaatagtttgagaaatacactgccttgtccatgtgatcctttagggtttaatagttctccaatgattgcagaatgggtatacctttcattggtttccatattcataattgaaaaaagattaaaattctctcctgttattttagcaatatcttcatgtttttttgatagtactgatacactttttaacaaatgatctatacttgataattgaataattttctccatggtttacaaaatcatactcagctgcactctttttctagcctcatccacttccgttaccttcactcttacatgttgatgaagtttcaccacctcattcacatccgatacaaaaccgtccttcagctgcgaaatatgaaccaagccactttctttgattccgaggtctacaaaacatccgaaagccgttatattattaacaattcccggtaagatcatacctgcttttaaatccttaatgctttttacattaggatcaaactcaaatactttagctgcttttcttgggtctaagcctggtttttcaagttcttttaaaatatctttgattcctaaaattcctatttctcctgtaatatagctttcaggttttaccaaagcaattttctccttattggcaatcagttcatgggttttaatacctaaatctttagccattttctctacaattccatatgcttcagggtgaacagcagaattatccaatggattttttgaattagcaattttcacaaaagccgctgcctgctgaaatgctttttcaccaagccttggaacctttttaagctgttttctgtcttcaaaagctccgttttcagcgcggtaattcacaatgttttcagccattttctcaccgattccggaaacatagcttagcagagatttacttgccgtattaagattgattcctacagagtttacacatttcatgactgtagaatccagttcatttttcagttgagtctgatccacatcatgctggtattgtcccacaccaatagatttagggtcaatttttaccagttcagccaacggatcagaaagtctccttccgatagaaaccgcaccacgtactgttacatcataggtaggaaactcgtcccttgcaattttactggctgagtaaacagatgcacccgcttcagaaaccacaaacacctgtaatggtttatcaaaagctattttcttgatgaaaaattccgtttcacggcttgctgttccgtttccgatagagatcgcttcaatattataagcatttaccatggaacggatttttttcattgccattccgctttcattctggggagcgtgagggtagagggtctcattatgaaggagatcacctttttcatccaggcagactaccttgcagccacttctgtaaccgggatcaattgccagaatccttttttcacccaaaggaggagccaaaagcagttgactcagattctcagagaagatctcaatcgcttttttatcagccttttcttttgcctcctgtaaagcctcattggaaatggcaggttctaaaagtcttttataactgtcctttatcgctaaagcgatctgatcagaactttcattatcggatttaataatcgctttttcaataaaatcaatagcctcttctttatcaattcccacatttacctttacaaaaccttccgcctctgctcttaacatcgcaagaagcctgtgagaaggagttctgctgaggttttcttcccattcaaagtactgggagaacttctgtgcatcttcctcatcttttttagctttaacaacttttgaagtgatccctgctttacgttggtacagtcttcgtagatttttacggacatacatattctcattgatccattccgccatgatatcccttgctccctgaagtgcttcctcttccgatggaacctcattgttcaggtattttgaagcaagaaaatgaacatcattgtttttctggctcatgatgatcttagcaaggggttccaatcctttttccttagctgtatcagccttggtttttctgcgctttttgaagggtaaatataaatcttccagctcctgaatatcaaagctttcttcaattctttgctggagttccggtgttaaagcattttgctcttctatagattttaaaatagattcttttcgctttacaatctcttcaaattgtttactgattttggagatttgctcaatctgcgtttcatcaagatttcctgttttatcttttcggtaacgggaaataaaaggaatagtacagtcttcggctaataattgtaatgtattgttgatgctcttctcagaaatattgagctgcttctgtataaattctacggtcgtcattgttctgttttcggatagctaaaataatgttttaaaacgaaaaaaggcgagttaccccgccttgaatgttttcacaacggaataatccttattgtgagttgctttcaaaattattagtacaaatatagaagaaaaaatcttttaggtgattacgggaatcctcattttaaatattttttttatttctatttttataaggtatctaaaattaataatgatgattaaaaatatacttggattagatttgggaaccaactccattggctgggcattggtagaaatagatcacgataataaaattgttagaattttagggatgggttctagaattctagcaatggatgctgctgaaattgcaaaatttgaaagtggtgctaaaacagaaagtggtgctgctaaacgtactaaattgcgttctccaagaaaactaaatgaaagatttttattgagaagagatagacttcattgtgttttaaatttactgaattctcttcctgaacattataaattatctattgaatttgaaaatgaaaaaggcagacgtagtggtaaatttaaaaaaggaactgaagagaaattagcatattataaagatgataacggaaaattccaattcctttttacggatgtttatcatcagatggaaaatgattttaggataaagcatcctcaaatgtttcatcaaagaaaaaatggcaatcaaactaaaatcccatatgattggacattatattatttgagacataaggcagttacggatagaaactttgaacttactaaagaacaattggcttggattacattaagttttaatcagaaaaggggttatgaaaaagtaattgggcaggatgagaaagttcaaaaagaaggagagttaacagattcttttgtgggtaaagtaaaagaagttaataagcttgaaaatgaagatgcttatcaaatcattctagttgataataataacgaagaaatagaaattttcaaatacagagaagaatcaaaaatcgcaattacgaagattggggatttgaaagaggttgaaattgtctcaaaatatgatgacgatggtacaattgattcaaagaaaacagaatatattattaatgaaattcgtgagtttctaataacagatgttagaaatacaggacgaaaaataaaagaaaatttcatttttgaagtagaactagagacaggttggataaaagagcagcaaagtaaatttacaccaaaatggaaagatactaatcgagattttatcattaaaactaaatatgatgaaaatggaattagaatacaaaaaggagcagataaaggtagaaacattaatattccaaaagaagaagattggactttgatgaagctgaaaacagaaacttcactcacctctttcaatacagaaaacaataccaaaggtgttgcttcctttgtctattataatcttctccaaaatccaaagcaaaaaattaaagctgatttaatctcagtaatagaaagagattattaccgtgatgaattggatgtaatatataaaaaccaagaaaaatttcatccggaattaagaaatcgaggtttatatgaacaagcaattcaacttttatatccaaataatcttaatcatcaaaatacaattaaagaattagattttaatcatttgattaaagaagatattcttttgtatcagagagatttaaaatcgaaaaaatctttaattgctaattgtatttatgaaaaggaaaattttgagaggacggatgaaaaaactggcaaaaaatataaaaagcccttaaaagctattcataaagctaatccgttttatcaggaatttagattgtggcaatttattaaaaggctgaaaataattaagaaagaagaaattattaatgaagaaattaaaattaatgtagatgttacagatcagctattaacaactgaagtaaaagaagaattatatgcttttttgaatgataaggaaaatgtaacagagaaagatattcttgggtttgtaaataaaaactacaaaaatttaaaaatttctgcagaaaattataaatggaattttacctcagaaaaagaaccttgtaatccgacaagatataatttcattctccgaacaaaacgaattaagggattcgattatagagcatttttgactcccgaaaatgaatataacctctggcatttcttttattcggtaaagaaaaaagatgaatttaataaaggattaaataatgttatttcacgattattagataaagcagacttatctagagagtttcaatctgaattggttaagaacttcagttctttcggaggatataccaatgattacggaacttattctgaaaaagctattaaaaaattattaccatttctaagacttggaaaatattggaattcaaatgatattgataatattctttcaaaaatctcccacgagataaaacaaaaggttttagataaagaggaaatcaatggagaattaaaagactttcatggtctttgggtttcgagtgcgtgttatctggtttatggtcgatattctgaggttggagaagtgcagttttggcaatcgccttatgatattgaaaattacttaaaaaatgaattcaaacaacattcattaaacaatccaacagtcgaaaaggttttagttgaaaccttgcatgttgttaaagatatttggaaatattacggcaaggaaataggaacagatgaagaagggaaaattatttatgataagctattcgatagaattcatattgaattaggtcgggagatgaagaaaaataacaaacaaaaagagagagacgataaacaaaataaagaaaatagaaaagctaatgaacggattgtggagattttgcgtgagttaaaacagaacaattcttcactacaagaaaaatcaccatttcaacaagaaaaattgagaatattagaagaaagccttctgtcttctattgaatttgataaagataataccgagtatcagctttctagtggaaaaataactaaaaaagaaatcaaggatataacctcgaaagaattttctaaaattactaggagtgattttgaacgatataagctctggttagaccaacgatatcaatctccttattcggggaggttcattaagttatctgatttgtttgaccgaaaaaaatatgaagttgaacatatctttccgcaagaacgtattactttaaatgcactttacaataaagtaatatgtgaaacggaaatcaataaggagaagaaagctttgacaggatatggatttgtatctaatgcaaaatctaaaaaagttttttgttctgcatatgattcagagattgagataattgatataaaagattacgaagatttagttaataataatttctccggaagaaaaagagaaatattattaagtaaagatataccggaagaatttacaaatagtcaattaaataacagtcaatatatttctaaaatggcgatgaaactgttgagtaatattgttcgtgaaaaggacgaagatacattccgttcaaaaaatgttttggctacaaatggaacaattactacaaccttaaaaagacattggcaactgaatgatgcttggaacgaaattatttctccaagatttaaaagattgaatgaattaacaaacacaaatttatttggacattatagagaaattaatggacatgaaatttttatcaatacagttcctgaggaagctaacaaaaacttcgattctaaaagaatagaccatcgccatcacgctttggatgctttgatagttgctttgactacggaaaatcatgtaaattatctaaataatatttcatcacaagaaagcaatgaagaaaaattaaaaactagaaaagcaatcaagtttcaattaactaattcaagaagaggttttaatgatgaaaaagaatggtattttctgccacctgcacagataaaaacaaaagatgggattgatgaatttgagtatcagtttaaagattttaaaagcaaagtattcaaagatattgctcaaaatgcattagaaaatacgatagccagttttaaacaaaagaatcgcgttattcgacagcgttggaacaaatatttgaaatctgaggatggaaagctcaatattatcaaacaggaaaacttaaaggaaattataaattttaatgttagacaatctctacacgatgcaacattctacggaagaactaatctatattacgaaacatcaataatgactattgaaaaggcgataaaagaagattttgttatcgtagactataatgtcagaaatgaaatagaaaatttaaaaagagaccattcaccacttacaaaaattatttccgttttatctacaaaacaccagaatgttcaagtatacaataaatttattgcatcaagatacaatggtgaattagaaaaatttgcgagtattcattcgaatgcgattgaagataaaataaaaactataacagatacggcaattcagaaaattttaatgaatcatattaagaattatattgaattagatgtgaagaaaaatgagttttacaatacaggaaaagcattttcttcagatggaatattagaaatgaataacaatatattggctctcaacgaaggtaagccacatcaaaaaatatttaaagtaagaactgcagggaaaatgggaaaagcatttcctatttccgaaaatgttttcaagaactcaaaaattgtaaaaacagcgggagatagtaatttttattgtgcattttatcaaaaaggtacagaaagaaaattctatattccaactttgcgagaatccgttgaaagtttaaaacaaggatttgaaccttgccctgcaatacatcctgaagattcagatttcaaattattgtttgtattaaatccaagtgattttgtgtatgttccaacggaagaggagagagagagttctattttgattgattttaataatttgagcaaagaacagatgaataggatatacaaatttacagatggaagtggaactactatgaattttgtgtctgctaatatctctaatccaattatagatattaaagcggaagaacataaaaaaataaaagataacttattattttgggaagaaatcaatgaaacaaaaaaaggaattgttaaaaaaataaaaccattatttaatgaagttggattaggttctgaaaataaaacaaaaagccaaaatacttccaatagagaacaaattaaatcgatttgcttgaaattgaaagtagatagattaggaaatatctcaaaagcataattatgataacccgctccatctacattggcaatccagcttacctcaaactaaaagatgagcaaatgaaaatactctgtccggaaacaaaagtcgaaaaggggagtatatctgtggaagatttgggtttattgatgttggatcattttcagattaccatctcacatcaattgattcagaaaatgatgggaaacaacgtagtggttataagttgcgatgctcatcatttgccacatgggatcatgcttccgttatatggtcacactgaacattccgaccgtatcaaagatcagttggaagctagtgaacctctcaaaaaacaactttggaaacaaacggttgaatgtaaaattgaaaaccaaaaagaagttttaaaacgtttaggaaattattatgaacctatgattgattatcagaataatgtgaaaagtggtgatattaccaatatggaaggtatcgcagctcagcattactggaaatatctcatcagtcttgattttctgagacaacgttttggggattcacccaatcaatttttcaatttcggctattcggttctcagaagtattgttgcaagagcaattgtagagaccggattacttcctgttcttggaattttccataaaaataaatataatccttactgcctggctgatgatttgatggagccttatcgtccttttatcgatttattagtaatgcaatggttggaaactaatcctgaaactgaagaattaactaaagaatttaaagctttcattttacagatagcgactaaagatgtgaaaataggggataaaacaagacctttattggttgcagtaaaaacaaccgccacgtcactgtataaatgttatacgggagaaaaacgaacgatctcttatcctgaattgatatgaatgccgaaaggtttaatgcttaccgaattatgtgggttttagtattatatgatttaccaacagagactaaagccaatatgaaagatgcgaatcgctttcgtaaatctttgcttgatgatggttttacactatttcagttttcaatgtacgtaaggcattgtccaagtcgtgaaaatgctgaggttcatattaaaagagtaaaatttatgctcccaaaagcaggaaaagtggcaattatgtgcattactgataaacagtttggagatattgaaatattttttgccagaaataaagaagaaccacctccagccttccagcagcttgaattattttaaattttgaatcctaaaaacaaaaacaatctactgattatcagtagattgttttttgaggctgtgactaatcacgaagataataatttttgaaagcaattcacaacaaaatgggcacatcccctcttgataaaggtgctgtgactaatcacgaagataataatttttgaaagcaattcacaactaacgtatctatcctgatatttgaacggctgctgtgactaatcacgaagataataatttttgaaagcaattcacaaccacttagcttatcaaaaaatattcttagatgctgtgactaatcacgaagataataatttttgaaagcaattcacaaccaacctcatcaattgttttatttgaaaattgctgtgactaatcacgaagataataatttttgaaagcaattcacaacacctctaggcgcatcatttccctgaattacgctgtgactaatcacgaagataataatttttgaaagcaattcacaacgctactttaaagaatggcttaatcaacgaagctgtgactaatcacgaagataataatttttgaaagcaattcacaacaacattgctttaaaaataccccctttcggggctgtgactaatcacgaagataataatttttgaaagcaattcacaactgtagctactgaaacatttatagacaatcagctgtgactaatcacgaagataataatttttgaaagcaattcacaacgttgaaccaatggcaattgttcattttacagctgtgactaatcacgaagataataatttttgaaagcaattcacaaccactgaatctatctaacgatgtcttaaagtgctgtgactaatcacgaagataataatttttgaaagcaattcacaactacaagtgaatttcattgtaaggatggttcgctgtgactaatcacgaagataataatttttgaaagcaattcacaacatagccaagactcaccatttgatctagtagctgtgactaatcacgaagataataatttttgaaagcaattcacaaccggcttctttatcttcttttgcccggattggctgtgactaatcacgaagataataatttttgaaagcaattcacaactgtttcgtcggcgtcgatgtatgcgccaaggctgtgactaatcacgaagataataatttttgaaagcaattcacaacgacgtcaataccaaccaagaaaggggaaaagctgtgactaatcacgaagataataatttttgaaagcaattcacaacctacccctgaattaataacaccgctcttaagctgtgactaatcacgaagataataatttttgaaagcaattcacaacaaaattaatgtaggtgcaaaattaagccttgctgtgactaatcacgaagataataatttttgaaagcaattcacaactactatttcatttattgcaatagcagaaatgctgtgactaatcacgaagataataatttttgaaagcaattcacaacgcaatatgcatatcaccatgactatctaatgctgtgactaatcacgaagataataatttttgaaagcaattcacaacaactgattaatgtatgaagacaaacggctcgctgtgactaatcacgaagataataatttttgaaagcaattcacaacctgttcttgtcttcttttttcttcttcaaagctgtgactaatcacgaagataataatttttgaaagcaattcacaacgtgttgaagaagtagaaaccagtgtgggaggctgtgactaatcacgaagataataatttttgaaagcaattcacaactttcagttccccggctaactttgccatactgctgtgactaatcacgaagataataatttttgaaagcaattcacaaccacatttgaatttaaacatttcctgtttagctgtgactaatcacgaagataataatttttgaaagcaattcacaacccaacgcaactacttccggtggcgttggtggctgtgactaatcacgaagataataatttttgaaagcaattcacaacttccaaacctttgcgtaatcatcatcactagctgtgactaatcacgaagataataatttttgaaagcaattcacaacacaactatgaatatggtattgccattggctgctgtgactaatcacgaagataataatttttgaaagcaattcacaacaatctgttattggcttcgtggtaaattcctgctgtgactaatcacgaagataataatttttgaaagcaattcacaacatggttcccgtgttgaattatcgggggctagctgtgactaatcacgaagataataatttttgaaagcaattcacaacatatccatttgagaataataaccagagactgttgtaactaaccactaagataataaattttaaaagcggtttatgaacatttacaaaatagaaaaatcaaataatacaagtcaaaaaatatatccaaattcattccaaggattccttaacttattttccaattttaaagatctaactatcacacacatgatattatataggtttctgttcatagggctttttgttatatttgcccgaaacttctaatcatgtctgcttcaaagattcaattactatatttattcaaatcccatttaggttttcgtgaatattctgtttcgacaattcttccccctgtcaatttgaaatttaaaaataaccatgaaatcaattttaaaagtatttaagtttttaggaaagcttatcctgggaattctcatcgtattattgttcttagggctttgttatcgattatttagcccaaaacctgttccgcccggtaaactcgttaacgttaacggaaccaacatccatgtaagagcagaaggagataagaaatctttacctacagtgattattgaggcaggagcacacagtaatactgatatgctgcattggattgcggagggcttaaaagataaaacgagagttatacgctatgatagagacggaaaatggtttagtgaagcaagtaatagtgataatagatcccctgagttttacgcacatcagcttcatgaattattagcgaaaacaggagaaaagccaccttatattttggtgggacattctatgggaggtccctataccagaatattcagggatctttatccaaatgaagtgaaaggaatggttttcatagattcaagtcatcctgaacaatggaaccgattagcacaaaaagagttggttcccgaagggcaggcaagaatattaaagataggatctatccttgcagatttaggtattttaggactttataataagatatttagtaaagcaccctatcaaggcgatggcttacctaaagaagtatacagcagatcacaatcgctcaccaatacctccggagatgtttatacgatgtttttaagagagaatgaccttaccaatgctgtgctgaagcgtgcaggtgaggcaaaaaagttagattcattaccagtgttggtgttcactgctacagaacagtataaagaatcccaaaaagaaaaatacagaagatccggaattgatcctgaaaaacaagttcaattatggtttgggatgcagaaagagctaaaagaactctcttctcaaggaaaacaaatcataatgaatgctagtcatggaagtatcattacaaaaaaagaaaatgcagaagtaataaacaaagagattcttttactatctgaaaatattgaaaaacaaaagtaatattacatagttaagccccttaattggggctttattatttttttaagttaattcttttcctttaagggcaaagtaaaggttttggaattcgtgaacgtgtcttatttctaattcactatcgtttcccaacttgataatccagcctttggaaggtctacaaataaacgtcagatgtgaaataccacttcctaagctatattcgaattggtcagcagattcatcattaggattatactcctctccgctattactttcaaatccaaaaataagtaaccatttctctgttaatggaatcggtaggcaggcatccggatgcaaatcattaatatataccatatctcccagatcatgaagatgatacacatattctatgttttcatcctttttatccattatataatttcctatgcgtaattcatttgtttccataaagtaaacttgtgtataatcacaaaaatagtgatgtatgaaggcaattcataaatagcagttgatgccggcaagtggagccggagttttgtataagtataaaaatagtatatttaatgcatcaattcataaaaatgaagctaaaagagatttcttgatgtatgttaaggaaactgcattcaggtttatctatttttgtacccgaaaacaataaactttttaaacagttcaataatatgaaaaaaattagcgtaattgcattagtaggagtaggattgcttgtagcatcatgtaatagtaaagaaaaaacagatacatcagtagctactgagcaggctgttgcagaaagcaaaggagaaatgttgacagtagatgctgcaacttctgtagtaaactggaaagcattccacaaaggaggatttgcacctcgttggggaactcttaacgtaaaatctggtgacttaagcatcgaaggaggacaagtagtagcaggaaacttcaatatcgacatgacctctattaaagtagatccggcttctgtaactgaaaaagataagaaaccggcagatcttgaagctcacttaaagaaccctgatttctttaatgtagagaaaaaccctacttcagattttaaaatcactagtgtagcagaccttaaagaagcacctgccgatgcagtagctggagctaataaaacagtaagcggaaaccttactttactagggaaaacaatgaacgttactttccctgcgaaagtagacgtagtagacaatacagcggctatccaggctaaatttactgtaaacagaacagactggggaatcaaattcggtacttctgaagcagatcctgctgaatggatgatcagcaaagacatcgagatcgcaattgatgtaaaagctaaaaaataatttttagattaatcaataatctatgagctgcttcctttgggaagcagcttttttattttgatataaagcaggtcatcattagaagcaaatgtttttttaaagcaaagtctgaaatttcaaatgtttcatttcaggaagctaagaagtgcaactttttagataaagaaacttcatggatacatccgcttagaaagaattaataaaatcaagtataaattaaatattcgtgaattcgtggcgtttatttttttgccacgaattcacgaatacttccagataaaactcagaaatctatgtctctatgtggtttaaaaatctaaccacatagagacataggttttagtgctgttgattaattattattttcagattacgatgattctgttatccctggcttttaaaacttatttaatatattttaagaaaatcatatcaatatgcagtaatcgttaaaatatcactaaaaaggtaaaatttatattttaataaaaataaaccatttaacgaataattttttatcaatattaatagtttttttcaaaacatagtgagaaatatgttttacattaaaattgtattttgtttattgatatacagttgtttatgtgtgttttgtttggcaataattttgtaatattatcgttagattttatgaaaataaacgcttctgagtataacactaaaaaactaaaatgatgaaaaagcatgtatatcctcaaagggagactgattcatcttccaatgaccttttggctcttttagttgaaattttaaatgttcttcaaaagaaagagtctgatcattttccgtactatgacagtgctgatgtcaaacgtctgatgaatattagcgacagtactttacatcgtatcaggaaatcacagaaaattccgcatgtcaagatcggaaataaaatattttacccaaaatcatttttcaataatgccttcaaaccatgaaggctttttttatgctgtaaaggcgttgatagataaaatactttgacgtactccgtatttccttcggctattcttcggaacaatgattctttttccgaagctgattcggaaaattctcgaaggactatcgaagaaaaaaggttttatgctgtcaaaaaatgtcaaaacatatcaaaaccgatcactattttcaggagtgattgctgattgaatattcctttatacattcgttcagttaaccaaaaaaaacacagtaaaatggctagaataacaaaaggaatccttggtggattttcagggaaagtaggaacaattgtaggagctaactggcgcggaaaagacatcatccgaagtgtgcctacaccaagcaacagacctcccagtgaaaagcagatgcttcagcagacgaaatttaagcttgtcataggtttcttacgtcctctgggtttcattcagaagaagtatttcggggtaaatagcggttcgaaatccagaattaatctggcggtatcttataccattagtgaagctgtccagatggtagcagatgctccggaactgatctacaacaaggttttgattaccaaaggagatcttacaggctttcagaatgtagtcgcagttccccaggctggaaataaaataaaactgacctgggaagacaatagcgttcagggaaatgcaaaaggtacagataaggtgacggtaatctgttacagcaaggaacttgactcatttgcaatttttgaaacggttgctgacagaagtgccttaactaccgaggtgactttacctgcttattatgcaacgaaagacatgcaggtctgggcatatctgaatgctctggatgaaagtatcgtatgcaacagttcttatctcggaacattgaagctgatttaatcctgatctccacctgaaagggtggagatttttaaataaataccatttaaatcatcttcagatatgacaataataatcttttgaaaattttttagatacttctcatcataaatattttctaaagatatgggtggagatttaaaaattttactacgtattagagagctgataatacgtttttaatgagttgtcgtacaagtacgacacttttaaaaaattatcaaaaaattagaattaaagcaaattaatatttctaaatttcagggattattatcaaaaaacacatactacaagatgaaaaaaaataaccctaatccggggaaccttttgcggggaattatctcctctgtgaaagaggacatctattatgtaaaacaaggagaaacactggaaagcatttcatgggatttgactcttgaaaatcctaaataccttcgtgaatatcataacttaagatgtagttacttagattttattcctgaagatggagctttaaggtttttgcagaaactccatgtacctaactcagacgaaatagtaaagctcaatgagcaaatacgaaaatccggagaaagtttatgttgtctgcttccaacggggaaaacctctttcaatataaagctaatcgatgggaattatcaggtgaagcaaactgaaagtgatgaaggaattcaaaaaagtgaatattcatatgggctacactttaaatatataaaggaggatgaaaaaggacattatgtagaattcaccatgaacaatttcaaaaaaaatgaagaggagccagaggagaaaataaataatctggcatccgattttgtaaaaatagtttatcctgtaacattgattatagacaaatccggaaattttgttgcagcacagcctattaaagatagtaaagatattattggtgatcttgaagcattaaagcaatattatgctggtgtttatgccatttctcatattgataggatgaaaaacaaaatgaatgatccacaggtgatctataatagcctcaaaggaacattgcccttccaattcattttcaatcaattttataaagcaaattatcattcaaaagatactgcggctccatatcgtgataaattttcatggctggctctggctactcctgtgaggctggaaatgattcatcaaatcttaccacaaaacagttctgatgtaatagaaattttacaaacagggaaatctgtagattaccgcactgtttcagaactgtattatacagactttgagtatgacaggcaaataatgcctcattcaaaatcagtaaaggctaatcattcagctgcctatacactggatttcaaggacttctctattcaaaaaataaaagccagatttgatatccggattgccgattatgaaaagacaatgacttttgaattggaaaagctagtcagctaattattctttttttaaccatcaaacacaatgatatgtcagaaaattattcagaacacagtgacaagcactttgtcattcaaaaaggcaaggctcaatgcaatcaaggtgaccagttcccacaatttaaagtaacgtcacaccagaaacattattggaataataaagaaggacaagcggactacctagccgtaacggaagacgatctgcaattcaatcctcccggacctagttttggacaatgtaaactgaaacccacatcagggggctatttaccgtgtgcgtttgctccagctggtaaatggcagaaaacttatgaaaaaacaaaggtcatgaataaaagctgcctttctgaaatttctgagttgatgtgcagtgttggaggaaaaatcaccgtaaaagaacacggacaaacatccac

SEQ ID NO: 2613 - DNA, 25064 bp, synthetic construct
  misc_feature 1..25064: note = Synthetic
  source 1..25064: mol_type = other DNA
tccgacaggcgaacaggacagtcagttcatcggacaggtaattatgctgcataatattactccttttaaagaactggatctggcaaaaaccaacttcataggcacggtttcacacgagtttaaaactccgatttcttctattaaaatgggacttcagctccttgaaaatgataaagtcgggaatctcaatgaagatcagaaaaatcttgttaatggcataaaagatgatacgaacagactgctgaaaatcaccggggaattgctgaatatgacccaattggaaagtggatcgataaaacttgacatacagccggctgaaattgcagatattgtggagtatgcattggaatccaacagatcttctgccgagcagaaacagattgccctgcatgtaaacatagatcctgaaagcaggtttgtgctggcggatggtgaaaaaacggcttgggtgctcaataatctcctttccaatgcagtccggtattcgtatgaaaattcagagattgagattgaagtgaaaaaacaagggaacgaaattattttctctgtaaaagattcaggaaatggcattgaacctcagtatatctcaagaattttcgaccgttacttcagaattccgggaactaaaaaagaaggaaccggcttggggctgagcatcagcaaggaactgatagagtcccaaggtggaaaaatcgctgtcagcagcgaatacggagtgggaagtaccttcagttttacccttaaagaatgctgattttgggcagaataggatttgatcccgttaatttttattaattatcacaaactttctgtatcaaagttggctggaatcaccataaaacctatatttgcagcctaaattttaaaaataatgaaagaactaattgaaaaaatcaacgcggaatttgaagcttttacaactgaagcaaaccaacaagtagaaaaaggaaacaaagcagctggaactagagctcgtaaagcagctttggaacttagcaaattgttcaaagacttcagaaaagtttctgttgaagaatcaaaaaaataattgttcctaaaccggcttattaaagtcggttttttttatggatttaatttaaaactaaattcattaaaattcacataaacataccgtttcttcactcatttcagttaataatttacattgttcttttcttaaaagcttagagtctgtttaaatttataaattactttaacattaagaaattaagagtatttagcttaaaaaacttaataaaatcaatttattgattttattaaccgaacacaacttaattacttaatgttaagaaaaagaataaaaaaatttattttaatttagaaaaattaagaaagagctataaaaatttattaataaaatttaaaaaatcagatctgaaatccatcccaaagatgaatttagcttaaaattctaccgattctttttatctttaacacaataataaaattatgaagataaacagatattttgttgtccccgcaattgttgtggcggcacaattttctttcgcaaatgcacaggaaaagctggatccgatggttcagaatttcgttaatgaagttaataccaattctcagcttgaaaatatggcttatgaacttctcgatggtatcggacctcgcttagtaggaactcctgaaatgttagcagccaacgagtggacggctaataaactccgttcttgggacatcgaagccaatttgcagcagttcggaacctggaaagggtggcagagagggattacacatgtcgatatggtatatccccgtgtaaaaactttaacagcaacgcaattagcctggagcccggcaacgaagaaagccatagaagcggaggtcatcattcttccgaaagtatcatcaaaagcagaattcgatcaatggttaccttctgtaaaaggaaagatcgtgttgatcgctcaatatcagaaaatcggacggtcggacgagcagatcaaagagtttgcaacgcctgaactgtatgaaaaactgaaagcagaaaaagcaaagactacaaaagattttgcagattatgtaaaaagcatcggttatgacaataacacactgcccgaagcattggaaaaggcaggtgctgccggaatttctatttccaactggacaggtattatgggagccaacaggatttttggagctaagaccacaaagattcccatgatcgacattgatgttgaagattacggaatgctatacagaatggctgaaaacggacagaaaccgaggattaagttagaagcacagtcaaaagttcttcctgaagcgaaaacttttaataccattgggatgattaaaggaaaagaaaagcctaacgaatatattattctttctgctcacctcgattcttgggatggggctcagggagcaacagacaacggaacaggagttttaacgatgcttgaaaccgtgagagttctgaaaaaatattatccgaataataaaagaacaatcgttgtcggactttggggaagtgaagaacagggactgaacggctcgagaggttttgtggcagataatcctgaaattattaagggagttcaggcggttttcaatcaggataacggaacgggtagggtagtgaatatcagcggacagggctttgtgaatgcttacgattatatcggaaaatggctgaatgcggttcctaaaaatatcaaggatcagattaaaacagatttcccgggaatgcccggcgggggcggttccgatcatgcttcatttgttgcagctggagttccttcgtttggtttggggtctttaaattggggatatttcggatatacttggcacacaacgaaagatacgtatgacaaaattatttttgatgaggtaaaaagtaacgtgattttaacggcaactttggcttacatggcttcagaagatcctgaatttacaaacagggaaaaaagaacgatgcctttggatgataaaggaaatgttacaaaatggcctcaagtgcaaaaggcgagaagagattctaaggactataaataatttctgatttataaaaagtttcgggttcgggccaatggcccgaacccgaaactttttataaattcacgaataaacgattagaaaatatctagcatattaaggtaaatacatgctgaaatttaacagaattttctgaactttaaatactctcatataatttactaatcaatctttcttcattaaaaagatcttgctaattgagttatgtattgaccaactgacaaatcgaaatcatcaggctccaatactaaagtaattgttatattatttaaggtaattagatagtataaatctgaagttgtccatcttttatattgtaaaggattagctttgattgcagtaaatgcctgaccaattatcactttataatagtcttttgtcaggcattgctctttaaatttttttagttctattaaaaaatttcttaaacctatagtgggtacttggggacgctctgctttgtcatagcgtccgtaattagatacggtagcttcggaagatacataaaacaaatctgtaccccaatcaagataatctagctgtccttcaataacagcattcaattcggctaatgtgttcgttatttcacttaaacccatatctgataaatccgatgcctgctccatttctggcgtgcccactccaaccataacccatctgttttttatatacgctgtagctgataaataataattatatgacattatattttatggcattagtttgacaatcaattaatttctaacacaataactcttgagcaattttattacaaaatcatgctcagctgaattctctttcttacctcatcaatttccgtcactcttacctgaacatgctgatgcagtttcaccacttcgttcacatcagaaacaaaaccgtctttcaactgagaaatatgaaccaagccgctttctttgattcctaagtctacaaaacatccgaaagccgtaatattattaactattccgggtaaaatcattccgatttttaaatccgttatcttttttacattgggatcaaattcaaaaactttggcagcttttcttggatctaatccgggcttttccagttcttttaaaatatctttgattgttaaaattccgatgtcttccgtaatatatttttcaggctgaaccaatgtgattttttctttattagcaatcaattcattagttttaattccgagatctttcgccattttttcaacaattccgtacgcttcaggatgaacggcagaattgtccagcggatttttagcgttatgaattctcacaaacgccgctgcctgttggaaagctttttcacccagtctcggaacttttttcaattgctttctgtcttcaaaagcaccgttttcagttcggtaattcacgatattttctgccattttttcgccgattcccgaaacataacttagtaaagatttactcgccgtatttaaattgattcctactgaattcacacatttcatgacagtagaatccagttcgtttttaagctgagtctgatctacatcatgctgatattgcccgactccaatagatttaggatcgatcttcaccagttctgccaacggatctgccaatcttctcccgatggaaaccgaaccacgaactgttacatcataacttggaaattcatcacgtgcaattttacttgcagaataaactgaagctccggcttccgaaaccacaaagacctgtaaaggcttgtcgaacgcaatttttttaatgaaaaattcggtttcacggcttgcagttccgtttccgatcgagatggcttcgatattataagcgttcaccatcgaacggattttcttcatggccattccgctttcgttttgcggagcgtgaggatagattgtttcgttgtgtagtaagtctcctttttcatcaaggcaaaccactttacagccacttctgtagcccggatcaatggccagaattctcttttcgcctaaaggcggagcaagcaataactgagtcaggttttcagagaaaatttcgatggcttttttatcggctttttctttggcttcctgtaacgtttcgttggagattgcgggttccagtaatcttttgtagctgtcttttatggctaaagaaatttgctctgccgtttcgttatttgattttataatggcattttcaataaaatcaatggcttcatctttatcgattccaatgtttgttttaacgaaaccttccgcttcggctcttaacatggccaacaatcggtgagaaggcgttctgttcagattttcttcccattcaaaatactgagagaatttctgggcatcttcctcatcttttttagctttaactacttttgaagtgacaatcgcttttctttggaataatcgacgcagattttttcggacatacatattttcattaatccattctgccatgatatctcttgcgccctgcaaagcttcctcttcagaagaaacctgatcattcagatatttggaagccaaaaactggatatcctgagttttctgactcatgattattttagctaaaggttccagtcctttttcctttgcggtatccgctttggttttctttctttttttgaaaggtaaatacaaatcctcaatctcctgaatatcaaaactgtcttcaattctctgttttaattcgggagttaaagaattttgctcttcaatggattttagaatggattcttttctttttataatttcttcaaactgtttattaagcttagaaatctgttcgatctgtgtttcatccagattgccggttttatcttttcggtaacgggaaatgaaaggaatggtgcagtcttccgctaataattctaaagttgcgttgatgcttttttctgatatattgagggtttgctgtatataagctgttgtgttcattttaaatttttgagtggctaaaatactgacttttttataaagcattgagggatttcaaaacaaaaaacagcacgaattgtactgttttaaagctttaaattagatatttttatttaactgtttcattataataaacaggagcgtagtctttttcatcgaatcccataaggataactttatagttctttgcgtcatcattattaaagaattgtatttcaggcgattctttcggttctgtttttaaatatgggttccagtaaagcgtgcttcttacatcctgagaaatatttttaaaattttcatcgttatacatcggacttacaaaagatatttctttgtcgaaaccgtttaaggtaatctgctttaattttgtcggaactgtggaatcgcttaccgaacctgtaattccgcctctcttggtgtaaatcgcaatagctccgcttccgccaccggaaccacctgcaaaataatctttaattacttttaccatagcgatatctgctgctgaaactgaacttaccattgatggatcaattttcatttcatcaagataaatattcatggtgctgccccttaatttcggaatgtaatttcccatatcggatgccagcgttaatccggccactcttccctgcagccattgtaggatattgatggatccctgtgcagaattattgtcatttaccaagtcaaaaacagtttcattagctcctctgaataaaggtccgctaagtttgtcattcagttcctgggttttatttctttttatcccttttagcagtacttctttaatcagtgtggctttttcgttgattgtactttgtgtatttttagtgattgcatatcgttggatttcactgtccggctcgtcttcaagattacgcagaaccaggctgtaagggttttcaggaaggcttttcttcagaggaacaaaagaataatcgggctgaaaaattacctgtacctgctctttagggattttaggatcgttcagttgataagaaaatttaatggcatcttcgaaaatcagtcctcgcaaagagaaaaatccgttggcatctgtttttacctgatgaatttttataccctgatccggcatgctgaacaagagattcatatcagtattgggagccggttttccctgtattgagactttccctttataagaaatataaggctgagatttgtagctgataatagggaaggtgcctgccataatggttttccaatcgaaccttttccatttttctgagataagaagggcatctaaagcttcagaattatgattgggtttaaaatattgagatggggtaactattttcgaagtaatatcgccggtaagccataaggtactcagtaaactgttgtcatcttccgaactttcggattttccatccatgataagaacggtgtacgcagaattgtcaggattctgagcgatgctgaaagaatttaaagctcttgctgattcgttaagtgtcaaagatttaagttccggttttttaatttttaataattcaggctgaacaaagcaaagtctttgggctacaatattttcctgagcatcaaacacggtaagctgcaaaatcccgttgatgagctgtgctgtgggaatagagtagctttgtgtcagtattctatcagaatttaccttgaaaaccaactgattgttgatggtgccaatcactttaaataatgttccgggagcaatattttttgatttcaaaaaaaacttaacagcatcatttccgcttgacacctgcaggtttactcctgaatcggaaacgtccggaagatcaacggtttgtgtgtttcctttcgtgtcagtgacgatcagctgatatttttttccgataacaggagtgagtgaaaacgatcctacattttggtcaaagcctttaaaagaagctaatttgacatcaggcttttctgtgtcaataacatatccgttccagtcagatggttcaatgccttttgagtggaggcgtactgcaaattttgtattaattccgtctataaaagttccgctttcaggaaaaacggaggctgtccattttgaagtgtcatcaataacgagcttttcgggtgatgaaggattataaatgacaataggtcgtaaagcctgaaaatcttcattaaaattcgccatccatgtggtataggctctgatgtaataaacgccttcttttacattatcaggcagcaaaaagtttccgctgccctgtccgttgattaagggaagaatttttttgctgatctgggttttatggctgtcatacagttctacaaataaagaagtggaaattttcgaaagctcgtatccgttaaaaacaaaagacttaaaccaaagattctcgcctgcgataaagctgtttttattgaaaaccagatgtattttctcctgagggtattgctctgagaatgcttcaatagctttctcagctttgccttgtgcctgaaaattccccaatatcaagatgaggaataaaaaagaaatgatttttcccgccatatcaccaacatatttgtgtccggattatacagtataaaagtacatcatttgtaaggtgaatgcatcatcaatttctttgaagtatattaaaatattattaaaaatttaaacactaaaaagacattaagcttacaacaatgataagataattggtataagcatacgctaaatcattcacctcggtgaatcttaataaatctacgttaagattgtgcttaaccgcttcattatcttaatggtgtaaaaaaatcaagaattcttatggttagattaattaaaacttaaattaatgacatttgaatataaactgagtaaataaaatcatattcagaaatgctttcccgaaagttctcgatacatttttcttcatttcatttcgaaaaaaactcgaagtgacggaagcagttataacaagctcaagttaaattatatcaaatcttttttagaacttctgtggtttaacatagtcttgacaaaataataggaattgaatttattgatgtatggtaataaaataacctatgcaagtccctatatttggatctttaaaaaagctgatgaaagaaagcattgtaggatgtttcattttgcttatatttagatcgataaactttttaaacaataaaataatatgaaaaaactaagtgtaattgcattagtagcaataggattgtttgcaacatcttgtaacaaagaaaaatcagctgaaaacgcagcgacaagccaggagcagacggtagcagagagcaaaggtgaagtattggcagtagatacagtagcttctgtagtaaactggaaagctttccacaaaggaggaatggctcctcgttggggaacccttaacgtaaaatctggtgacctaagcatcgaaggaggaaatgtagcagccggaaactttgtaatcgatatgaactctatcaaagtagatcctgcatctgtaacagaagctgacaaaaagcctgctgatcttgaagcacacttaaaaaatcctgacttctttgatacagcgaaaaaccctacggctgacttcaaaattacaagcgtagcggatcttaaagaagcaccgaaagatgcagtagcaggagctaacaaaacagtaagcggaaaccttactttatccggaaaaacaatgaacgtaacgttccctgcaaaagtagatgttacagaaaattcagcagctatccaggctaaatttacggtaaacagagcagactggggaatcaaattcggaacttctgaagccgatcctgcagaatggatgatcagcaaagacatcgaaatcgctgttgatgtaaaagctaaaaaataatattgttagatataaaatcgtggaagccgccttttttaaggtggctttttttattatggtaaaattaaattgaaaagattttaaataaaagaaggcgagttgccccgccttaaatgttttcacaacggaataatccttattgtgaattgctttcggctacaaatctaaaaattatttttttaactgttttatggttttccgtaaaatatttattttttttctctttatttttatgctttatcaaaactaaatagctatgactaaaaatatacttggattggacttgggaacgaactcaattggatgggcgctcgtagaaatagaccatgataataaaattgtaaaaatattggggcttggttctcgaattttaacgatggatgctgctgaagttgcaaagtttgaaagtggagctaaaaccgaaagtggagcttctaaaagaacgtcattacgttccccgagaaaacttaatgaaagatatttattaagaagagatagacttcattgtattttgaatttattggactctttgccagaacattataaactttcaattgaattcgaaaatgaaaaaggcaaacgtaatgggaaatttaaaaaaggcactgaaggaaaattagcttattataaagatgataacggaaggtttcaatttcttttcaaagatgcttataatcagatggaaaatgattttagaaataagtatccagaaatgttctatcatagaaaaaatggtaacgaaactaaaattccttatgattggacactatattatttaaggcacaaagcagttacagataaagactttgagcttactaaagaacagctagcttggattactttaagttttaatcaaaaaagaggttatgaaaaagtaataggacaagatgagaaagttcaaaaagaaggtgaattaattgactcttttgttggcaaggtgagagaagttaataagcttgaggaagatgcgtatcaaataattttagttgataataataatgaagaagtagaattattcaaatataaagaagagacaaaaattgcaattacgaaggttggagatttgaaagaggttgaaattatttcaaagtatgatgatgaaggtacgattgattttaaaaaaaccgaatatattattaatgaagttcgtgaatttataataacagacgttaggaatacagggcgaaaaataaaagaaaattttattttcgaagtagagctggaaacaggttgggtaaaagaacaacagagtaaatttactccaaagtggaaagatagtaagcgagattttatcattaagactaaatatgatgaaaatggtattaggataccaaaaggagcagataaaggaagaaatatcaatattccgaaagaagaagattggactttaatgaaattaaaaactgagacatccttaacatctttcaatacaaaaaataatacaaaaggtattgcttcctacgtctattataatcttctgcaaaatccaagacaaaaaattaaggctgacttaatcactgtaatcgaaagagactactatcgtgaggagttggacttaatttataaaaatcaagagagatttcatcctgaattagggaatagagatttgtatgaacaagcaattcaactactatatcctaacaatcttaatcatcaaaagacaattaaagatttagattttaatcatctaattaaagaagatattcttttgtatcaaagagatttgaaatctaaaaaatcattgattgctaattgtatttatgaaaaggaaaactttgagcggacagatgaaaaaaccggtaaaaaatataaaaatccattaaaagctattcataaggctaatccgctttatcaggaatttagactgtggcaatttattaaaaggctgaaaataattaagaaagaggaaattgtaaatgaagaaattaagttaaatgtagatgttacttctcaattattgactaatgaattaaaagaagatttatatgcctttttgaatgataaggaaaatgtaacggagaaagatattcttgggtttttaaacaaaaaatataaggatttagatatttctacagaaaattacaagtggaattttacttctgaaaaagaaccttgtaacccaacgagatacaatttcattctccgaacaaaacgaattaaaggattcgattacagaacatttttgacttccgaaaatgaatacaatctttggcatttcttttattcggtaaagaaaaaagatgaatttaataaagggttaaataatgtcatctctcgattattggataaaacaggtttacctaaagagtttcaatcagagttggttaagaactttagttctttcggaggatatactaacgattatggaacctattctgaaaaggctataaagaaaatgttaccttttttgaggcttggaaaatattggaattcagatgatattgaaaacattctttcaaaatcaaatcaagaaattaaacaaaaagttttagataaagaagaaatcaatggagaagtaaaagactttcaaggactttgggtttctagtgcgtgttatctggtttatggtagatactcggaagttggagaagtgcagttttggcaatcgccttatgatattgataattacttaaagaatgaattcaagcaacattcattgaataatccaacagttgagaagattttggtagaaacgttgcacgttgttaaggatatttggaaatattacggtgaggaaataggaaaagatgaggaaggaaaaattatttataataagttattcgatagaattcacattgaattaggtcgagagatgaaaaaaaataacaaacaaaaagaaagagacgataaacaaaacaaagaaaatagaaaagctaatgaacggatagtggaacttctacgtgagttaaaacaaagtaattcttcacttcaagaaaaatcgccattccaacaagagaagcttaggatactagaagaaagtctcctttcgtctattgaatacgataaagacaataccgaatatcagctttccaatggaaaaataactaaaaaagaaatcaaagatataacatcaaaagaattttcaaaaattagtagaagtgattttgaacgatataaactttggttagaccaacgatatcagtcaccatattcaggaaggtttattaaattatctgatttgtttgaccgaaaaaaatatgagattgaacatatttttccacaagaacgtatcactttaaatgccctttataataaagtaatatgtgaaacggaaattaataaagaaaagaaagcttttacagggtatagttttatttctaacgcaaaatctaaaaaagttttttgctctgcgcacgattcagaagttgaaataattgctataaaagattacgaagatttagtaaataataatttttccggaagaaaaagagaaatactattgagtaaagaaataccggaagaatttacaaatagccaattaaataacagtcaatatatctccaaaatggcgatgaaattgctgagtaatattgtacgagaaaaagacgaagatacattccgttctaagaatgttttggctacaaatggaactattactacaaccttaaaaagacattggcaactgaatgatgcttggaacgaaattatttctccaagatttaaacgattgaatgcattaacaaatacaaatttattcggagattatagagaaataaatggacatcaagttttcatcaatactgttcctgaggaaacgagcaaaaattttgattccaaaagaatagaccatcgccatcatgctttagatgctttgataattgctttgactacggaaaatcacgtcaattatctaaataatatttcatcacaagaaagtagcgaggagaaattaaatacaagaaaagcaattaaatttcagttgactaattcaagaagaggatttaatgacgagaaagaatggtatttcctaccacctgcgcagataaaatcaaaagatgggattgatgaatttgaatatcagtttaaagattttaaaagcaaagtattcaaagatattgctcaaaatgcattagaaaatacgatagctagttttaaacaaaagaatcgcgttattcgacagcgttggaacaaatatttgaaatctgaagatgaaaagcttaatatcattaaacaggaaaacttaaaacaacctgtaaattacaatgtaagaaaaagacttcacgaagacaaattttatggtaaagtcaaattacaaaataagattactacacttagtttggagaaagcactaattgaaaagtatgatttagttgatgatgaattagtaaaagaaattgatgttttaaaaaataatgacggtaaatctgtaaaagagattatagagttattaaataataaatatgctaaagtttctgtttatgaaaaatttgtagcaacaagatttggaaacaatttagagtccttttcacagataccatcggacaaaattattaaagtcattcagtcaattacagatacaggaatacagaaaattttagaaaaccatcttgataattacaaagaggtaattaatgataagccaaagtttgatactgaaaatgcgttttcatcagatggtattaaagaattaaataaaaacatcattgagttaaataatggcaagtttcatcatcccatttataaagtaaggacaagtgatgcaatgggaaccaagttctctgtatcggaagaggggcaaaagagtacaaagtttgttgtgacggcagctggaagtaattctttctgtggtttctatcaaaatggtatagagagaaaattctatattccaacgttgcgagaatccgttgaaagtttaaaacaaggatttgagccttgcccagcaatacatcctgaagattcagatttcaaattattgtttgtattaaatccaagtgattttgtgtatgttccaacggaagaagagagagagaattctattctaattgatttcaataatttgaacaaagaacaaatgaatagaatatacaaatttacggatggaagtggaacgactatgaattttgtgcctgctaatatctctaatccaattatagatattaaagcagaagaacataaaaaaataaaagataacttattattttgggaagaaatcaatgaaacaaaaaaaggaattgttaaaaaaataaaaccattatttaatgaagttggattaggttctgaaaataaaacaaaaagccaaaatacttccaatagagaacaaattaaatcgagttgcttaaaattgaaagtggatagattaggaaatatctcaaaagcataattatgataacccgctccatctacatcggcaatcccgcttatctcaaactcaaagacgagcagatgaaaatcctctgtccggaaaccaaaacggaaaagggtagtgttcctgtggaagatttgggattgctgatgctggatcattaccaaatcacaatttcacacaatctgatccagaaaatgatgggaaataatgtggtggtggtaagttgtgattctcatcatcttccacacggaattatgttgccgctgtatgggcatacggaacattcagatcgggtaaaagatcagttggaagccagcgaaccactcaaaaaacaactttggaaacaaactgtggaatgtaagattgaaaatcagaaaaatgttttgatgaggttgggaaattattatgagcccatgattgaatatcaaaaaaatgtaaagtctggtgacgtgaccaacatggaggggattgcagcccaacattattggaaatatttaatcagtcttgattttcttcgacaacgttttggagattcacccaatcagtttttcaattttggatatgctgttctgagaagtattgtggcaagagcgattgtagaaactggattattgcctgttttgggaatttttcataagaataaatacaatccgtattgccttgcagatgatttaatggaaccttatcgtccgtttgttgaccttttggtgatgcaatggctgaaagtaaatcctgaaacggaagaattgacgaaagaatttaaagcacatattctgcagattgcgaccaaagatgtgatgattgacagtaaaacaagacctttgttggtggctgtgaaaacgacggcttcatcgctttataaatgttatactggcgaaaaaagactgatttcttatcctgaactgatatgaatgccgaaaggtttaatgcataccgaattatgtgggttttagtattatatgacttgccgactgagaccaaagctaatatgaaagaagcaaaccgatttcgtaaggctttgattgatgatggttttaccttatttcagttttcgatgtatgtacgccattgtccgagtcgggaaaatgcggaagttcatatcaaaagagtaaaatttatgctcccaaaagcaggaaaggttgccattatgtgtattaccgacaagcaatttggggatatcgaaatcttcttcgccagaaatagagaagaacctccgccaactttccaacaactggaattattctgattttttaatcctaaataatcaataaacccactataattcagtgggttaaattttgaggttgtgttgtatctcaaagatacggataaatgaaagcaattcacaacggagagcctcatatagctgctctgaggatagttgtgttgtatctcaaagatacggataaatgaaagcaattcacaactatattatactacaaaaagatttaatatatgttgtgttgtatctcaaagatacggataaatgaaagcaattcacaacgagaagactggttctgtttatgcgatcgacgttgtgttgtatctcaaagatacggataaatgaaagcaattcacaacgtaggctccatagcagaactgcaacaaagagttgtgttgtatctcaaagatacggataaatgaaagcaattcacaactagaggagaaggattatttgaagctgttgagttgtgttgtatctcaaagatacggataaatgaaagcaattcacaaccatctcgaatatcttggtataaaacatctggttgtgttgtatctcaaagatacggataaatgaaagcaattcttttccgtcatcgatgcctttattgctaaaagaaaaattcaaactattttatagtttcgtttcctgttaggaaacgaaactactttataaacacaaagtcatagactttgcgcagcgaggtaaacctattgtatcacaaatttttattcttggataaagaggatcatcacaagtaaaaatatcaataaaattctttttgtctttgtcataatgactattaatcattttattaataccaacaatatttgttatataattagaaagttttttgttttcttcattggcttgttgagacatataaaaagtatttttatataatttaacgttattccaggcataccactaataattaagtttaccctaattcattataactaaaattacttttttcatcaactataaaagctaaattaatagagtaatttgaaaaaattataagatgtgtatatttttttatatttaatccaagagccaaagtaaatttgtttctttgcgcctgcataatatctacaaaatcacctgaaattgtataatgattattttctatttttagcacatcagacaattctatgcaatctaaataaccaatattaaaaggtttttttgttcagtatttctacaatacaaaatttcagtttcaaactctaaatttaaaatatcttcttcatatagctcaatctcaagctttatcttattatttttataagtgtaattttttaatatagaatctcctgttttagagaatattcttttattttttttaaaaattttccattaatttcctaaattaaaatatttttttaactcatcttcaaaacctttattttttattttatcttttaaaaagaaatgtcctttttgtccatttacctcataattaatatgtggaaatgtagagctaccttttccttttccccaatcaccatgtccccaataaacagcatcttcgctactatttttccaaccaatccacttacctctttcattatacattcttgttttgtttgcacctaacatagaagaactaaaatttttagcatcattagaattttcaaataaaaagtctgcttttaatgttccttttttagttgtaccagtacctataagaattcctttttctgcagctagcaattttaatacatcatccccatttcttgtcataaccaagagtgggattgctgctaagttcattcctttgttatcagaagctgaaagaatcattcctcctacttcaaaaactccggttacatccccggctcctccaatatattttataggtccatcatttttcacccaagttaatggatcataatctggtacctgcctgcctacgtaggttgcaagatacttgggtatttccatccccatagatagcctcattaatgcgctattgcccttatagcttttcggaacattaatcgtaagttgtggaatatcgaattctaagtagtctacagccggtgtatagtatccttctttataccggtcatcaataaaataatttcctcctaagttacctccgcctaaataattaagattaccgttagaataattgtaagaacctccggtattcaacattttgtcgatatccgtctgttctatcattcccgtgggatcggtaaataggatagggttgttaaagccgtaacggtatggtgtccatgaaggttcagcttcagccatcgggtctacgacgccccatcttccgatgtcgctcatgtacatccttgctccgaagtcgttccagcctgtttctttctggagttcttttcctccgaactcataatggtagtttggatctcctgtcaaagcattatagccttcatgtttcagcccaaaagggtagtagttgttttcttcaagaacttctgcgctgcctgatgcatttttaatgtagctcaggcgtgtatttcacatatggttttcaggccttcaaaaatatatattttaaaccgattaaaatatgtggttttccctatttttttattgaaaagaagtttaatactactaacttcgtttctgaattggaaatgaaactatattaaacataatcccgtagcattttgctacgggatttatttttatctatcgacgcgagctaaaagtttgcgccagcgagaattctcccaaaagataacaattctcagaaataaattttacaaaatattttcaatatactcaattctaatatttataccttcttgattaatatatgcttcatcaagcatttttaaaatattacatattacaaatattaaacgtcctatttctgacattctgtaattaactttataaatctttgatttcaatttaattctttcatagcgcgttgaatatttttggagttctttttcattaggctctttataccatatttttaatatttctaatgcatatttttctaaaatattgtataaatccataattttattttctgtgattatacgtccctttgatatacaatcattgcccgcgacagctataaaaaaatatgaaaacaaataatacgataaattagaatcaactgttatttctgaattattactttttataattattactttcattttggtaaaatatgattaactaatcttccttgagaattatagactttcaaatgcgctttagagacatttatattgaaagcctgaaatacttctaaatacgaatttgctatattgggacttggaagataatgaccagataaattgttgatattaacaatactaccatttcttatttttaattcacctgctgcgaacacatctattcctttggatagaaaagtatgctttctacctaataaaacttcacccgattctgttattacaaaatcaaatgttccagcggcttttgttgttccattcattattatttttccatttactattgaaccaagtaattttccttcagtactaacaggtaatgtatttatcaataatggaaagttttttccttttgttgcaaaaagagctaaaattccaacccccattgcaagatacctattttccggcttccatgtactcattatttgcccaccaagatcaaatatacctgcagggtcgcctgctcctcctgtcatcattactccatggtcatttctcacaccagccaagctttctgccattgcattggcatttacgtggtgctgccaatcttttgctgcgctgctaaaagcattatacattgcgtaggaattagaaagataattacttcctatattccatgtacttttgctcccttttgcattaatcgtaagttgtggaatatcgaattctaagtagtctacagccggtgtatagtaaccttctttataccgatcatcaataaaataatttcctcctaagttaccaccacctaaataattaagattaccgttagaataattgtaagaaccgccggtatgcagcatcctgtcgatatccgtctgttctatcattcccgtgggatcggtaaataggatagggttgttgaagccgtatctgtagggtgtccatgatacttcagcttccgccattggatctacgacactccagcgtccgatgtcgctcatgtacatccttgctccaaagtcgttccagcctgtttctttctgaagttcctttcctccgaactcatagttgtaagaagggtttccagccaaaggattgtaaccttcatgcttcaacccaaaagggtagtagttgttttcttcaagaacttctgcgctgcccgatgcatttttaaagtagctcaggcgtatatttcccaaatggtcgttatagctgtaaatatacctatttttttcaaaatcgtagtagccttcggatgtaggaacaaatttcattgccgtatttccctgcttcgtttcgtattggaaaccatccagataatctgtaacctctactatttccgttggaaagaaaacatctccttccccgtaggtataggtttttctcagtttggtacccgctgcactataaacgtagtctgttgcgatattgcggatatctacacctccggttaccaggttgcgtacagtataggttttatcaaatatgatgaagttcggtagattcaggaaattgtattcgatctccagaatacctttgtccttatggcttttcatattgccgctttcctcatcataggtaatggtatttcccgatatctccggataccccctgtagtctgtggaagaatctgtaaccgaagtcagcctgtttccggaataggcatacgcaagatcatcgatcttaaatgcgggggctccctgctgtccgtctgcagatcttttcaggttagtaatatttccgttcaggtcatagtccatcttctcaaaatattcttttgcagaagggttggtgtctttctggtaaaagcctgccgaaagcctgttcagcctgtcatacacatagccgtatcttctcaggttgtctcctgcagtggtattggttttccagtcaacttcagcaatgttcccattgtatcttgacttcacctgcatagaaggaaaatcaaggttcggtgtttccaaaccttctacctgattgtatttgatctcataaccgaacaatttactgcctaaatttttaggatcattaatcttggtcatccatcccttgatgttataagcatagtcgatactttctaaagggctggctgctgatgttccgcccacttttttgttcgtcagctgagaaagctcgttataagtgttttgagctaatatctctacaggattaccgtctacctgatgcttgtgtaccagcaatctgttctggtcgtcatagtcaaatgtttctgtcaggaagctttcagtatccgttgccaatcttttgtgtctggttacagaacgctttgtaactcctgcaaaatcaatttctgtttccgttttggtatatcctcccagatagttaaaagagtaagctcccacagatcttccctttttatcataccatatatagtcttttgtccagctgtcattctccaaattcctgatgtaggaagctgttggcagcgttttggtatttacattcccttcctgcattaagacatcttgtcccaatatctgaacgggagtatctgttccggcaggaaggggtggatatgtatcgtagtaattaatgctcaaaaccgtcatgcctgctgtcgggaatgcgtttttggtatagtaaacctgcattccgttctctacaaacggtgttgtgcttctttcttcggtgtaggctgcattggccggcaaattatcgatggcagcctgcattgctgttctggtggaattactggcagtgaatcctgtataaactattcttccgaattgatcgtatttggtaaacatccaccctttttgatggaaattattactaatggttgccagtgttgcatcctgagataagatcagcctatcggctttatcgtagaccatatattcccagcctttcccaggcagctttttttccaccagcctgccccagccgtcgtagcggtactgatagcacaaagcatccctgtctgctgcggaaataaccggtaacgcagaggctaaaggcgggataacataggccagctggtcgtatttattataaacataataggttttaatatcattcgttccatcattctttttgacaagaatggtttgtcccttaccgtttttgtattcggtaaccgcattgccgtcttcatcggtgatggtattttttgtaagggtattggcagggtagtacccggaatctgccaaaggagattcggtgcggttttctacccagcctgttgttacggtgtattttttaacttcggaggttccggtattggtgctgtagtcatagttgacaggcttgctgctccatgccgttccggtgcctatgctttgcttcaccctttccagcggtgagttttcaatgatctgctcagaaaatatcttttcactgccatagcttgcaggtgcattgctcagcggattatcataaatcagtccatcccatcccaagttctgctcccggatcgttgcctgaagcagcatctgtattatatgacattcctatgttgatcttcagtccattattagttggaagactaaaaaaaggtacattaatattaacctttccttttgaataatcagtttcatagttccttaaaaaactttctctctgatattcaaaatattgagaaaacaatacgttgctccacaataacagtaaaaagagcggccattgtatgtatactttatttttttgtttcataattttattttttaattactttggcattagccgttttattcgtatccgttttcacagaaataatataaactccttgaatcagagcctgtgtattcatcttcgtcaccttattcctggttttaaggctctgtacctgtcttccgcccatatcatacattacaatatcagcttccttgaaatcaaaaccaatctccacatacgtataatctgaaacagggttcggatagatcttaatatcctgcttttcgattagctgatcaagctggctgtcgcccagcttcacaatcttccagttctctttccccagttcttctgcactggttcctgctagaatgatcgaactgtctctgtttagtttaatatccgaaagcctttcctctctttttctcgattctcccttcacatgctttctccactgctcattgccgttctgatccagatacagcatccagaacgtttcgtcatcactctcaattctgccttctgcctgagtgtagccgcctaaaaggatccctttagacttcccgtttccatcttcctgcttcccaccaatcacgctcattcccatcagaacatccctgtttttgaaattgtaggatttctgccagatctcttcgcctctttcgttgagtgagatcagccacagatcggttccttcctcgataccgatagacttgtttcctgatctttcagaccttgattctccaccgattaaatatcctgttgatgtaaaagccagtgttctgatatgatcatcaccttttcctccgaagttcttctcccattcaacctttccgtccttgttcagtttgatgatccagtaatcgccttcgccgtagttctcagttttctttgatcctcctgtattgcttctagaatagatccctaatagggctccgccatccatagtcggaatcattttctccacttcatccaaacctttaccgcctactatcaattgggataattctcttccgtttttatccagtcttacaaccaaaacatcttttgaaccgtagcctttggaatcctgagcctgtcgaagggttgcgacatttcctgctacgaaaaatccgaaatccgtggtctggatcactgctctggcttcttcatcggaagttccgcccatggttttctgccacagctcatccccgaattcattgattcgaatcagccagatatctgaaccgcctttggaatcttcttttttatccaagccttttgaagagtaagaagtacctgctaacagaaaacctccttcctgggtattgacagttgccgataaaaaatcgtggttctttcctccaaaatatttttcccagacttcttccccccgctgattaagtttaatcaaatgatagtcgtaaccattgttttgcttttggtcgtttgcccccggttgttggctgttagcctgaatggaacttccggtgatcagatactgctgatcgattgttgtggttacctgtgaaaggaaatcctgtgtcgaggatttgatgtctttctgccagaggacctgtgtttcctgagcatatacgctcagaacagtacaaagtgtatagacactgatgtagaatcttttcatacttagagttgagttttatatgattattgatttcaaaagtgagaaggggaatccttaataccataagggaaaccgtattattaaaggattgttattattgtctgaagaaaatagctgaaaattataggttgtatcatggttttgttttatatgggtttctaaagattatttttcatctttccggcaaaactaatttttataaacgacaaagcatgtcgtattatatcaggaagtaattttttatagtcaggtttaaaatcataaaatataaaagcacgaagctagagtcaatcgtattagaggtactgcgaagaacccgacaaccagagagacttagcccgtgccatatggatacacgggcgtaagtctatcaaaatttggttgtcaagaagattcgca

SEQ ID NO: 2614 - DNA, 25028 bp, synthetic construct
  source 1..25028: mol_type = other DNA
  misc_feature 1..25028: note = Synthetic
  variation 16307..16932: note = n is a, c, g, or t
ggaaaaacagcttcttcgtataatcctcagaatgcaggtgattatcagatggtgacggtcaatggtattaccatgcctaaaccgaatgtagagcattttaatcttgttcagccagtttacagtattaaaaatcctgatgaatatgttttttcaaagaccgctttaccaccggcattgatacgttctaatggaatttatattcaggatcagatcaaatggaaccaatttaatttgtttttaagtctcagacaggaatggtttcaggatattaccagatacaaggagaataacgaaattgttgtaaaagacagcaaattaatccccagaattggtcttacttataacgtcaatgatgatatcaatgtatacgcttcttatatagaaggatttcaaccgcaatcgaatacagcttcgctggcaccggtggctattcctgaaggcagagcctttgatcctttaaggagccagtccagagagatcggaatgaaagctgatttttttaataaaaagattcatgtggatgttgctgtatacgaaatccgtcagcggaatatactcctgaatgccaacgatcctgctgaacccgaccgcctggtgacgagagggcaggagcggagtcgtggttttgagttagatgtcataggtaatatcttaccccactggcaggtctttgcgtcgtatggatacaatgatgcgagaattattgacgacattaatcctgcattgataggggccagaaaacaaaatacaccgtttcacagtgcgaatatctggcagaaatacagttttgaagaatcttcttttctgaaggacattgccgtgggattcggtgttcagtacagtggaaacaaagttccgatgtataaccgttcatttttagtccctgaatatgcagtctttgatgctgcaatttattactcacccaaacagggacctgtcaaaatctctttcaatgtgagcaatctctttaataccacttactggctgggtgcgcaaaactacctccgtttgtttcccggagctccgagaaatgcaatgctcaccgcagtctataaattttaaatctataaatatgagaatacatattatccgtctgatttccatacagctttggaaacagtcactaaagaataaagcggttgtttttctactgttgatcctgagtcttctttttgtatttgcagcctatacgggctggcaggattataaagtacaggaagatgtcagagtcaaacatcaggtagaggttcggcatcaatgggaagaaaaacctgacaaacatcctcacagaatggctcattacggctatctcattttcagagccagatatccgttaagcttttttgattatggtttggagcgctatatgggaaattcagtatttcttgaagctcataagcagaataccgttaatttttcagaagccggattttcttctggaatgctgaggtttggagaggtaagtactgcaatgatcctgcagactcttatccctttatttatttttttcctgggattcagctgcatttctgcagagcgtgaaaataataccttaaaagtgctgctaagtcagggagtacggtggaaggagctgctggcaggaaaaatactgggactgctttttctggtctgcctggtttttattcctgtcatgatcctgtctttggttatgtggttttctctgacagattttaaaaatacgtttgacgaatttttgcgactattttggattgcagcaacttattttatctatttttttattatctgcagcatttgcgtgatcgtgtctgcggtaagcagaacgtcaagatcctcactggtaaaactgataggtttgtggcttctgtttatcgttattattcccagaactgcacaggcgtttggtgcctatctgtatccggcaccgtcaaagatagattttgatacccgtgtggaaaatgaactggtaaaaacgggagacagccacaaccccaatgatatctattataaaggaataaaagattctcttctgcatgtgtatcgtgtgaaaacagtagaggagctgccctttaattatagtggttacatcatggctcaaggtgaaaagattagttccggaatttataataaaaactggcaaaagcagcttgatatttatgaaaagcaaaacacggtcaaccgttcacttgcttttgtgaatccttttcaggctgttaaagatctttcgacagcgcttacgggatcagactttaattcatatatcagttatcagcaacaggtcgaagactacagatatcagctggcacagctcatgaataaactgcagatggaaaatatcagcaacaaaaaacaggaggccaatgaaaaaccttatactataagcaggagtcactggaaagacctgcctgattttcaatatcggtttatcagccaaagcaccttgttccagaatgaagcagtttctgtactttctcttttggtatgggccttaggtcttctttttgtccttcattttttatctaaaacaataaaaataaattaatcatgtaccttttattatttaaaaacttcatccgttcccagtctgcctatctgggaatgttgttcctgttattatcaggactggtaagtatattggtcggaaggcagtttattgaaaagcaaaaagctaatattggtcatacagatgtataccagaaagagcatattgaaaggtatacaggatatatagagaaagacctcgggctcttgctgtattatctgaagtttggactggtgaataaaacagacaacctgaatgcgctgtcgattggtcagagagatgtcaatccctcgatacaaagcttaaccataagaaatctggaagggcagaagtatgatacagatcttcagaatccggtaagtctgcttttgggtagcctggatctgggatttgttattatttttctttttccgctggtgattatttcctactgttataatcttctgtcggaagaaaaagaagagagtacctggattcttttatctgtacagtcacaaacaccttttaatattctgtttaaaaaatttctggtccgttttgcagttattgccggagttttgctgcttctgattattttggctgttcctattcttaatctggacattaatggagcgctggcaggttttattctggtgtcactcttttatataattgtatggtttgcactaagtttctgggtcgtttcatggaataagagttccggggcaggggcagcaggacttttatgtttttggattgtgctgactgttattctgccagcagttctcaacaattttgttttgagcagatatcctcttccggaagcattggatactgccattgagcagagagaggcttatcatgaaaaatgggataccgatcagagaccaactttagagaaattttataagcattatcctcagttcagatcttatggttttcctaaagaaaatttcaactggctttggtattatgccatgcagcaaatgggggatgacgagtcgaaaaaccagtccggtcagttaaaggctaaactatggaaaagagaagaaatgagcagaaagctttcttattttgttcccggacttcatgtacagtttcagtttagtgatcttaccggttcaggtttggctgatcagttaaaatttacccaggaagcagaaaggtttcacgagagcaaaagacttttgttctatcctaaaatttttgcaaacaaacctaccggaagtatcgactggaaaaagtttggactggagtattatcatgaacggagtgaaatcaactggctggctatgcttgggccgttattcctgtttagtttgcttttttattgtctgggggctgcgaattttaggaaacatacggttttataataattggatttttgaagtcgattaaaaaaaatcatttggtgaaatcagaatgagggtaatgaatgacgaagagtctccaatgattatagaattttggaatgagaataaatgtaaactgagaagggatagtgtaatacttgactaatccatctaaaggccttataaatctaagaaaagcctggattttttaatataaatgcaaaaaatgataacctcacaattaaaaagtagaaaaaaatcgcattttaacccaaaatttttaagcttgagctaggctggaattaccataaaacctatatttgcaccctaaattttaaaataatgaaagaactaattgaaaaaatcaacgctgaattcgaagcgttcgcaagtgaggctaaccaacaagcagaaaaaggaaacaaagctgctggtacaagagctcgtaaatcagctttagaacttagcaaattgttcaaagaattcagaaaagtttctgtagaagaagctaaaaaataattcgttcccgagccggctcactgagccggcttttttattccttgattttcccttgttaccagcttttatcaatacgaaacaacctactttcgattcacgcctaaactgctatttttaagttggtgttttttattgatcgtctccatgcataaggtcatattgtttttgggcagatcatcatatcaatacatcgtcataccatccttatttaaacaatttctactatctttagcattcaatatatgttatgaagataaatagattttttgctgtaccggcagttgtgctggctgcccagttctcatgggctcaggtgaaggtagatccgaaagaaaagcttgatcctattgtcaaaagttttgtagatgaaatcaacaacagctctcagctggaaaacatggcttatgagcttctggacggtatcggaccccgtcttgtaggaactccagaaatgttggccgcgaatgaatggtctgctgctaagctccgttcgtggggaatagagtccaaccttcagcagtttggaacatggaaaggatggcagcgtggcattacgcatgtagacatgacgtatccacgtgtgaaatcattggctgcgacacagcttgcatggagtcctgcaaccaaaaaagcagtagaggctgaagttatcatacttccaaaagtttcttccaaagctgaatttgacgcgtggcttccttccgcaaaaggaaaaatagtgcttattgcacaatatcagaagatcgggcgttctgacgagcagattaaagaatttgccactccgcaactgtacgaaaaactgaaagcagaaaaagaacaggcagcaaaagacttccgtgattatgtgaagaatattggctatgataataatacgcttccggaagctttagaaaaagcaggagcatcaggaattgctatttccaactggacaggaatcatgggcgcaaacaggattttcggtgccaagacctcaaaaattccgatgattgacatcgatgtggaagattatggaatgctgtacagaatggcagaaaagggagcgaagcctaagatcaaagtagaagcacagtctaaaatccttcctgatgcgaaaaatttcaacacgatcggaatcatcaaaggaaaagaaaagcctgaagaatacgtgattctttctgcacaccttgattcatgggatggagctcagggcgctacagacaatggaacaggtacgcttaccatgcttgaagccatgaggatcctgaaaaaatattatccgaacaataagagaaccattgtggttggtctttggggtagtgaagaacagggactgaacggttcaagagggttcgttgcagacaatccgcagattatgaaaggtacacaggcggtattcaatcaggataacgggacgggacgtgtaattaatatcagcggtcagggatttgcagattcttacagctatatcggaaaatggctgaacggagttcctaaaacggtaagagatcagattaaaacagattttccgggaatgcctgggggtggaggttctgaccatgcttcatttgtagcagcaggagtacccgggttttctttaagctctctgaactggggatattttggttacacctggcatacgaccaaagatacctatgacaaaatagtttttgatgaggttaaaaataatgtggttttaacggctgcattagcttatatggcatctgaagatccggaatttaccagtagagaaaaaagggtaatgcctcaggacgacaaaggcgaaacggtaaaatggccggaagctaaggaaccaaagagagattccagggattataaatagagacgcgggatttcagatcttagacatcagatgcgatattttgttaaccagttttttgattgtgttttaaaatatccttagaatataaaaggttgtacacattattgtacaacctttgttttttgcgtgtagagaagctttcttatttcctcaattttattttcctttacaatgtaggttttgcagatcctgttgttcaggttcattctgaaattcatttgagtaccttctttttcccatgtgtgatttagtggcgggacataatctataaatttgaccaataaattcgcaaggcataaaaagtttctttttaaagataataacaggctgggaaaatttccaaaatcatcaattacctttattttaaatacagcctttcctaaagtcgttccccaataccattcacacagagcccccgaaataataacacacggaatggaatacaaaaaacagatgatagctatttttccaaacagaaagaagaaaataagaaagaagggcagcatatcgataagtttagcgaaaagtctttctgtttcattgcctttataagtagttttgtagggaaagtcatactcaaaagaattgtaaatcctgtatccaaattcatcaaattgacgggttggcctgcggataattcttctgtctttgagctcagatattttcatcacaccttattattgaaattcgatagaaacattaccttttaaatcctattagcgatttctaaaacacacgatttcagatcagaaaacttcgaaacagaaggcttgtaatcacttgcattcaattttccaaagccatatttacagaagataaaaggcaacccgttagcggatgcagaatcataatcggtctgtgtatcaccaatatagatggtattttcagcgcttaaatggtttctttccatgagtagtttgatattctccgatttcgcttttttagtcctgccgtgagattcaatatctgtaaataaatcattgaattgatagtattctaaaaatgcttcaatatatccgtcctggcagttactgacaataaaaagcttatgatttttggacagattctttagcgtttctgcaactccttcgtaaagaattccaccctcagaatgaagtaccttattttctttttgcacaatctccgaaagaatatcctgaacctgctgatcagaaattccgggaataatatcttttagaatgtctttaaataacagtcccatatattgatccatatcttcgggtttcaattcccttgtgatcagttgatgttctgttaaaacctcattccagattttgatgatggtagctctggggtcccaaagcgttccatctaagtcgaaaattaaatttttattgctcaaaatgtattgttactttgtttgatttgtaatgataacttagcctgtacaaaagcctacttataaaatcatgcttagctgtactctttttcttgcttcatccacctctgtgacttttacccggacgtgctggtgaagttttacgacttcattcacatcagaaacaaaaccgtccttcagctgagaaatatgaacaagtccgctttccttaattccaagatccacgaaacatccgaaagccgtaatattattgacaatccccggaagaatcattcctgcttttaaatctctgatgctttttacacttggatcaaattcaaatactttggctgcttttctagggtctaatcccggtttttcaagctcttttaaaatatccttaattcctaaaattccgatttcttcagtaacgtaattttcaggttttaccaaagccgttttttctttacttccgataagttctgtggttttaatacccagatctctggccattttttcaacaatgccatatgcttccggatgcacggcagaattgtccagtggatttttagcattagtaatccttacgaaagccgccgcctgctgataagctttttctccaagccgtggaactttcttaagctgttttctatcctcaaaagcaccattttcagttcggtaactgacaatgttttctgccattttttctcctattcctgaaacgtagcttaataatgatttgcttgcggtatttaaattgatccccaccgagttcacacacttcatcaccgtggaatccagttcgtttttcaattgagtctggtctacatcatgctgatattgtcctacaccaattgatttggcatctatttttaccaattcggccaaaggatctgctaaccttcttccgatagaaactgcaccacgcaccgttacatcataggaagggaattcatcccttgcaattttacttgcagaataaactgatgctcccgcttccgacaccacaaaaacctgcagtggtttatcaaaagcaatttttttgatgaaaaattcagtttcacggcttgccgtcccgtttccaatagagatcgcttcaatatggtaggcattcaccatagagcgtatttttttcattgccattccactctcattctgtggagcatgaggataaagggtttcattgtgaagaaggtctcctttttcgtcaatacaaaccactttgcatccgcttctgtatccaggatcgattgctaaaattcttttttctcccaaaggaggggcaagaagcaattggctcaggttttcagagaatatttcaatagcctttttatctgccttttctttagcttcctgtagtgcttcgtttgaaatagcaggttctaaaagtcttttataactttcttttatggccagagcgatttgttccgaactttcattattagatttaatgattgctttttctataaagtcgacagcttcctctttatcaattcctatattcactttcacaaaaccttctgattcagctctgagcatggccaaaagcctgtgagaaggggttctgttaagattttcttcccattcgaaatactgtgaaaatttctgtgcctcttcttcgtctttttttgctttaacaactttagaagtaactattgctttgcgctggaaaatgcggcgcagatttttacggacgtacatattttcattgatccattctgccataatatctcttgctccctgaagagcttcttcctctgaagaaacatcaccggtaagatatttggaaaccagaaattggagatcattgtttttctggctcataatgatcttagccaaaggttccagtcctttttctttagcggtatccgctttggtctttctgcgttttttgaatgggagatataagtcttccagttccgtaatgtcaaagctttcttcaattctctgcttaagttcaggagtcaaggcattctgctcttcaattgatttcaaaatgctctccttacgtttgactatttcctcaaactgcttgctgattttggagatctgttcgatttgaacttcatccagatttcctgttttatcctttctgtaacgagaaataaaagggatggtgcagtcttctgctaataattgtaacgtattgttgatgctcttttcggaaatattgagctgtatctgtataaattctacggtcgtcattgttctgttttcggaaagctaaaataaggttttgaaatgaaaaaagctgaatgttataagtaaacataggagtatgtagcaaaaaaatcccccgtattgaaagacgagggggcttaaatgttttcacaacggaataatccttattgtgaattgcttttcaaaattattaatacaaatatagaagaaaaaatctttactataattatgggaatccgtaattcgaatattttttttatttctatttttatgtagtatcaaaaattagaatgatgattaaaaatatacttggactagacctaggaaccaactccattggctgggcattggtagaaatagatgacgagaataaaattgttagaattctagggcttggttctagagttctaacaatggatgctgctgaaattgcaaaatttgaaagtggtgctaaaacagaaagtggtgctgctaaacgtactaaattgcgttctccaagaaaactaaatgaaagatatttattgagaagagataggcttcattgtgttttaaatttactgaattctcttcctgaacattataaattatctattgaatttgaaaatgaaaaaggcagacgtagtggtaaatttaaaaaagggactgaagagaaattagcatattataaagatggtaacggaaaattccaattcctttttaaggatgtttatcatcagatggaaaatgattttaggataaagcatcctcaaatgtttcatcaacgaaaaaatggcaatcaaactaaaatcccctatgattggacattatattatttgagacataaggcagttacagatagaaactttgaacttactaaagaacaattggcttggattacattaagttttaatcagaaaaggggttatgaaaaagtgattggacaggatgagaaagttcaaaaagaaggagaattaacagattcttttgtgggtaaagtaaaagaagttaataagcttgaaaatgaagatgcttatcaaattattttagttgataattctaacgaagaaataaaacttttcaaatacagagaagaatcaaaaatcgcaattacaaagattggagatttgaaagaggttgaaattgtctcaaaatatgatgacgatggtacaattgagtcgaagaaaacagaatatattattaatgaaattcgggagtttctaataacagatgttagaaatacaggacgaaaaataaaagagaatttcatttttgaagtagaactagagacaggttggataaaagagcagcaaagtaaatttacaccaaaatggaaagatactaatcgagattttatcattaaaactaaatatgatgaaaatggaattagaataccaaaaggggcggatagaggtagaaacattaatattccaaaagaagaagattggactttgatgaaactgaaaacagaaacttcgctcacctcttttaatacaaaaaacaataccaaaggtattgcttcctttgtctattataatcttctccaaaatccaaaacaaaaaattaaagctgatttaatcacagtaatagaaagagattattaccgtgatgagttggatgtaatatataaaaaccaagaaaaatttcatccagaattaagaaatcgaggtttatatgaacaagcaattcaacttttatatccaaataatcttaatcatcaaaagacaattaaagaattagattttaatcatttgattaaagaagatatccttttgtatcagagagatttaaaatcgaaaaaatctttaattgctaattgtatttatgaaaaggaaaactttgagaggacggatgaaaaaactggtaaaaaatataaaaaccccttaaaggctattcataaagctaatccgttttatcaggaatttagattgtggcaatttattaaaaggctgaaaataattaagaaagaagaaattattaatgaagaaattaaaattaatgtagatgttacagctcagttattaacaactgaagtaaaagaagaattatatgcttttttgaatgataaggaaaatgtaacagagaaggatattcttggatttgtaaataaaaactacaaagatttaaaaatttctgcagaaaattacaaatggaattttacctcagaaaaagaaccttgcaacccaacgagatataatttcattctccggacaaaacgaattaagggattcgattacagaacatttttgactcccgaaaatgaatataacctgtggcatttcttttattcggtaaagaaaaaagatgaatttaataaaggattaaataatgtcatttcacgattattagataaagtagacttacctagagagtttaaatctgaattggttaagaacttcagttctttcggaggatataccaatgattacggaacttattctgaaaaagctattaaaaaaatactgccgtttctaagacttggaaaatattggaattcaaatgatattgaaaatattctttcaaaaacaaatcacgagataaaacaaaaggttttagataaagaggaaatcaatggagaattaaaagactttcatggtctttgggtttcgagtgcatgttatctggtttatggtcgatattctgaagttggagaagtgcagttttggcaatcgccttatgatattgaaaattacttaaaaaatgaattcaaacaacattcattaaataacccaacagtcgaaaaggttttagttgaaactttgcatgttgttaaagatatttggaaatattacggcaaggaaataggaacagatgaagaagggaaaattatttatgataaactattcgatagaattcatattgaattaggtcgggagatgaagaaaaataacaaacaaaaagagagagacaataaacaaaataaagaaaatagaaaagctaatgaacggattgtggagattttacgtgagttaaaacagaacaactcttcactacaagaaaaatcaccattccaacaagaaaaactgaggatattagaagaaagtcttctgtcttctattgaatttgacaaagataataccgaatataggctttccagtggaaaaataactaagaaagaaatcaaggatataacctcgaaagaattttctaaaattactaggagtgattttgaacgatataaactttggttagaccaacgatatcaatctccttattcaggtaggttcattaaattatctgatttgtttgaccgaaaaaaatatgaaattgaacatgtttttccacaagaacgtatcacgttaaatgcactttacaataaagtaatatgtgaaacggaaatcaataaggagaagaaagcttcgacaggatatggatttatatctaatgcaaaatctaaaaaagttttttgtactgcacatgattcagagatagagataattgctataaaagattacgaagatttagtgaataataatttctccggaagaaaaagagaaatattattgagtaaagaaataccggaagaatttacaaatagtcaattaaacagcagtcaatatatctccaaaatggcgatgaaactgttgagtaatattgttcgtgaaaaagacgaagatacattccgttcaaaaaatgttttggctacgaatggaacaattactacaaccttaaaaagacattggcaactgaatgatgcttggaacgaagttatttctccaagatttaaaagattgaatgaattaacaaacacaaatttattcggacattatagagaaattaatgggcataaaattttcatcaatacagttcctgaggaagcggacaaaaatttcgattctaaaagaatagaccatcgccatcatgctttggatgctttgatagttgctttgactacggaaaatcacgtaaattacttaaataatatttcatcacgagaaagtaatgaagagaaattaaaaataagaaaaggaattaagtttcaattaactaattcaagaagaggttttaatgatgaaaaagaatggtattttctgccacctgcacagataaaaacaaaagaaatgattgatgaatttgagtatcagtttaaagattttaaaagcaaagtcttcaaagatattgttcaaaatgtattagaaaatacgatagccagttttaaacaaaagaaccgtgtgattcgtcaacgttggaataagcatttaaaatctgagaatgggaaaaccagcttagtatcacaagagggcttaaatgaaattgtaaattacaacgtgagaaaaagacttcacgaagatacattttatggtaaagtcaaattgcaaaataacaagaatactaataaaaatgttattaatataaggctaaaaaaagcaatagaagaggggtatgatttttatgattcaattttattatctcatataagcattttgagaagtgaaaatatctctacaaaggaaatcatttcgaaacttgaagatgaatatccaatggtaaatgtttatgaaaagtttgtagcaacaagatttggaaataatttagaatctttttcacagataccatctgacaaaattattaaagctattcagtcaattacagatacagggatacagatgattttagaaaaccatcttaataattataaagaagttgttgatggaaaaccaaaatttgatactgaaaatgcattttcatccgatggtgttaaagagttaaataaaaacattgtagcgctaaataaaggaaaacatcatcaccctatttacaaagttaggacaagtgatgcaatgggaacaaagttctctatatcagaaggcgggcaaaagagcacgaaatttgttgtaacggcagctggaagtaattctttctgtggtttctaccaaaaaggaatagatagaaaattttacataccaactttacgagaatcggtagaaagcttaaaacaaggatttgagccttgtccattaataaatcctgaagactctgatttcaaattaatttttgttttaaatccaagtgatttagtatatgttcctacggaagaagaaagagatggttcagttttaattgatttcaacaatttgagaaaagagcaaatgcacagaatttataaattcactgatggtagtgggacaactatgaattttgtgcctgccaatgttgcaagtttgcttttcaatatgtcaaataaagaacaagaaaaagctgaaattaaactctcaattcaaaatgagttaggcttaggaagtccacagtctaaaaaccaaaacacagtggatggcatccaggtgaagtcagtttgtttgaagttgaaagtagatagattaggaaatatatcgaaagcataatcttatgataacccgctccatatatatcggtaatccagcttatctcaaactaaaagatgagcaaatgaaaatactctgtccggaaacaaaagtcgaaagggggagtgtatctgtggaagatttgggattactgatgttggatcatttccagattaccatatcacatcaactgattcagaaaatgatgggaaacaatgtggtagtggtcagctgcgacaatcatcatttaccgcatggaattatgcttccattatatgggcacactgaacattccgaccggatcaaagaccagttagaagccagcgaaccactcaaaaagcaactttggaaacaaactgttgaatgtaaaattgaaaaccaaaaagaagttttaaagcggttagggaattattataaaccaatgaatgattatcagaataatgtgaaaagcggggatatgaccaatatggagggtatcgcagctcaacattattggaagtatctcattagtctggattttttgagacagcgttttggagattcacccaatcagtttttcaatttcgggtattcggttctcagaagtattgtagcaagatcaattgttgagaccggattacttcctgtccttggaattttccataagaataaatacaacccttactgtctggccgatgacctgatggaaccttatcgcccttttatcgatttattagtaatgcaatggcttgcaatcaattcagacactgaagaattgactaaagaatttaaagctttcattttacagattgcgaccaatgatgtaagaatagacgataaaacaagacctttattggttgcggtgaaaacaacggcgacatcactgtataaatgttatacaggagaaaaacgattgatctcttatcctgaactgatatgaaagccgaaaggtttaatgcttaccggattatgtgggttttagtattatatgatttaccaacagagactaaagctaatatgaaagatgccagccgctttcgtaaatctctgcttgatgatggttttacattatttcagttttcaatgtatgtaaggcactgtccaagtcgtgaaaatgcggaggttcatattaaaagagtgaagcttatgcttcccaaagctggaaaagttgccattatgtgtatcactgacaagcagtttggagatattgaaattttttttgccagaaacaaagaagaaccacctccaacctttcaacagcttgaattattctaaattttgaatcctaaaaataaaaacaatctactgattatcagtggannnnnnnnnnnnnnnnnnnnnnnnnnnnnnnnnnnnnnnnnnnnnnnnnnnnnnnnnnnnnnnnnnnnnnnnnnnnnnnnnnnnnnnnnnnnnnnnnnnnnnnnnnnnnnnnnnnnnnnnnnnnnnnnnnnnnnnnnnnnnnnnnnnnnnnnnnnnnnnnnnnnnnnnnnnnnnnnnnnnnnnnnnnnnnnnnnnnnnnnnnnnnnnnnnnnnnnnnnnnnnnnnnnnnnnnnnnnnnnnnnnnnnnnnnnnnnnnnnnnnnnnnnnnnnnnnnnnnnnnnnnnnnnnnnnnnnnnnnnnnnnnnnnnnnnnnnnnnnnnnnnnnnnnnnnnnnnnnnnnnnnnnnnnnnnnnnnnnnnnnnnnnnnnnnnnnnnnnnnnnnnnnnnnnnnnnnnnnnnnnnnnnnnnnnnnnnnnnnnnnnnnnnnnnnnnnnnnnnnnnnnnnnnnnnnnnnnnnnnnnnnnnnnnnnnnnnnnnnnnnnnnnnnnnnnnnnnnnnnnnnnnnnnnnnnnnnnnnnnnnnnnnnnnnnnnnnnnnnnnnnnnnnnnnnnnnnnnnnnnnnnnnnnnnnnnnnnnnnnnnnnnnnnnnnnnnnnnnnnnnnnnnnnnnnnnnnnnnnnnnnnnnngctgtgactaatcacgaagataataatttttgaaagaaatccataaattattaacagaagtattttcttattttgattactgcatttcagtgtctgcatctgggagtctcaaccttacactatacctttttcaattatgccctttaaattttcatagtcaatatttaatttatttcaaaaaatagaataatgtcagaaagcttttaacagacaatttttctgttgagaaagatatttttagcccccaacaacttcgtgttttttcttctgtaattaaagattttaaataaagattttcatttcttgatgtatgttaagatgataattaatatggtttttatatttttgaaacttaaatttaagattttaattaaatttttctaaacaacaaacaatatgaaaaaacttagtgtaattgcattagtaggaattggattgcttgcagcatcatgtaataaagacaaatcagcacagactgcggctacggctacagaacagaaagtagctgaaagcaaaggtgaagttttgccggttgatgtagcgacttctgtggtaaactggaaagctttccacaaaggaggtatggctcctcgttggggaacacttaacgtaaagtcgggagatcttagcattgaaggaggtcagctgactgccggaaattttgtgattgatatgaactctatcaaagttgatcctgcttctgtaacagaaaaagataaaaaaccagcagatttagaagcacacttgaaaaatcaggatttcttcaacgtggagaaaaaccctgtttctgattttaaaatcacaagcgtggcagacttaaaagaagcaccggcagatgcaatagctggagctaataaaacagtaagcggtaatcttactttactgggaaaaacaatgaatgtaacgttccctgctaaagtggatgtaacagataattcagctgctgtgaatgctaaatttacagtaaacagagcagattggggaatcaaatttggtacttcagaatcagatcctgcagaatggatgatcagcaaagacatcgagattgcagtggatgtaaaggctaaaaaataattgttagatacaatacataccgtagagctgcttttttataaaagcagctttttttatggaatgtaaatagtttttgagtacatcaggcagctcacaattcattacttttgcacctatgataatgatatatgttctcctaatcatcaacctgcttacttttattaattttggatgggataaaagacttgctgtcaggcataaaagaagaatttcagaaaacacgcttctaggattaacttttattggaggcacagcaggagctggtctgggaatgctgctgttcaggcataaaatttcaaaaaaatcctttttgctgaagtttgcgggaattattttaattcaggcattaggcatctgtttttttgtaaaatattggatggattaatcgttaaaacctaatggtagcttcttaatcttcaatttaaatagattgataaaagattcaattttaaagctttaacagggcagagtggtaaacgcactcattatgaaattgttaattaatttatattcttgcttattattcattagaaatcactatttttgcacccgtaaaaatcattcatgcaaaacattagaaatattgcgattatcgcacacgttgaccacgggaagacgactttggttgacaagattattcatgctacaaacattttcagagaaaatcaggaaagtggagaattaataatggataataacgatcttgaaagagaaagaggtattaccattttatctaaaaatatttctgttacttataaagacgttaaaattaatgtaatcgatactcccggtcacgccgattttggtggggaagtagagagagttttaaaaatggcggatggggtaatcttattggtggatgcctttgaagggccaatgcctcaaacaagatttgtacttcagaaagctttggaattaggattaagaccattggttgttatcaataaagttgataaaccaaactgtcgtcctgacgaagttcatgaccaggtatttgatctgttctttaaccttgaagctaccgaagcacaattggatttcccaacattctacggttcatctaaacaaggttggttcaatacttcattggagcagacagacaacattttcccattattagatggtatcttacagtacgttccagaacctaaagttgaagaaggaaacttacagatgcagatcgtttctctggatttctcttctttcttaggaagaattgcgatcggaaaagtgatcagaggtgagatcaaagaatcgcagtggattggtcttgctcaggcagacggtaaagttttaaaaggaaaagtaaaagaactttacgtttttgaaggattaggtaagaaaaaagttacagaagtaaaagcaggtgatatctgtgctgttgtaggttttgatgctttccagatcggagattcattcgtagatcttgaaaatcctgaaccattgccaagaactgcaattgatgagcctacattgaacatgacgttctctatcaacaattcacctttcttcggtaaagacggtaaatatgtaacttctaaccacctgaaagaaagattaacaaaagaattagagaaaaacttagcattaagagttgaacaaactgatgatgcaaacacgttcctggtattcggtagaggtattcttcacttatcagttttaattgaaacgatgagaagagaaggttacgaaatgacaattggtcagccacaggttatcctgagagaaattgatggagaaaaatgtgagccttatgaatctttagttgttgacgttcctgaagaatatgcttcaagagtaatcgacttagctactcagagaaaaggtgaccttcacattatggaaactaaaggtgaaatgcagcatatggaattcgaaattccttcaagaggtttgataggattgcgttctcaaatgttgacagctacagctggggaagctattatggcacaccgtttcacagaatacaagcctttcaaaggagctattcctggaagaagtaatggggtattgatcagcaaaactcaaggaccggctacagaatattctattgctaaattacaggatagaggtaagttctatgtggatccgggtgaggagatttatgcaggtatggtgatcggtgagcaaaacaagccgggtgacttagtcgtaaacatcgttgaagcaaaacagttgaacaacatgcgtgcttccggaaaagataaagatactggagttgctccaaaaatcttattctctcttgaagaatgtatggaatatatccagggtgatgaagctatcgaggtaactccaaacttcatcagaatgagaaagaaaattctttctgaagaagaaagaaaaagagtagaaagatcaggaaaagcttaataacttttttctatataaatcagagccccgaattttcggggctttttttgttatttaggaagcccttttctcagattacaaatttaacttttacattattttgtgttttttggttatttatttaaataatctattttattttagatgttttaattaggataatttatttatttcattaaaatacactaactaacgattgttagtgtttagattaattgtatgtttgttaccaagtgatacgaacttaaataaacatacaatgagaaaatttttatttctattttcccttgtgggaacattatccccagctcagacagcagctcaagccgatgccagggtagaatctgatactatgtcatttgtaaagccatccgctcttccgaaagaagtaaaagaagacagggtaaaagtgaacttttatggatttataagaaatgatatattttatgacaccagacaaaatataggtgctggtgaaaatatagtccctttatatccaagagaccgcctccttgatgtcaatggaaaagatgtcaataatgcttcgaaatttcacatgctttcagttatttcaagggtgggaatcaatgtaaaaggacctgacgtacttcatgcgaaaacggcaggaatattagaagctgaattctttggctctaccgaagccgggatcaatgaactgcggcttcgacacgcctatataactcttgattgggagaaaacacagttgggaatagggcagtactggcatccattggtgattttagactgcttacccaatgtggtcaactacagtacaggttctcctatctttgcacttaacagaaatcctcagataagactcacgcaaaaaattactgatcggttaaaagtaattgccgccattaattcacaacgggatttcacccccaatacctctccttacagagatagcggtatgccatcctctcatcttcagtttcagtataaatcaccaaaatttgttgcaggtatagcagggcaatatgaagttcttcggcctcagttatcctcaggaacatctcctgtagtaaataacaacaggttaaagagttttagtacgctggcctatgccagaataattacgaaacctttaatgattagtgcctctgccatgatggctcagaatgcagcttcatttgtaatgctggggggctttgttggatattcggtacccggcgaggcagacctttttcgtacaatgaatacccgaagcgcatggatcgattttcaacagctgacaaataagaaagttacatttggtttttttgcaggaatagtgaaaaatcagggaacaaatgatcccattgatggaagagctgctgcaagttacggagtgacttcatcctggggggctgtttcggcaactcagggtggaagaagtgtggatcatctctggcgtatggttccacgtgtagactggtccctaagcaatgccatcaagttaagatttgaaattgaaaaaacagtggcggtttggggcgatgcccaaaataccggcagaggaatcggaaatgagtttaccgcaaaaaataaccgatttcatctggcgaccttttttatgttctaaaattaaaataataaaaagcttaagtaaaaaataatatggatacaatacagacaaaaccaaaaaataatatactgaccgtaattattgcttcatctgcaggaactctgattgaatggtatgatatgtttcttgcgataattcttgccggttctctggctgttaacttatttcccgcagagggctcacactttctggaaacacttgcagtagtcgcatcatcatttatgttcagacccattggttctcttatattcggcaatattggagatagaataggaaggaagtattcttttctcatttcattaattttaatgggggcttcaacatttttgattgggtgtattcccggcttttcaagtattggctgggctgcgccaattctccttttgatctgcaggttgatgcaggggctggccatcagtggtgaatatgcaggggccgtcatttatgtagcagaacacgctccaacgaatagaagaggattttatacgggatttattcaggctactgttccaataggtcttttgatttgcctaagtgttatttttattacaagaaatagtatgagtgaagaagattttacccgctacggttggagaattccattcctgttaagttctgttttggtaattttaagttacattatacgtaaaaaacttcacgaaagtcccgtgttcgaagaattgaaaaaagcaggaaaaaccagtaaatcacctgtaaaagaagcttttacgacaaaagggaatgtgaagacaatgctaaaagctatttttggaggtaatgctgcgcaaagttcagtcatgcagaccagtctttttgtgacgttattttttatgcagcgtgcagtaaagctggaagaaactacagttttgatgatcactggagttgtaacactttttagtgcttacttttatcagtattttggtgcgttgagcgatagaatcgggcggaaaagagttttgattggcgggttaatttcaagtctcatcttaattccactttctttttacctttttatggaaataggaaatccggataggcttacaacagtacacgagataagtaatatagcggttttacagataatgggagtgagttttctgctttctatagcaggagctgctacgtatggtccacttggggcattcatgcttgaaatctttccaacaaaaatacgatatacaagtatgggttttgctcagaatatgggaaatggttttataggtggtgcgacaacattcgtaacagaattcattaagacctctttcatggtgagtgctgtactggctccttttatcggattgatttatccgatatttcttgtaggcttggcgattattgtcaatatcctgtttattcctgaaacctaccggacagatcttacagaagatcataagggtgatgttgatgaaaatcagctacatacgattgattcaggtaaagtttaaaaaatacagagtcatcctgaacagtccagatatttttatttgaaaagttatttttagtaaaaaaataacttttcaaattcggataaataatctttatatcattagttttgcattttaatctcccaaaaataaattaaaagtagtttgcacacgatgagaatgaatattataaagcttactgttttaaccggagtctttgcatcatatgccagttgctccgtacagagcaataccgtaaaaacagcgacgacaaaaagtacaacaaagccaaacagcaatatatcaaaacctaaagagactacaaccgcagcaaaacctgtaacagcagtacctcccactgatgaaaacttcagaacggttcttccggaagtcaaaagagagtttcgtggtgcatggattgcaagtgtagccaatatcaactggccatcaagaaataatttgacggttgatcagcagaaagcagaggcaataagcatgcttgatatgttgaaagacaataacttcaatgcagccatatttcagataagaccttcagcagatgcgctgtatacgagtaatatagaaccctggtcgtattttctgaccgggcagacgggaactgctccctacccgaattatgatcctcttcagttttggattgaggaagcccataaaagaggcttggagttacatgtctggctaaatccttatagagctcatcattcaaacggaggtgcagtaaacagcctttctatggcaaacaaactttccgatattgttgttaaacttaagaacgggatgtactggtttgatccggctaatcctaaaacgcaagggcatgtttccaatgtcgtaaaagatattgtcaaaagatatgacatcgatgcaattcatttcgatgactatttttacccatatgcaacctataacagaggagctgactttcccgataatgcaagctggaacgaatatctgagaagtgggggaacattatccagagcagactggagaagagacagcgtcaataaattcgttgagagaatctataaagaaatccatgctgagaaaaattatgtaagatttggaattagcccgtttggaatctggaaacccggatatccggcaggaattgtaggatcctctcaatatgacgaattgtatgcggatgctaaattatggttaaacaaaggctgggtagattatttttcaccacagctttactggccgattgattcaaaagggcagggttttgaggcattattaaactggtggaaatccgaaaataccatgaaccgccatttatggccgggacttaacacggttgagatcaaagtatcagaccgcccaacggaaatcaaaaatcagattgaaatttcaagacagatcttaaagaatgatgccggagaaattcactggagtattgccggacttacaaaaaatcctaatatgctgcctgttctggtaaatggtccatacagagaaaaagcattaattccgaaaacaccatggatcaagacggttgccttgcagactcccacgatatttgttgcagataatggaacttctgccagaaccagctggagtagcaaaaatattggagatgtatttcaatgggtacttttcacccagtataatggagt

SEQ ID NO: 2615 - DNA, 22979 bp, synthetic construct
  source 1..22979: mol_type = other DNA
  misc_feature 1..22979: note = Synthetic
taacagattcgggatatgtcatagagtgttgtcagctaacgtggaatatgtgaatggaaatagttttggttcggtacaattatatattaatgtaaattcagatgattttcagcagcttgaatattatctgattaataataaacttttgagtacaactgtggagtacgtctgcagaaaatattcttgagatagattcatatagttttaatttccaaaaaagcgttcagtgaaaactgaacgcttttgttctatagtaagatttaaaaactaatttttagtatttagctcctaactttcaattttttattaaattctttcaatatctgctccgattgctttcagtcttccgtcaatattttcataacctctgtcgatttgctcaatattgtggatgattgattttccttctgcggaaagtgctgcaataagaagtgcatttcctgctctgatatccggagaggtcattgtggttcctctcaatggagtttcctgattcaatccgattaccgttgctctgtgcggatcgcataaaatgatctgagcgcccatgtcgattaatttatcaacgaagaataatcttgattcaaacattttctggtgaattaataaacttcccttcgcctgggttgccaccactaaaataattgataataaatcaggtgtgaatcctggccagggtgcatctgaaatggtaagaatagatccgtcaatgaatttctgaattttataattttcctgagccggaatgaaaatatcatcgttgctttgttcaagctgaattcctaattttcgaaatgtattgggaattactcccagttggctccagtttacatttttgatggtgatttcagattttgtcatcgccgccagaccaatccaagagccgatttctaccatgtccggaagcatcgtgtgctcagttccgtgaaggtaatctacaccctctatggttaaaagattcgatcctatccccgaaatgtttgctcccattctgttcagcatcttacaaagttgctgtagatatggttcgcaagcagcattataaattctggtttttcctttagctaaggcagcagccattacaatgtttgcagttcctgttacagaagcttcttcaagtaaaataaatttaccattaagttctttagcttttaatgaataaaaaaactcttcttcatcataatgaaattctgcaccaagttctacaagtccctgaaaatgagtgtctaatcttcttcttccgattttgtcacctcccggagtaggcatataagcttcgccatatcttgctaacataggacccatcagcatgatggaacctctgagttttgctccgtcttttttgaattcgttagactttatataatcaaaattaactttatcagatttaaacgtataatctccctgcccgttttttgtaaccttcacaccgaagtcgcctaaaatttcaatcagcctgtttacatcgtgaatatccggaatatttttaatttttacctcatcatctgttaataaaacagcacaaagaatctgtagagcttcattctttgctccttgtggagtgatttcaccatgcaatctttttcctcctcttatttgaaatgttccgctcattattttctgttcttataattattattggtgtgccttcttttattattgttattattattgctgttagactggtttttattattattacccctgttgttattgttattattccggctgttattgctggtgtaatagattttactcttttcaagagtatctattccggtaagatccagtctgttttcggaaagctctttcagatggcggaaaattacatcatctgttacatgttctttattatatacgttataagatttcttcatattgttagcaatcacttcgattaaggcttctttttcgtcacctgtttctagctctattgctttttcgattaactgaagaatactttttccgtaaaatttaaattcaccctgaagtttaggatattccatagtctttggtttctcagccagctgttctctggtaggaaacgggtatggagaatctacatctaaatcataattagctaaaatgaataaatgatcccaaagtttatgtttgtaattttcttcatcacgaagctgggggtttctttgacccataaaatcgatgattgccattgccatttcgtttctttcatttctgtcagaagtctctttgcaacgttcaaccaactgttgtataattctaccgtattccggtatatgaagctggggtttttgggtattgtattccatagtctgcaaatatatggattaatggaaaaattgtaccgaaaatcttaaaagtttatgattttttaatgaaaatttaaataatgatttttaaatgttattattgaatagcaattttttttcctggcaaatgtgatttatatcaataaaattgtaatttggttgatagtttaataattaaaactttctatatgaaaaaaacacatttcttactttctcttctggctttaggctttgtcagctcttgtcagaataatgatgagatgattaatgaaaccctcgagaaaaatgaagttcacgataaaattgtgaatgttacaaaacatgacgggcgtcctttcagtacaggagacggagctgcagcaggaaaatttgtatcaggtccgggaggcggagttttgatgcagggtttttattgggatgttcccgatggcggaaactggtggaataccgtaaaaactaaagtcactgactggtcaaatgccggaatcggagcaatctggctacctcctgcttcaaaggctcaaaacggagcatactcaatgggatatgatccgacagattattacgattttggaaattacaaccaaaatgggagcatagaaacacgttttggttcaagaacagaacttgaagccctgattacgcaggctcatacggaaaatatgcaggtttatgctgatattgtaattaatcataatagtggcgggcaatctgaagcaaatccttacacaggaacaaatacatggacgaacttctcaggggtggcctcaggaaaatttccaagaaattacaatgatttttataaaaatgcttacggaaataatgatgagggtgcttttggaggttttcccgatttgtgccatgcgaatccttacgttcaggattggctttggggaagagatgattctgttgcaaaatattataaaaatgtaatgaaatttgacggttggagatttgactatgtgaaaggtttcggaccttgggtagtgaatgcctggaattccagcgttggcggattttctgtcggagaattatgggattcgaatgtaaatactttggaatggtgggcaaacaatgcaaacagctctgtgtttgattttgcggcatattataaaatggatgaagcttttgacaatggaaatttaaacgctttaaatgatgacatgatgtggaaaagaaatccttataaagcagtaacttttgtggcaaatcatgatacggatattatttataataaaatgttggcgtatgcatatattttaacacatgaaggatatcctacaattttttaccgtgattatgaagaatggctgaataaagaaaggctaaacaatctgatttggattcataataacaaagctacgggaaacacctcaatattatatacagataatgacgaatacattgcaaggagaaacggctacaacggaaatcccggattagttgtttatatcaatagttcttcaagctggcaggaaagatggattcagacaaactgggcaaatcagcaaattaaagactttacaggaagttcaagttggtacccaacaacacagagtgataaatgggttaaaatccaatgtgctccaaattcttattcggtttggtcattgaatcaataaaaatgtaatagagatataaaaaagactgtttcaattttgaagcagtctttgtatttaaatatcaagaagaaggtagatatcatgctgagcaaagccgaaatatctattgatttacacttaaacctcaataaacttcgccctctgatgaggtgtcggcaaataacatttctgatttgccagtttcattctgtttctggaaatcaggtcataaaattggtcacttagagcggcgggcagaattttaccaatacccgaaagcttataaattccacctaataaattggcaatttgtaaaaccgcacgtgattttatcagataatatctgttgggactccaaagatacatggtattgaattctgttgttttcaaacctctttccgataaaaatttttggccaaaatcagattgcaaggaagcaaacataaatttatcatgtttatccctttctaaaatccattgtacccaaaaattgcagactccacaatctccgtcgaaaaatacaatatatttattttgccagttttcctgcatgatttttagatttaaaataccattgctctttctgtatcctcttttacttttttaaaatattgaattaaaatttttctctgttcatcagttaattttgcgtcctgatgtcccaagtaatatgattctaaaggcatttcctttttttcaatcatttcaatacattcttccagtttatgagcttgtcttttaggctcatacacggcaaaggtagaaaaatttaaatgttttcttccttcatcaatatgatttttcaggaaccatgatgaaggcgctatacttgaataccaaggatatttcgtctcgtttgaatggcagtcatagcaagatgtgttgatgatttttgcaatatcgggtggtgttttttttattctcaaaaaatccatacccggagtcggagtcggatttgttttatcaatcggaaaaaactgtatgatgataaaggctaccaggagcacaattaatacttttttcatatcctgaaattcaagttttctaaacagataaagttaattaaatttttggtaaataaaaactttaaaaattaaggaagtattaccattgaattgaattattctaaatatgcattccagatcttcttatttgtttaaaataatataaaattttattaatttaattgcataataatgcattttgctgttgtgctgtcaggaaattagtatatataaatgtgttatagtttttaactattgtaaaaatatttttgatagattgtatttatattttaactgttgtaagtttgccttgttcttaacaatgaatttaactgtaatcaacataaaaaattaaacgataatggaaaatgatttaaatgacataagtaaatgtccgttccacaacggaactatgaaaaaacaaagcgttgccggcggtggtacaaaaaacttagactggtggcccgatcagctaagagttgatattcttcgtcagcattcttcactttcaaatcctatggataaagattttgattatgcagaagcttttaaaagcttggatttggaagctgtaaaaaaagatcttcatgccttaatgacagattctcaagactggtggccggcagattttgggcattatggtcctctctttattcgtatggcctggcacagtgcggggacctatcgtataggtgatggcagagggggagccggggcaggacagcagcgttttgcacctttaaatagctggccggataatgtaagccttgataaagccagaagattattgtggccaatcaaacaaaaatatggtaataaaatctcttgggcggatttacttattcttacaggaaatattgccctggaatctatgggattcaaaacatttggctttgcgggaggccgtgaagatgtctgggaaccagatatggatgtatattggggttcggaaaaaacgtggctaggaggagatttacgttatgctcatggctcagaaggagtcgttgaaggacgtggtgtacttcctacggatgatgatgcagacggagatatccattcaagagatcttgaaaaacctttggcagcagtgcaaatggggcttatttatgtaaatcccgaaggtccggacggaaatccggatcctattgcagcagcaaaagatatcagagatacatttggaagaatggcgatgaatgatgaagaaacggtagctttgattgccggaggtcatacttttggtaaaactcacggtgctggtcctgcagatcatgttggaaaagagccggaagcagcgggaattgaagctcaggggttcggctggaacagttcttataaatcgggtaaaggagctgacgccatttcaagcggattggaagtgacgtggacggaaacaccaacacaatggagcaattatttctttaaaaaccttttcgaaaacgaatgggaactaacgaaaagccccgcaggagctcatcaatggattgctaaaaacggagcagaaatcattcctgatgcatttgattctaataaaaagcacagaccgacaatgcttacaacagatttgtcgctaaggtttgatcctatatatgaaaaaatttcaagaagattttttgaaaatccggaagcttttgctgatgcatttgccagagcctggtataagctgacacatagggatatgggaccaaaggctcgttatttaggtcctgatgttcctcaggaagagctgatttggcaagatcctattcctgaagtagatcatgaattaattacaaattctgatattgaatctcttaaatcacaaattttaaattcaggattaagtgtttctgaattggtttcaacagcctgggcttcggcttctacatttagaggaagcgacaagcgcggtggggcaaatggctcgaggattagattggcacctcaaagatattgggcggtaaataatcctgcacagcttcaaaaagtgctgggaattttagaaaatatccaaaaagaattcaatgaaactcaaaccggaggtaaaaaagtttcattggcagatttaatcattcttgcgggaggtgcaggagtggaaaaagcggctaaagatgcaggtcatcatattattgttccttttgctccgggaaggatggatgcttctcaagagcagacagatgtggaatcaatgagctatcttgagcctgctgctgacggttttagaaattatttaaagaaaaaattctctgtttctactgagtctttattgattgataaggcgcaattattaaatcttacagctccggaattaaccgttttgattggaggaatgagagctttaaacacaaactttgatggttcagaacacggaatttttacacaaagacctggggttcttaccaatgatttctttgtaaatcttttggatatgagtactcaatggaaagctgcttcaggagatgatgaattgtatgaaggcactgaccgtaaaacaggtgagaaaaaatggacggcaacacgtgcagatcttgtttttggttcaaattctgaattgagggcgattgctgaggtgtatgcaagttctgatgctcagaagaaatttgtaaatgatttcgtttccgcttgggtgaaagtaatgaacgcagacagatttgatctaaaataatcaataaacttacataacattgcagagacagcttgtaaagctgtctttttttagtaattttttatttaagtttataaaaattgatgaaattttgagataaactatatatttgctgaaaaacaaacaaatatatacatgacaagaaaactatttcctgccttattattggcaggctcttttacttttgctcaggttggggtaaatactgaccttcctagggctacctttgaagtggtaggaaaccctatggatacttcaaaatttgatgggattatcgcaccgaaaattaccggagatcaattaaatgctaagacctacacagctttccaaaccggagctttggtttatgtaactgctttgggcaccttaagtgggcaaactgctgatgtaaatgaaataggatattattattttaatggagatttgaataagtgggtgaaaatcaattccggaaattctacggaaccttggaaaattcagggaacgaatgatcctgctacacagaatacagagaacatttatcaggaaggaaaagtagctattggaacaaatccgacaatgttggcaagtgcaaaacaattagaggtcatgggcgatttcaaaactcaatatgaaagcggaggaaattattacggtattgacactaattttaatgctggagccccttttaatattatgtatgtagcgaacaatacggatcttgcctctgcaacagaaagctctgttctatctctgtctcagggaatggcgaatttccaaactacaggagccaacggaagcgggagtattgctgcttttaccaatacaaatggtggatctttcggaatggttgccaataaccaggatcaaaccgtgagttcttcaatttttgggagtgccaattctgcaaataccagtgaattggctttaggccattttaaaacaagtggagaagcttctacagtaactatcgaaaaatcgaaaggagtacagttttctttcgttaattcatccaacgctcttgaaggtacatatgttttccctagaaataatggctcagccaatcaggttttagtgactaatggtcagggaggtaccgctaccttatcatggaaagacgcttcttcaattaatcaaaaaatcagaacattaaatacaggaactgtaactgcggatgattatacaattcttgttaccgggaatgtatcacttcctgtggctgctgcaaccaatcaaggaaagatttataacttagtaaatgatacggccgggaatgtcactattaacgggactttcagaattaatggcggtaattttacaacttataatttgaataatagtgattgggggagagcgattgtagtacaaagtaccggctcagcttgggttgtgatttcacgatattaagttttggtttaaagcagatatacaaaaagtcatttttgcaggggatgactttttgttaataaatcttaccaataaaataatacaagggtgtcaaatttttacagataaagaccaatttaaatattaaactcgatgaaagtatgttgcgttttgataaaaaaaacaaataaaaaatcaaaaaatgcttgttttcaataaattatatgtatatttgtaaaataataaggctcctgccgacgcttcttctgaaacttttgagtttttactctttcttctcagtcttcgctttttcagccgctaatttttgtgctcaatatcagatgcagtactttaacctgaatattttcaaggctctaaaaaataccaacatcatttcttgcgctcaaaaaggtttattaatgttttgataaataatatatcaatgcagtaatggcaaccgcctaataaaagtttataaatacaataattttttaatacattacaatgcaacaaggaacagtaaaattctttaacgatgccaaaggatttggttttattacaccttcaaatggtggtcaagatgttttcgtacatacttcaggtttagtagataatatccgcgaaaacgatgtggtaacattcgatttacaaaacggtacaaaaggcgttaacgctgttaacgtacgcgtagcataatttaaaggaaggttaaaactttcctttatttaaaaacggcagataacattaatgttatctgccgtttttttgcttcaataatgtgaaaattaaaagctttaaaggtagtatgatatttaaaatttttgcaatatgctccttgtagtaactatgtgatatttgcttggtaatgaagggtttggtatactgttgtaaaatattaaacaaaaataatattgaatttaaaataaatgccccgaagatagtcgaggctctaaatgttttcacaacggaataatccttattgtgaattgctttcggatacaaatgtagaaattaattatttaatcagtttacggatttccgtatttatatgaatttttttctgtttaattttaggaatttcaaataaactatttagctatggcgaaaaatatacttggattagacttgggaaccaattcgattgggtgggcgttgatagaaatagaccacgaaaataaaattgtgaaaataaaagggctaggctcacgaattctaacaatggatgctgctgaaattgcaaaatttgaaagtggtgccaaaatagaaagtggagcagctaaaagaaccacactacgttctccaagaaaactcaatgaaagatatttattgagaagagatagacttcattgtgtcttaaatttattgaattctctcccgcaacactataaactctccattgaatttgaaaatgaaaaaggtaaacgtagcggaaagtttaaaaaaggtgctgaagagaaattagcgtattataaagatgataacagaaagtttcaattcctttttaaagatgcttattatcagatggaaaatgattttaagaaaaaatatcctgaaatgttttatcaaagaaaaaatggcaacgaaactaaaattccttatgattggacgttatattatttaaggcacaaagcagtaacagataaagattttgaacttaccaaagagcaattggcttggattactttaagctttaaccaaaaaagaggttatgaaaaagtaattggacaggatgaaaaaatgcaaaaagaaggagaattaactgataattttgttggaaaggtacaaagtattacaaagattgagaatgaagaagcttacctaattgttttagttgataacaataatgaagcgattgaactttttaaatataaagaagaaacgaaaattccgattacagaaatcggagacttaaaagaggttgaaattgtctccaaatatgatgacgaaggcacaattgattcaaagaaaacagaatacattattaatgaagttcgcgaatttctaataacggatgttagaaacactggacgaaaaataaaagaaaatttcatttttgaagtagaactggaaacaggctggataaaagagcaacagagtaaatttactccaaaatggaaggacactaatcgagatttcatcattaaaactaaatatgatgaaaacggaattagaataccaaaaggtgcagataagggtagaaatattaatattccaaaagaagaggattggactttaatgaaattaaaaacagagacttctttaacttctttcaatacaaaaaataatacaaaaggagttgcttcttttgtatattataatcttctacaaaatccaaaacaaaagataaaagctgatttaataactgtaatagaaagagattattatcgtgaggagttggatgtaatctataaaaaccaagaaaaatttcatcccgaattaaaaaatagagatttgtatgagcaggcaattcagcttttatatcctaacaatcctaaccatcaaaagacaatcaaagaattagattttaatcatttgataaaagaagatattcttttgtatcagagggatttgaaatcaaaaaaatccttgatagctaattgtatttacgaaaaggaaaactttgagcggacagacgaaaaaacgggtaaaaaatataaaaatccattaaaagctattcataaagctaatccgctttatcaggaattcaggttatggcaatttattaaaaggctgaaaataattaagaaagaggaggttattaatgaagaaattaaaattaatcttgatattacttctcaattattgactaacgaattaaaagaagaattatatgcctttttgaatgagagagaaagtgttacagaaaaagacattctcggatttctaaataaaaagtacaaggatttagatataaatactgaaaattacaaatggaatttcgcatctgaaaaagaaccttgcaatccaacgagatacaattttattttaagaacaaaacgaattaaaggtttcgattacagaacgtttttaacgcctgaaaacgaatacagcctttggcatttcttttattctgtaaagaaaaaagatgaatttactaaaggcttaactaatatcatcagtcgattattagacaaatcgggcttgtcaaaagagtttcacgaagatttggtaaagaattttagctctttcggagggtatactaatgattacggtacctattccgaaaaggcaatcaagaaaatgttgccatttttaagacttggaaaatattggaattcaaaagatattgagaacattctttcaaaaacaaatcacgaagtaaagcaaaaagttctagataaagaagaaatcaatggagagataaaagactttcaaggtctctgggtttcgagtgcgtgttatctggtttatggtcgctattctgaagttggagaggtgcagttttggcaatcgccctacgatattgaaaattacttaaaaaatgaattcaaacaacattcattgaataacccaacagttgaaaagatattggttgaaaccttgcacgttgttaaagatatttggaaatattacggtgaggaaataggaaaagatgaagaagagaaaattatttataataagctattcgatagaattcatatagaattaggtcgggagatgaaaaaaaataataaacaaaaagaaagggacgataaacaaaacaaagaaaatagaaaagctaatgaacgaattgtggaacttttgcgtgagttaaaacaaaacaattcttcattacaagaaaaatcgccatttcaacaagaaaaacttagaatattagaagaaagtcttctgtcgtctatcgaatatgataaagacaataccgaatatcagctttccaatggaaaaataactaaaaaggaaatcaaagaaataactacaaaagagctttctaaagtcagcagaagtgattttgaacgatataaactttggttggaccaacggtatcaatccccttattcagggagattcattaaattgtctgacttatttgaccgaaaaaaatatgagattgaacatatttttccacaggaacgtatcacactaaatgcgctttacaataaagtaatatgtgaaacggaaatcaataaagaaaaaaaagcttctacaggttatggatttatatctaatgcaaaatctaaaaaagttttttgttctgcacacgattcagagattgaaataattggaataaaagattacgaagatttggtcaataataatttctcaggtagaaaaagagaaatattattaagtaaggaaataccggaagaatttacaaatagccaattaaacaacagtcaatatatctctaaaatggcgatgaaactgttgagcaatattgttcgtgaaaaaggtgaagatacattccgttcaaaaaatgttttggctacaaacggaacaattactacaaccttaaaaagacattggcaactgaatgatgcttggaatgaaattatttctccgagatttaaacgattgaataaattaactaatactaatttattcggagattacagagaaattaatggacataaagtctttatcaatactgttcccgaggaaacgaataaaaatttcgattctaaaagaatagaccatcgtcatcacgctttggatgcattaataattgctttgactacggaaaatcacgttaactacctaaacaatatttcatcacaagaaagtagcgaagagaaattaaatacaagaaaaggaattaaatttcaattgacgaattcaagaagaggttttaatgatgaaaaagaatggtatttcctgccacctgcacagataaaaacaaaagatggtattgatgaatttgaatatcagtttaaagatattaaaagcaaagtattcaaagatattgctcaaaatgcgctagaaaacacaatagcaagtttcaaacaaaagaatcgtgttattcgtcagcgttggaataaatatttgaaatctgaagatggaaaacttaatattatcaagcaagatggtttaaaagaagttgtaaattataatgtaaggaagaggctccacgaagatacattttacggtaaagtcaagttacaagataagattactacaattggtttggaaaaagcattaattgaaaaatatgatttggtcgatgatgaattgataaaagagatagaaggtttaaaaaatattgatggtaaatctctaaaagaaatcataggattattgaagagtaaacatcccaaggtttctgtttatgagaagtttgtggcaacaagatttgggaataatttagaaacttttgcttctgtgccgtcagataaaattattaaagccattcattcaattacagatacaggaatacagaagattttagaaaaccatcttaataattacaaagaagttgttgatggtaaaacaaaatttgatgttgaaaatgcattctcttccgatggtgttaaagaattaaacaaaaacattgtagagttaaataatggtaaggttcattgtcctatttataaagtaagaacaagtgatgcaatgggaacaaagttttctgtatcggaagaaggacaaaaaagtacaaaatttgttgtcacagccgctggaagtaactctttttgtggtttttaccagaaaaatacagaacggaaattttatatccctactttacgagaatctgttgaaagtttaaaacaaggatttgagccttgtcccgcaacacatcctgaagattcagagttcaaattgatttttgttcttaacccaagtgatttagtttatgttccgacagatgaagaaaaagaaaaccctaagttaattgattttaataatttaaagaaagagcaatttagcagaatctataaatttacagatgggagtggaacaactatgaattttgtacctgcaaatattgcaagtttgcttttcaatatgtcaaataaggagcaagaaaaaactgaaattaaattatctattcaaaatgagctaggtctgggtagtccacagtctaaaaatcaaaacacagttgatgggattcaagtaaaatcagtttgtttgaagttgaaagtgaataggttaggaaatatctcaaaagcataagcatatgataacccgctccatctacatcggcaatcccgcctatctcaagctcaaagacgagcagatgtacattatggaaccttcttccaacgagatgaaaggcaaagttccggtggaagatttgggattgctgatgctggaccattttcagattactatttcgcatcagctcattcagaaaatgatggggaagaatgtggtggtcgttagttgcgatacacatcatttgccacacggaattatgctgccgcttcacggtcacaccgaacattccgaccggataaaagaccaattagaagccagcgaacctctcaaaaaacaactctggaaacaaaccatcgaatgtaaaattgaaaaccaaaaagaggttttgagaagattgggcaactattacgaaccaatgattgactatcaaaataacgtcaaaagtggtgatattaccaatatggaaggcatcgcagcgcaacattactggaagtatctcattagtttggattttctcagacagcgttttggagattcgcctaatcaatttttcaactttggatattcagtactcagaagtattgttgcaagggcgattgtagaaacgggtttgttgcctgttctgggaattttccataaaaataagtacaatccttactgtcttgccgatgatttgatggaaccttaccgcccattcgtcgatttgttggtaatggattggctgaccaaaaatcctgaatccgaagaactgactaaagaatttaaagcccacatcctgcaaatagcaactaaagatgtgatgatagatgataagacaagaccattgttggtagcggtaaaaacgactgcaacttcgctttataaatgttatacaggagagaagcgactcatctcatatcctgaattgaaatgaatgattggtcattgtactttttacagcgtacataatataataaaaaatgaatgccgaaaggttaaacgcttatcgaattatgtgggttttagtattatacgacttaccgacagaaaccaaagccaatatgaaagatgccaatcgctttcgtaaggctctgctggatgatggctttaccttgtttcagttttcgatgtacgttcgccattgccctagtcgtgaaaatgccgaggtacatatcaaaagagtgaaatttatgcttccaaaagcaggtaaagtggcgataatgtgcattaccgataaacaattcggcgatattgagattttctttgccaggaacaaagaagaaccaccaccgaccttccaacagcttgaattattctaaattttaaatcctaaataaatacaaaatccactgaatttcagtggattaatttttgaggttgtataatatctcaaagatacttaaaattgaaagcaattcacaacaggcagaggatgaggaggatactgatgagggttgtataatatctcaaagatacttaaaattgaaagcaattcacaactatggcatccgatgcaaaagtaatcactttgttgtataatatctcaaagatacttaaaattgaaagcaattcacaaccagaattacattttcaatcatcaaagtttgttgtataatatctcaaagatacttaaaattgaaagcaattcacaacagattacatgaggcagttaccatcccggtagttgtataatatctcaaagatacttaaaattgaaagcaattcacaactttggattgtactacttaaattaataattagttgtataatatctcaaagatacttaaaattgaaagcaattcacaactaatccccctctttatcattatactgataggttgtataatatctcaaagatacttaaaattgaaagcaattcacaacttaaaagcggggtttcccccgccctggttggttgtataatatctcaaagatacttaaaattgaaagcaattcacaactagtgttctttaagccacttttgaaaatcggttgtataatatcttttttttaatatctcaaagatacttaaaattgaaagcaattcacaactaattttgtccgtataattattccgtaagagttgtgtaatatctcaaagatacttaaaattgaaagcaattcacaactaaattccgcattccctgttttctcgtcaagttgtataatatctcaaagatacttaaaattgaaagcaattcacaacagggtttcgccaatctgattaaaatgattagttgtgtaatatctcaaagatacttaaaaatgaaagcaattcacaacttacaccaatttgccatgattacaagaattgttgtgttatatctcaaagatacttaaaaatgaaagcaattcacaacgatgtgaatgttttatccttatatttttcttttacaaatgctattacatcttcatagctgaaatcccaacctttattgtggactatgtttttgatgagtttgccgctttcctcaaattggtatttttcgtctaaagcaatttgagtagccttagataatagtcctttatcttgaatatatccgtttttcccgcatatatataaaatttttatacgttctattcttagtaaatactctttagttccttcaatttcaattactttcaatcatctcattttctgtttatttcctgtatttataaacatttcttatttcccctttttacaatatctggatttttcgtaattttcattccgttcttataatcctcaaattcaaagtttcaaatttattattaatgccgggtcttttcatttttttagtttttagccgttgttttgtttgttttttcaaaacgttttcgttgctgggcattgcagtaacttgctaaacttattataaaggcaaaaaagaataaagtttttcatacagctgtaaattgattacccaaacagattatcccaaaatccttttttctttctagatgttttatcatcgcctttttcccagtcttctgcaaggaaaggacttttgtctccttggttctctgctgttggttcttggcttttaggcgtataaggtctccctgttcttttgcagtaggcttcgtattctttttcttcgtaggcttgccattctgattttgtgtaatttttgcctttgagttttataaactgcagtaaaatcttctattattggttctggcacattgtcccccggctcttcttttacccaatatttttttcttgttaacatttttccagtgtcaccatctaaaactatttcgaaatattgattaaaagaatctcctctccatgttattctccatagttttctacctgctttttgtgtagaatctttttctgacgattggggataaattaaaggagaccatcggttaattgaatttccactatgatttgcatttcctaataacattgggattttctgttcttccataaatttttctacatcttcccaagaaaaaccaaatagcttatcattatctatggtatgtgtcagttttccattttcatcaaaataataccaagttcctttatagacattacctttgacgatttttaaccccttttctttgatattgccattaggataaaaagttttttgtatcatgaaaggggaattattgtaatatataatttccaaaggatcatattctccgggttttattataaattttttattttcccccattatctcaaaaaaacttctatagatagacctgttctcatctaattttccttcatagtaatatcccttttcttttgcctcagaatcctgcaaagcagcagcttgtgaaggtatctttaaggtttcttctcttgttcttttgaaatcaaatgtttcaaaattggaatttatattaggtatatagtacatttctttagattttctgattagtgtatctgactttttattaggctcttgccctttacaaccaaatgctataaatgacaaaaatatgatgaacattgtttttttcataataattctatttacccaaacaaattatcccaaaatccttttttcctgggtgttttatcatcgcctttttcccagtcttctgcaaggaaaggacttttgtctccttggttctctgctgttggttcttggcttttaggcgtataaggtctccctgttcttttgcagtaagcttcgtattctttttcttcgtaggcttgccattctgcttgggtgtaggctttgccttcgtgggttttgtagatttgtgcagattctattagttttggaaatttttcttcaaaattgggtataatttctttataatctaataaacgtttatctgtagttttaatttgttctcctgtatcgccatctaaatagtagtatttgcctttttgataagaataacttatagtttctcctttttcatatttatatccaggaggcggaggaccatcttgaggttcaccaatttttacaaaaattttccaaagttttttagttgatttatcggaatagtaatattgaacctcaaacttatctctgccttctccggtattgagattaatatcttttttactgtccagaaattttaagacttcgttatagctgaattttccgaacttcttatcctcatctacttcttttattaattttcctttttcgtcaaaatagtaccaatgtccaatttcaattcttccaaacgaacccaagcgtacatcaccaaaatattttcccttttccttgattgtgttaggttgattaggttgttcataaaattctttatatgaccagtaaaaataaggaaacggaggaatctcataaatatccgtccaagatgccattacttctctacctctaccaaatacataaatatccgatgaacggttagggtctttatattttccattttctatttcaaattttccgtaatcaaatgtttcaaacataatcttatctttttttaattcttctgttattatacctgttctgcaattttgcaaaaggctaaatattattattactaaaaatctattccacataactttaatttatattggggtttacaattttccattgccaataccaactacttattctgctgattgttgtatgaggttgtatcgttaccttatcaatctaaaatatctgtaaaaaaaagaaaaataacttggcagaggaggaactacgtagtagctgtaataatcaactccctcatcagggttaaaaactcctccattttttagcttataaaagccatttgcaccataactattataagaatcttctgcatattcgtatcccacataatctgtcttatctaactcaaaattaaatttttcaaacataatagaatcttttatagggttagtattggtcgcatagctcttttgtctttggactgtgcaactccaatacccaattattataaaagcaattattataaaatgtttcatagtaattctatttacccaaacagattatcccaaaatccttttttcctgggtgttttatcatcgcctttttcccagtcttctgcaaggaaaggacttttgtctccttggttctctgctgttggttcttggcttttaggcgtataaggtctccctgttcttttgcagtaggcttcatattcctcttcttcataggcttgccattctgattgggtatagtctttgccttcgtgggttttatacactgctgttgattctattaaccaagggaattgttgctcaaagtctggtattatttctctataatttaataattgtttttctttaattgtctcacctgtgtttccatctaaagcataccatttacctttttgctctacacgatagccttctcctggtatttgatatgcttcacctatactaattacaatataccataatttttttgttgatttatcagaataataatacttcacttctatcttatctcttccttctcctgtattaagattaatatatttttgtgtttctaaaaattttaatacctcattgtagctgaattttccaaactttttatcttcatctacttgctgtaataattttcctttttcatcaaaatagtaccaatttcctattttattagaaaatcgataaaatttacaatctccaaaatattttcctttacttttaatattcccattactataaaactctttatatgttgtaaaaaatgagttcggtggtaaaattgaaatatcttccggtttcataatagtcactattcctttgtctctaaatatatattggtcagaatattcatcttttctgaatttgttattttcattttcaaatttttcaaaatcaaaagtttcaaacatagcatttaatttataatattgtttttgttttgtttgtgcattacaactattaaatagtagtatggcgataatatttattaaaagtgttttcatatttaggtaatatttgagtttacttttttccactgccaataccaagttgaaactctatctaattttgtacttggcagaccggtaactttatcaattgttaaatgtgaataatccattacattatcagtttttagagctttatagatataatcagtaccataaaaagaatgtggaagtcctaagccgtggagacattcgtggccaatagttgaatcgtcgtgattgccaaacataattccaaaatccgtgtttctgttagaataacctaatgtacttgcttctgaatatcctccatcaggaagattagttttcacataatcattcaaattatctaaaaaaaataatttaaaatgattggtaaattgattaggatacttcctttcaagttcagcttttaaataattttgtagatttatagtattaccatcttcatttacaagattttttcctgtaactccaaattctgtgttaaaatcaatagaattataattgtccgcagattttcgcacatctaaaacaatatcctctaacgaaccttttgaattcgttactttttctacaatatttggaacaatcaatgcttgttttacatttctattaaattcccttattccagaatatcttccatttccagcacttgtacgtactcttacaattactatatttttttgtaattgttttgttggtgcgataatcctaagaaccccagcagattgtctgcttttctcattacctttttcatccagcataatggatacgacattaatatctttatctgcattaaaagttgcattacaagttagtgttatttcaattttcttttttaaatctccttttggaattgtatgtttatcaacacgaatgatgggatgagaattatttgcaattgccccatctacttcaaaaataacctggtctggttttatttctttgccatctattttctgaaattctaaatataattcaagttctgcttctcctttttctataaattttctagagtttgacgggtccggagttcttggaaacaaagtaataaaaggtctataatatctttttcttactggatttccagaagaatcgttttctaaggaatacagataattaccatataaattttttaaagtttctaatttattgtatgctgaaaaagcggttggctgtgggtctaattggaaaaatgttgtccacaaattgacattattattcctggttgttgtgggctcggaaattgcttttgtgtaatattgaccaattaacgtatcgtactttgtatctccatcaagaccagtgtccccaattctaaaccaatcgaagccaaattcgcctttccaattacttttgggtctaaactgtacgatgcaggtagcatcaagtaaaatatctgtcggagtaaatgtctctgcaatattggtgtgattagtcccttcctgtccttttgcatttactgtccctttggaatttactgttacaatttcttctgagtgcatcaaaagtttttgagttcctgctacattggtttccttcgcttcaatcttgatttccccttctccgtttatcaaagttttgggactttggagatggtagttatcggaaacaaaatatttcagaatgggtgtgttcatcatcatttgca

SEQ ID NO: 2616 - DNA, 19684 bp, synthetic construct
  misc_feature 1..19684: note = Synthetic
  source 1..19684: mol_type = other DNA
ttgcgagctattccttgtatatgttgcatcactaaaaataatgaatttatctttttcttacaaatattttactatatttggtactaggattgtggaggttttttcacagtctgacgttatcaacgatgagtttgatttaactgtaaacttacagttctaatactaagaaaagaagaattgctatgaaaaataaacctcgaagaaattcgaggtttttttatgctaaaaaaataactaatctttgcagtaaataaaatgaaaatgcaaaaggttctaatcatcgacaactacgacagttttacattcaatctcgttcattatcttgaagatttgaatgcagcagttacggtttttagaaacgatgagtttgagttgcaagaaattgaagcttttgataaaatcatcctttcgcctggaccaggaattcccgatgaagctggattgctaaaagaagtaattaaaacctttgcaccaaccaaaagtattcttggcgtttgtctaggtcatcaagccattgcagaagtctttaattccgaattaataaatttaaaatcaacacttcacggaatttcatctaaagtaactattttagataaaaccgaaacattatttaccggtttacccaatgaaattgaagttggtcattaccattcttgggtggttaatcctgaaactatttcagaggaaatagtagtaacttctgctgatagcgataacagaattatgtcgcttcgccatgttgaatttgacgtaaaaggaattcagtttcatcccgaaagtattttgacaccatttggtaaaaccatactcaaaaactggcttaataaagactagttcatatccatttagccacactataggttaacaaagttatgttataatttggaaataaaaatttaatctattactttaataaatagtgtttaatttactgataattaaatttttaaataatctatatagattttatctatatcccattatttaacccaaacatcatcttttctttactttactcccaattttagagcttagtttcgctactgcataacaacttattaacaatatatacatcaatacattttatttaactatatttgattgatttatagcaaattaccaattaaactcgcacattatggggattttcaacaatcatgaaagaaaagttattgaagcgctttgcaagaaaagcgaagacattagtaacgatatcagtaaagagatacacgaatttctcgatgatttaaaagaagagtacgaacaaaacaaagttgttatttcggagttcaactcgtttgttaacgaattatcccaaaagctttcgcccgaagatatcgaaaaactaaaccacttctctacccgattgtacaaagtaaaacgttgcgccaaaaaaggcgttgaagccatgcgagaattagctcgtgatcaaagaaaagcaactcaagaaactattagagaataccaagaatacttacacacttaatttatcgagtgaaaaccagtttgtttccgctacttaaactttcatcaaaagcataaccttcatagttaaatgcttttaaatcatctatggtttcagcattggtatcaataatgtaacgaaccattaaacctctagctttcttggcaaaaaaactaatcattttgagttttccatctttgtagtctttgaattcgggtgtaataactggaactttcaaagctttagcatcaacagcgctaaaatattctgtacttgctaaattgataaacaattcatctttttgcaattctgaattcaactgtttggtaattgtctttttccaaaactcatataagtttttgtttctaccaattggtaaagaagtccccatttctaagcgatatggctgcattaaatcaagtggttgcaataatccatacaatcctgataaaatcaaaagtttgttctgtaaaacgtctaatttgtcttcggacaaagtgtaaacatccaaaccttgatatacatcaccatcaaaaacataaactgccggacgtgcattttctgtagtaaaaggtgtttgccaatcttgattgcgttgccaattgagttcagccaatttatctgaaatatccattaacgccatcaattgttttggctttttcttcttcaatgttttttgaatggtcgtggcttcttttagaaacttaggttcagaaaaacgatttgttggaagttctttctcaaaatttagcgatttggctggcgatataacgattttcattgtcaaaatttaagttgtccaaaaatacatatttcctatcaaaaatagtttaacaaaggtaaggtttgtatttatagctttattgaaataattgatattaaacctgtattcaatctttaaaactcgtaaattagtgctttaaaaaaccttatcattatgaaaaaaacaattgtagcaatgttattatttgggttgtttttattctcaagttgttgtactcaaaaaaaggctgacgataaaaaggcatcaacttcattctttgatactacatgggaattagaatatttatcaggaactcgtattgcttttgaaggattgtatccagaggttaaaccaacactaattttgaacgaaaaggaaatgacttatggcggaaactctagttgtaatgcttacacaggaagttttacgtttaacaataatatcttccaatttggtgaaaccactcgaacgatgcgatactgcgatggcggtggcgaagaagctttttttggtatgctaaaaaaagtaagcaaacctgttattgatagcgatggaaaacttcttttactaatggatgatgttccgatgatgcgatttaaaaaggtagcaaagaaataatgttttagttattgcttcaagaaaaacaactcaggattagtcactttactttcgtctaaaacaccatttttatcataagctttccaaggcgaattggcaaaaaagtagagcttgtcttttactaaagttaataatgctggttcgtcaaactctggtcggttgttgtctactattttaaaatcggtgatttcggtatgagaagaattgagtttcaattgtgtaattctgataggtgaaacgccattttgaacggcaaacaaactgtttttggcatagaccaaaccgtcaattccttttggtgttgcgtctttggggaaattcaaccaacttacttctttattggctgttttgatagcggcaatacctttaagataatcggcaataaacagcatgtcttcttccctattcattgtaatgccttgcagattgaaagcggtattttctaatgacaaccaaacggctagttcatcatttttgatggtgtaaataatgggtttatcactatcggaaataaaaactttgttgtttttggttacataaatatcgccaaaaacgtgatttccttccagagaatatcgcttgatgattttctttgtttttatgttgacctttaaaatttcggctttgccttttagtgtttcgctgtagttttccatttcgggaactgcacatgtagccacccaaaggaattcttctttggcatcgggttttagggcaaaaacagctaagatgttttcggttgtcaaccaatcggtacaatttcctgttttttcgtcaaatgaaactatttttctttttcgtatgctggaagccaaccatgttttggcttttgacaaatacaaaacactttcgggatgcaatgctttttcggacaacgtaattactttttgggaagtcgctacaacgtctaactgtttttgtttgaatgctgataaggatttgaatgcttcggtttcttttatgctttgaaaatcggtatcgtcttcaaaagccgtttttgcattcattagaattgctttttttagctgcaaaactgcattatcagtttgctgatttaaagcataagctattgctagattataggtaaacgttggatgcattgggcgaatgctatccaattgtttggttagttgtagaaactccgaatagttttttgcttcataggctttgatgctgttgttgtataaatctcgttgggattgcgcatttgacaaaaacgaaaacatcactaaaaggaatactatatttttcatacttcgggattttagtatcagacggaaaaagcttttttttattacatatttctcttaaaaaatattttatcgcttagcattttgcttgctaaattatgattttaccgcaataaaaataggtttgtggcaatactgtggcaatcataccgcaagtatatggcactttaaccgcactctagagcttttgaaaatgagaaaaaacggtattcaaataaaaggcaatttttattgttcgttaaaaaataattaagcataaaaaaagcgacagtattagtgccgctttaaatgttttagctcatgcttttttattgttttttttggaattcgtgaaacatttaaagggaaaataaaaaaagcgacagtattagtgccgctttaaatgttttcacaacggaataatccttattgtgaattgcttcaaaattgtactgcaattatacggaattatttttatggttgtattacggttttccgtaaaatgcttaatttattttttattatttttataaattaaattttaagcgatgaagaaaatattaggacttgatctcggaaccaactcaataggttgggcattaatagaaatcgatcatgaaaatagaatagtgagaatattaggattaggttctcgtattttaacaatggatgctgctgaaatagcgaagtttgaaagtggtgctaagaccgaaagtggagcagctaaaagaactactcttcgttctccaagaaaacttaatgaaagatatttgttgaggagagatagacttcattgtgttttaaatttattaaatgctcttcctgaacattacaaattatcgattgaatttgaaaatgcaaaaggaaaacgtagtgggaaatttaataaaggtactgaacagaaattagcttattacaaagatgacaatggaaagtttcaatttctatttaaagatgcttatcatcaaatggaaaatgattttaggaaaaaatatcctgaaatgttctatcaaaaaaaaaatggaaatcaaaccaaaattccttacgattggactttgtattatttaagacacaaagcagttactgacaaagattttgaacttacaaaagaacaattggcttggattactttaagttttaatcaaaaaagaggttatgaaaaagtaatcggacaggatgaaaaagtgcaaaaagaaggagagttgaccgattcgtttgttggtaaagtacaaagcattaataaaattgaaaatgaagatgcttatgaaattattttggtagataacaataatgatgcaattgagctttttagatacaaggaagaaacaaaaattccaattacagaaattggagatttaaaagaagttgaaattgtatcaaagtatgatgatgaaggtacaattgattctaaaaaaacagaatatataattaatgaagttcgtgagttcttaattacagatgttagaaatacgggaagaaaaataaaagaaaactttgtttttgaaattgaattggaaacaggttggattaaagagcaacaaagcaagtttacaccaaaatggaaagatacaaagcgagatttcatcattaaaacaaaatatgatgaaagtggcaatagaatattgaaaggtgcggataaaggtagaaatatcaatattccaaaggaagaagattggactttaatgaaactaaaaacagaaacttcattaacttctttcaacacaaaaaacaaaaccaaaggcattgcttcttttgtctattataatcttttacaaaacccaaaacaaaaaattaaagctgatttaattactgttattgaaagagattactatagggaagagttggatattatttataaaaatcaggaacaatttcatcctgaattaaagaaccgaagtctctacgaacaagctattcagcttttgtacccaaacaataatagtcatcagaatacaattaaggaattagattttaatcacttgattaaggaagacattttattgtatcaaagagatttgaagtctaaaaaatctttgattgcagattgtgtttacgagaaagagaactatgaacgtacagatgaaaaaactggaaagaaatataaaaatccattaaaagcaatacataaagccaatccgttgtatcaagagtttaggctttggcagtttatcaaaagacttaaaattatcaagaaagaagatggttcaggagagttaaatattgatgtaacttctcaattactaacaaacaatattaaagaagagttatacaattttttgaatgacaaagaaaatgttacagaaaaaaacatactagattttctaaacataaaacacaaagaattagaaattaattctggaaactacaaatggaattttgcctctgaaaaagaaccttgcaacccaacgagatataactttatactaaggacaaaacgaattaaaggtttcgattacagagcattcttaacacccgaaaatgaatacagtctttggcatttcttttattctgtaaagaaaaaagatgaatttactaaaggcttaagtaacatttttagtcgtttattagataagtcaggcttgtcaaaagaatttcacgccgatttagtaagaaactttagttctttcggaggatacaccaatgattatggcacttattccgaaaaagcaatcaaaaagatgttgccgtttttaagacttggaaaatattggaatgaaaaagatgttgaagccattttatcaaaagcaaatcaagaagtaaagcaaaaggttttagataaagaagaaattaatggagagttgaaagattttcaaggtctttgggtttcgagtgcttgttatttggtgtatggtcgctattccgaagttggagaagtgcagttttggcagtcgccttacgacattgagaattatttaaaaaatgaattcagacaacattctttaaacaatccaactgtagaaaagattttagtagaaacactacacgttgttaaagatatttggaaatattatggtgaagaaatcggaactgatgaagaaggacgagttatttacaacaaattatttgacagaattcatatagaattaggtcgggaaatgaagaagaacaacaaacaaaaagaaaaagacgataagaataacaaagaaaacaggaaagccaatgagcgaattgttgaactgctacgagagttgaaaaaatcaaacagttcactacaagaaaaatcgcctttccaacaagaaaaattaaggatattagaagaagggcttttatcttccatcgagtacgataaagatactacggaatataaattatctaatggtaaaatcacaaaaaaagaaatcaaagatatcacgtcaaaagaactttctaaaattagtagaagtgatttcgaacgatacaaactttggctcgaccagagatatcaatcgccttacactggaaagtttatcaaattatctgatctgtttgaccgaaaaaaatatgagatcgaacacgtatttccacaagaacgcatcacgctaaatgctctttacaacaaagtcatttgtgaaacggaaatcaatggagcgaaaaaagcgtttaccggttatgcttttattgcaaacgcaaaatccaaaagtgttttttgttctgctcacgatgcccaagtagaaatactgagtattgacagttatgaagaattagtaaaaagcaattttacaggtagaaaaagagatattctattaagcaaagaaataccggaagaatttactaatagccaattaaacaacagccaatacatctctaaaatggctatgaagctgttgagcaatattgttagagaagagaacgatgatgataattatcgctcaaaaaatgttttggcaacaaacggcacaattacatcgacattaaaaagacattggcaattaaatgatgcttggaatgaaattatttctccaagatttaaacgactgaatgaattaaccaactcaaatttgtttggagattacagagaaataaatggacaccaagttttcatcaacactgttccagaagaagccaacaaaaattttgatccgaaaagaatagaccatcgtcatcacgctttagatgcattgataattgcactaacaacagaaaatcacgttcaatatctaaataacatttcatcacaagaagaaaatgatgaagaaaagttaaagacaagaaaaggaataaaatttcaactaacaaactcacgcaaaggttttaatgatgaaaaagaatggtactttttaccacctgcacaaataaaaaataaagacggaattgatgtgtttgaatatcaatttggcgagacgaaaagtaaagtatttaaggacatagctcaaaaagcactcgaaaataccattgcaagttttaaacaaaaaaatcgtgttattcgtcaaagatggaataagtatttaaaaccaatagacggtaagataaaaatcgaaacacaagaaggattgaaagaagttgtcaattataatgtgagaaagcgacttcacgaagatactttttatggaaaagtgaaattgcaaaataggattattacaattagtcttgaaaaggcactaattgaaaaatttgatttagttgatgctgccataactaaagaaatagaaaatttaatacaaaatgaaggtacatcaacacaaaaaatcattgaagcattaaaaataaaatatcctaaagtaaatgtttacgaaaaatatgtagcaactcgttttggaaatgaattagaatcttttgcatcaataccttcggataaaataatcaaagcaattcaatctattacagatacagggatacaaaggattttggaaaaccatttggataaatacaaggaagttattgacggaaagacaaaatttgatactgaaaatgcattctcatcagatggtattaaagaactaaacaaaaacattaccgagttaaataatggtaagtttcatcatcccatttacaaagtaagaacaagcgatgcaatgggaactaagttttctgtttcagaagaagggcaaaaaagcacaaaatatgttgttacagcagcaggaagcaatgcattctgtggtttttaccaaaacggaaaagatagaaaatattacattccaactttaagagaaactgttgaaagtttaaaacaaggtttagaaccttgttctgctacacatcctgaaaactctgaatacaaattaatttttgtactcaacccaagtgatttggtatatgtaccaacagaagaagaaatagaaaatccgaatttggttgatttttcaaaaatgaaaaaagagcaaatgaataggatttataaatttacggatggaagtggtagtacgatgaattttgtacctacaaatattgcaaatccaattattgatatcaaagcagaagaacataaaaaaattaaagacaatttattattctgggaagaatcaaatgaaacaaaaaaaggaattgtcaaaaaaacaaaaccgctttttaatgaagttggattaggatcggagaacaaaaccaaaagccaaaatacttttgatagagaacaaattaaatctatttgttggaaattgaaagtggatagattaggtaacatcttaaaagcgtaaaccaaaaaaatgataaaacgaacccttttcttcggtaatcctgcttatttgagtacaaaaaatgagcaattggtggtgagttatcctgataaagaacaggaaactaaaacagtgcctattgaagatattggggttatcgttttagaaaatcagcaaatcacaattactaatggattgcttgagaaattaaccaacaataatgtggcattaattaattgtgaccaataccacatgcccattgggttattgatgccgttgagtggacacacggaacagacggaacggtatagacatcagattgaagcttcgctcccattaaagaaaaacttgtggcaacaaacggttagtgcaaaaataaccaaccaagcagggttattgaaagaaaaaggcataccaatgcgaaaaatggaactttgggcaaaagaagtaacctcaggcgatacattaaaccacgaagcccgagcagcagtttactattgggaaaaactattcaacttagaaggttttacacgtggaaaaaagggtttgcctcctaataatttgttgaattatggttatgcaatccttagaggaattactgcccgagctattgttagcagtggtatgttgcccacacttggcattttccatcgcaataaatacaatgcctattgcctggcagatgatattatggaaccgtatcgaccgtatgttgatttgattgtatgtcatataatagaaacggaagatactattgaggaattaacggttaacatcaagaaggaattattgagtattgcatctattgatgttaaaattgatggaaaaagtagtccgctactagtagcaatgagtagaactacaaattcgctttttgaatgttttgaaggccgttcgaggaagattttgtatcctgttttttgagagcggaatttttacttctcgatacatcccgattgaaaaaaatcgggatactcgaagtgacgttgggaatgataaaagagattcctacggaatgacaagattgagggattgaatttaatatgtttataaaattatgtatgatgagaattatactcgattaaatcaatataggagtttgtggatattagtattttttgatttaccaaccgaaacccgaaaggatcgtaaaatagcaaccgcttttagaaagcgactattagacgatggcttcagcatgttccaattttcaatatacatgcgcttctgcgccagccgagaaaatgccgaagtacatacaaaacgaatcaaaaacagcctaccagaacatgggaaaataggagtaatgcaaatcaccgacaaacaatttggaatgatggaacttttttatggaaaaaaaccagtagaaacagacaaaccttcgcaacagctcgaattgttttaaaacaacagtaggattaaaaaaaccttctcacaaagaaaacctatcaataaccagaaacaaaatcctatttctaactccactcacaactcccaacatttcaattagttaaccactgatacgttgggaattataagtaaagatacaattttgaaagcaattcacaactagcaacaaggacaagcgaaattatttgatgttgggaattataagtaaagatacaattttgaaagcaattcacaacttaacataagcgattgtcataatttggcgtgttgggaattataagtaaagatacaattttgaaagcaattcacaactttaaaaccaacatatatattttcaaacaagttgggaattataagtaaagatacaattttgaaagcaattcacaactaatcgaatgcgctcggcttcgatttcatcgttgggaattataagtaaagatacaattttgaaagcaattcacaacaattcttacctataccaacacccgactcgcgttgggaattataagtaaagatacaattttgaaagcaattcacaacgcatcgtgtgaatcgcccactcctgacaagttgggaattataagtaaagatacaattttgaaagcaattcacaacttgctacttcatacctttcaataagtccttgttgggaattataagtaaagatacaattttgaaagcaattcacaactaattaaacaccaccaatggtatccgctttgttgggaattataagtaaagatacaattttgaaagcaattcacaacacaacttacctagtttatttgatgaaattagttgggaattataagtaaagatacaattttgaaagcaattcacaactccttgaatggtgttaaacactagcggtttgttgggaattataagtaaagatacaattttgaaagcaattcacaactagttgtactttgatagtattcgccatcacgttgggaattataagtaaagatacaattttgaaagcaattcacaaccagcgtcaagatctactctgttacctaaagttgggaattataagtaaagatacaattttgaaagcaattcacaactggcgcatgggaaggttttattttgagtatgttgggaattataagtaaagatacaattttgaaagcaattcacaacttattgagcaaagtgttgaaaccgaaaaaagttgggaattataagtaaagatacaattttgaaagcaattcacaacaacagcaatgctgatatcgcatgatcgcgagttgggaattataagtaaagatacaattttgaaagcaattcacaacatacgataagttagaacgttccggaaaacgttgggaattataagtaaagatacaattttgaaagcaattcacaacgctacagatagtcacagctttatttttaggttgggaattataagtaaagatacaattttgaaagcaattcacaacttatttgcgttttctccatcaatatctcttgttgggaattataagtaaagatacaattttgaaagcaattcacaacttctgcagcattcaatttttcgaatgcttgttgggaattataagtaaagatacaattttgaaagcaattcacaactagtgacgaattctcaaaaacattccatgcgttgggaattataagtaaagatacaattttgaaagcaattcacaactgtccagtcattgtgttgtcaaatgcttgagttgggaattataagtaaagatacaattttgaaagcaattcacaactacttatttgttattctcaattaccatcgtgttgggaattataagtaaagatacaattttgaaagcaattcacaacgtagcgtcttcgtgtgttccattatctccagttgggaattataagtaaagatacaattttgaaagcaattcacaacgttagcagtaatgactacacaccgcttaaagttgggaattataagtaaagatacaattttgaaagcaattcacaacttaacctcaatagaagtaaatttttttacggttgggaattataagtaaagatacaattttgaaagcaattcacaactacggagcatgttatcaaagcttatgccaagttgggaattataagtaaagatacaattttgaaagcaattcacaactgacctgtcattgtgttgtcaaatgcttgagttgggaattataagtaaagatacaattttgaaagcaattcacaacgcaatagcggtacaaaatggctttacggatgttgggaattataagtaaagatacaattttgaaagcaattcacaactggagaagttggatatatcgaaaaacataggttgggaattataagtaaagatacaattttgaaagcaattcacaactctaaatactcaggcatccattttgttaaagttgggaattataagtaaagatacaattttgaaagcaattcacaacgaaatcactgatggcttgtttgccttctttgttgggaattataagtaaagatacaattttgaaagcaattcacaactacccaacaaatgctgtttaatcaaccaaagttgggaattataagtaaagatacaattttgaaagcaattcacaactgatgacaaaaaaaagtgatagcagtttcagttgggaattataagtaaagatacaattttgaaagcaattcacaacagaaataccatcgctaatggtggtatgacggttgggaattataagtaaagatacaattttgaaagcaattcacaacaatgcaaagttttatcaaaattaagaagagttgggaattataagtaaagatacaattttgaaagcaattcacaaccatcaatggtggttttaattatgatattaagttgggaattataagtaaagatacaattttgaaagcaattcacaactgaattcatacaccttaattttggtgccaagttgggaattataagtaaagatacaattttgaaagcaatcatagaatacctagtaaaaataaaatccaatgaaattaagcaataacaaataataaacaaaaatactaattaaatatatacttttttaactacactttttccctattggcatacatcctatcaaaaacttttttctatatttgggttgtgaatacaacatcaaaaccaaaacacatcggcagaaacatcagccgcatccgtgaacttcgtgacatgaaacaagaagtattagctatcgcaatgggcgtgagccaacaaaccatttcaaacattgaaaacagcgagtctattgatgaagataagcttctactgatagatcaagcattaggcgttacctctgaggctattaaaaatttctcagaagaatctgtaatcaattattttaatactttttcagataatagtggtaataacatctttactaataattacactaatttcaatcctttggacaaatttattgagttatacgacgaaaaagaaaaacttttcgaacgcctattgcaagccgagaaagataaagtaacctacctagaaaaactattaaaccaaaaaagtgaataacttagtagaacaataataggatttatttaataatctgtatagttaatttaggtcgggtcaaaatcagagaaattaaacaaacgatggaagaattataacacaacttttaattataaaaaaaacagtgtatagtatttttaggattaagaattatatttgtataaccataataggatttatttagtaatctgtatagttattctaggacgggtcatcacatcttccaactcccaactgctgtatggcttaagtatagcttcgccctacttaatgtatgaagagtgtatgaaaaccagcaattttgtaaaatagcaacctattcagctaacccaagttcatttgacataaacaaaaaaactattttaagttttatccgatgacagtattatcactcttttaactaaaattccttaatcattattactatctttgccttgctaaaaaagttgaaatggaaaacataattaatagcgtacaaccgccaattggcaagccaaaatggttaaaagtaaaacttcctattggagaaaaatatactgaacttcgtggtttggtcgataaatataagctgaacacgatttgtacttcgggtagttgtccaaatatgggcgaatgttggggtgaaggaacagctacttttatgattttggggaatgtttgtacccgttcgtgtggcttttgtggtgtaaaaaccggaagaccagaaactgtagattgggatgaacccgaaaaagtagcccgttctatcaagctgatgaagattaaacacgccgttattactagtgttgaccgcgatgatttgaaagatatgggttcgattatttggttagaaaccgtggaagctattcgtagaatgaacccaacaacaactctagaaactcttatacctgattttcaaggcaatgaaaaaattattgaccgaattgtagaagccaatcccgaagttgtttctcataatatggaaaccgttcgtcgtttaacgcgtgaagttcgtattcaggcaaaatatgaccgaagcttggcggtattgaaatatttgaaagaaaaaggaattcgcagaaccaaatcgggaattatgcttggtcttggtgaaaaagaagaagaagttatccaaacgatgcaagatttacgcgataacgacgttgatatcgtaactattggtcaatacttacagccaagtaaaaaacacttacctgttaaagaattcattacgccagaacaatttgaaaaatacgaaaaaattgggaaagtaatgggtttccgtcacgtagaaagtggtgctttggttcgctcatcttatcatgctgaaaagcatattttataatttttgatggaaataacgcaggaacaatcggctataaaagcaacctattttagtttaataggaaatgctggtttggctttggtaaaaggtttagccggagttttcgggaattcttatgccttgattgctgacgcgattgaatcgactaccgatattttttcgtctttcttggtgttatttggtttaaaatattctaacaaacctgccgatgaaaatcatccgtatggtcatggaagagcagagccattgataacgtttatcgtggttggttttttgataacctcagcaaccataattgcttatgaaagcattgaaaacattagaacgccacacgaagcaccaaaatcttggacattaatcatactaacgattatcattctttggaaagagttttcgtttagaaaagtgatgaaacgcggtattgaaaccaatagttcctcactaaaagccgatgcttggcatcatcgtagcgatgctattacttcggttgcagcatttattggaatatcgatagcgttgatttttggcgatggttacgagtctgccgatgattgggctgcgctttttgcctcaggatttattctttacaacagttatttgatttttagaccagctttaggcgaaatcatggacgaacatctctatgatgatttgatattggaaattagagaagtttcacatcaagttgaaggcgtaattgataccgaaaaatgcttcatcagaaaagctggaatgaaatatcatgtggatttacatgcaacggttgatgctactatttctgtaaaagaaggtcacgatattgctcatttattgaaagacacattgcgtgccaaaattccacaattaggtcacgttttgatacatattgaacccaatgaattctaaaattactatttccataaacggtttcgggcgaattggacgaaatttatttcgattgctactaaatcatcctgatattgaagtggttgctatcaacgacattgccgacaatcgaacgatggcacatttaacgaagtatgatagtattcacggtgttttgccatatgatgtcacttttgatgaaaatcatattatcgttgatggaaaaaaatatgctttctttcacgaaaaagaaattagtaatttgcaatggaaaaacatcgattttgttgttgaaagtacggggaaatacaaaacatttgaagaaatcaacaaacacattattgctggtgcaaagcgagtaattctttccgctccaagcgaagttcccgaaattaaaaccgtagttcttggtgtaaatgaaaatatattagacggaacagaattaattgtttcaaatgcaagttgtactacgaataatgctgctccaatgatacaagttatcaacgaactttgtggcattgaacaagcttatataaccacggttcactcctacaccaccgatcaaagtttgcatgatcaaccccataaagatttacgccgtgctcgtggagcaagccaatctattgttccaaccacaactggagcagcaaaagctttgacaaaaatttttccagaaatggatggaaaaattggtggaagtggaattcgtgttcctgttcccgatggttcgctaaccgacatcacttgttatgtaaaaaaagaagttactatcgatgaaatcaatcatgcattcaaattagcttcagaaaacaaattaaagggaattcttgcttatactgaagatccaattgtttcggtagatattttaggcaacagaaattcctgtctttttgatgctcaattaacgtcagtcatcgataaaatggtcaaagttgtaggttggtatgataacgaaattggctactcttcacgaataattgatttaattgttttgttaaaaaaataatctttttatatttattgttttaaaatctaaaacaaattgaagaaagtcatcttattgcttcttttcacgaccatcgtttttggtcaaaaaaatgctatcaataaaattgacagtgtagcttattatataaaattggcagatttttataagcaaaaaaacaactataagctatcgctttctaatgctaataatgcattggagtttgcttcaaaaaacaaagatgctaaaaataaagcactggcttacacatcattaggaacaagttattttgaacttaaaaaaataaacgatgcgattgcagccttttcaaaaagcataaaagagctttctactttacctatttcctcagatcttgctttgagttattacaaactcggaatgtgtcatatgagtttagaagaatatgttcgtgcagaagcttacatcaataaatcgcaagaaatttatagtgctttgaaaattgaaaatcaagaactgattgatttacagaaaggaattatttacaaaacaaaaggcaaagtaaaattagccacagaactttttaacaacatcatttctaaacccgattcgcaagatagttttaaaacaaaagctgaagcattatatcaattaggaataattgaaagtaaaaataatcgatacaatcttgcacttaattatttgaatcgtgctttagaaaaaaacaaaatagatgttaatactgagcagcgaattaaaattttatatgcgctaagcaaagcaaatgacaaattgttaaatctaaaagattcctatcgttatctaaaagaacatgttacgcttagagatagtttatcaaaattgaacaatattcgtcttgatgcaaacgattattattccatcaaagaaaatgaacgaattgatttatttgcacaactaaataaagaaagcgaagcacagcaaaagacaaatcaattcatgaagttgattgccattttagcgattgctttaatctcaattctgtcgcttttgagtttgtcattatacaaaaacaacatcattagaacacagtcaaacaaattacttcaagagaaaaacagcgaactagaaatagcaaaagaaaaagccgaaaaagcatcgcaagcacgtgccgatttcttatcaactgttagtcatgaacttagaactccactgaatgccatcaacggaattacccatttattgatagaagaaaatccaaaagaaagccaaattcactatttgaattcgctaaaattttctggaaattacctattgacattcattaatgaaattcttgaaatcaaccgaatagaatcaaataacattgaagttgaaaacatcgattttaacttaaaagatttgcttctaaacattaaagactcgctacaagaattggcaaaagtcaacaacaataattttgtattagaaattgacgaaaaagttcctaatgctgttataagcgatccaacaaaactttcacaaatttttattaatctgataaacaatgctttaaaattcactaaaaatggtgatgtaaaagtactggtggaactttttggaataaacgaaaatgtagcaaccattcattttgaagtaattgatacaggaattggtattgcgccagaaaagcaacaaaccatttttgacagcttttcgcaaggttcaatagaaatcaaccgaaaatatggcggaactggtttaggattagccattgtaaaaaaattagtcgatttacttggcggttcgataacgttacaaagtgaattaaacaaaggttcttctttctattttgatttggaaatgaaagttagcactcgaaaatttgatttagaaaaagaaatagaacttgaaattccgcttgattacaacgaagaaattttggctaacaaacacgttttaatcgttgaagacaaca

SEQ ID NO: 2617 - DNA, 18696 bp, synthetic construct
  misc_feature 1..18696: note = Synthetic
  source 1..18696: mol_type = other DNA
gtataagagattggtcttgacgcccagagacggcgttggcgatgtacccagaaaaatattgcctgcactatcctgtccccataacggggatagcgtgaataacaacagaaatataaatacaaaatgtttcatatatttgtaattatgttataacgtttctatgatctgaaaccttctcttgctgagaaaaaaaagaaaaataaataatactcttcttgcttggtttttggcttcttgcaaatgctaacctttatggatacaaagtaacaacaaagcctaataacaactatttaaattgcgttacctatttttgtcctgatagtacctatttggcaaccttcaagaaatccttattatacatagtctctgcaaaatgaataaatataaacgttactctattaagcacacaaatggcacttttggtatattttagttcattgaaatgcttctacggatatgcataacctaaaggaagttatcgactgcctacggcggtatttaatcttccgtgctttaaatgcacggagggaattaatccaatttcgaatacggtcttagtacaggatacagcgcacaaaataaccgctgacacgagagagggtggtgataatactccagaaatatttgttgaagagcaccttgtaataatctgacggtcaatagacactctcattattctaagcggtgatagatcctatagctgaattacggctgcctgcggccggcaagaagtatccataattataattattaccaggattttccatcctgaagctatactgttcgtacccgcattgttgccagaggtgtttgtaccatccacccaggaaccaccactctttaacatgaagactaattcatcttttgttggcaaacaccagtttccgggaggagcccaaccctgactagccaggtatttacagatatcacctttaccttgcacaatattagcagggtcatgaacaagatcacctgtatctgtggaatatccacccaagccggtgacgatgttgttgacccgccgcagggtggatactaaaagttaaatgtctggcaaattgaatgtatattaatgggaaacggaaccaatcaatgtatatcttctctaaataaaatttgtctgattattgaataaaatgataaagaggcaataattctaactgccattcatagatacgatacaaaatggataatattattttgtatcgtatttatatttctaaggaaaatgattcaaaataaaatagggctaattatctagaataattttcataagatttattttaagaaaattattctatacacttaattttggtgtttatactattgctgatattaaaccttgatatttcagatatagatgaaaaaagttcgaagttacaaaagttgatacaagagtactatattcttattgtagaagaacagtgtcattatgttattagtgaccaattattattttgtatctgttctcaaatgaatattatttttgatttgctttttttgttgtattattaaccattaatcatttttttaaggagtagcagttacaggtaactttttccatccttcgggtggggcttccattatgaaatagggaactctaatataggtcataaaacaacgtgatggatcattggggagaacttggataaaaaaagtttaccttcatcattcatatagttgacagagtgtagccatttataaactacaaatagaaaataacagtctcaaagcaaaccagacaacaataataaaacaaagaaaataaagtcttaacttcattgttttttcattataaaaaagaaaaatgcgtgctaataaactaaagcacgcattctacaatacaatatttggaacccgttaataaatagagacaaagtagatatcgtctttcgccttttttatggatatgaaagaattgggtaatgtccaacggttctgaatataatcataagcataagtcttattcagataactgatatagttattcaactcatccaagttgtccaagaatatataagaagcattgcaggtattatttccgtcaaaggcacaggacagggttgctttctgatcatcgaacgccagttctattaaattctctttcattccattttcaatgtattcagctacatacataggattatcagaatagctttctttgatttcgtcatgggatagccttaataccagagaagaacaatttatcagtattgcacaatatgcgtttgagcttgtttgttgtgttgtcatacatacgtctgtttatagcctgatggtaaatcagaccgattattaatctaaaaaaacagatatatttacgactgtaagcttgacttatgaaactgcaaaggtatcagacccataaaaatagcagcacgaaatatccagttaacaaatatacaaatttatataataaagtatttttctttttccttatctttggtaaacttaattttacagtatctaaacaattccgatgaaaaagtccatagcctatcttcctaaatccaaacaagaagacttaatacgccttgttatggagattaataaacggcttcccgaagccgaaatgattatcttattcggtagctatgcgagaaatgaatatgtagactatgacgaaagagtagaattcggtattcctacctctttccgttccgactatgatatctatgtagtcacaagtaagatatcagacaataaagcaggaatcatattagataacattgatgcattatactataaagaacctgactttcaaacccctgtcaattttatcaatgacgatattaaaacgataaataaagctctcgaagaaggcaggtattttcatactcagatcaaacaggaaggagttgttctttacgatagtggtaagtttaaactagcccgaagaagaaagttaaagtttgatgagatacaaaaacaggctcaggagtactttgatgagaaatttagctttgcaaacgaatttttaggttttacagatgatgcaatgagaaaagaaagttatagaatggcttcttttttcattcaccaagcctgtgaaaactattactatgctattcgtttagcatttacgttgagaagtaataaacaacacaacctgactaaactggctgcatctgtcaaaggtcattcacctgatttggctcatgtttttccgaataattcggcagaagagaagcggcttttcaatctggtaaaggatgcttatatagaggcgaggtataatccgaaattcatagttactaaagaggacattgatgctctgattccgaaagtggagttactgagggatattactaagcgtatctgtgaggcaaagattggagagtatgcgaatatgggttaaacctcatagatatctttattatagaattttagagccgatgttaatcggcttttttcgtatgtagtagatacaataaaagaaaaagcgacaccgaagtgccgcaattgatgttttcacaacggaataatccttattgtgatttgcttccaaattgtatttgcaaatatattaaaatttcacagaaccataccaatattcttaaaatttatttatttatctttaaggctttgataaaaaggatactatgaaaaagatattaggattagatttaggaaccaactccattggttgggcgttagtagaggtggatcatgaaaagaaaatagtgaaaataattggacttggttcaagaatcttacctatggatgcggctgagattgctacattcgaaacaggtggtaagttaccaagtagtgcagcacaacggagggagaaacgctctccacgccgtttgaatgaacgctatcttttgagacgtgatagactacattgtgttatgaacttgttacaatctttgccagaacattaccaattgtcgatagaatttgaaaatgaaaaaggaaagcgtagtggtaaattcaaaaaaggaatagaagaaaaattcgcttattacaaagatgataatggtaagtatcaatttttgtttatggatgcttatcaagaaatggaaaatgaatttcgtcaacaacaccctaatttattttacgttaaaaataacagtaaacaaacaaaaatcccatacgactggactttgtattatttgagaaaaaaagcactccaaaaaacaaacaatgaattaacaaaagaagaactagcttggattacgttgagttttaatcaaaagcgaggctacgaaaaagtaatcggacaagatgaaaaagaacagaaagatgggatattactggaaactttcacaggtaaagtgaaaaatgtaataaaaatagaagataaagatttgtatgaaatcgttcttgttgaatttaataatgaagaaaatgaattatatcgatataaagaagagtctaaagttcaaataacatttaaaaacgatttaaaagagattgaaatcatttcaaaatatgatgatgaaggtaatgttgatagcgaaaaagcagaatacattatcaatgaaatcagagaaagtttgctagtactgaatgttcgtaatacaggaagaagaaacaaagaaaactttatatttgaaatagaattggaaacaggctggataaaagaacaacaaagcagatttactcccgattggaaaggcactagccgtgattttatcattaaaaccaaatatgataaagatggaaacagaataccgagaggacaggataaaggcagaagcatcagtatccccaaagaagaagattggtcattaatgaaattaaaaacagagacttccattcactctttcaatactaaatataacacaactggtgttgctccttatatttattataatttgcttcaaaacccaaatcaaaaggtaaaagctggtttagttacggttatagaaagagaattttatgaaaaagaattggaggcaatttataattcacaagagaaatatcaccccgaattgaataatcgagaattatacaggcaagctgttcaattattatatcctaataataaaactcgcagagatgctttaattaatctggattttaaaaatttgattagtacggacattatgttctatcaacgagatttgaaatcaaaaaaatcattaatcgctgattgtgactacgaaaaacgcaactattttaataaagaaataggtgtggtatgtaaacaaccattaaaagcaattcatgctgcaaatccgttgtatcaggaatttcggttgtggcaattcataaaaagtttgaaaattatcaaatgtgaagatgttataggtgatgagattttaataaatcaagatgttagccgagaacttctaacgcttgatataaaagaaaaaatatttgaatttctgaacgacagaaaagaaattacacaaaaacaattattgaagaaattatcagaattgcataacgaaaagactatttcttccaataattacaaatggaattatccggaatatgatgacgaagacaagaaaaacgaatataaaattatttgtaatccaacaagatctgaatttattatacgaacaaagaaaataaaaaacttttattgggatacatttttaagtcccgaaaatgaatatttattatggcatttcttttattccgtcaaaaaaaagtccgaattttcatcaggattaaattcattagttgaaaaattgttgaaaagagcagggttaccagcagattacaaaagtaatttggtgaaaagttttagcacctttagtggttataaaaacgactatggagcatattctgaaaaaacgatcaaaaaactgttaccattcttgcgaatagggaaatattggaaacgggaagatgtagaacaaatactggaaaatcgtccttctgacatcttagaaaaagttgagatagttttggataaagtggttacaaaagaagaaatcaatggcgaaataacagattttcaaggattatggctttcaagtgcttgctatttggtatatggtagacattcggaagtcggagatgtcaagttttggacttctccatatgatatagaaaactttatacgaaatgaatttaaacaacactcgttgaataatcctgtagttgaaaaagttttaatagaaatgttgcaggtggtaaaagatatttggatgtattacggattaaaagcgggtattgatgaaaatggaaaattcacctacaacaaactgttcgaccgtattcatattgaattaggacgagaaatgaagaaaaataataaacagaaacagagtgatgacaaaaaaaacagtgaaaacagaaaaaccaataatagaattatagaattactaaaggatttaaaaaaagaaaatccttcaattcaagaaaaatcaccctttcaacaggaaaaattaaaaattctggagcaaggagtgctggcttctattgaatatgaaaaagataatgtttcttatgaactattaaattcatcggaaacaatctctaaaaaagaaatcaaagaacttgtaagcgaagacatatccaaggttagtaaaggcgtattcgaacgatacaaactttggttagatcaacgttatcaatctccatacacaggcaaattcattaaactttccgatttgtttgatagaacaaaatatgaaattgaacatatctttccccaagaacgtcttacattaaattctcttgaaaataaagtaatttgtgagaccgaagtcaataaagacaagaaagctaacacaggatatgaatatatattaggagctaataataagctaattagatgtgctgcacacggatataaagagattccaattctatctgttgatgattataaagaattagtaaatagaaattttattggtaaaaaacgtgatattctactgtgtaaagatattcctgacgaatttacaaatagtcagaaagttaatatgcaatacatctccaagatggctgtaaaattgttaagtaacatagtccgtgaaaaagatgaggatacttatcggtcgaagaatgtattagctacaaacggaacaatcacatcaacattgaaaaagcattggcaattaaatgaaatatggagtgatcttatgtcgccacgttataaaaggttgaataagttaacggaatcaaccttgtttggtgatattcgaataatgaatggacacgaagtgtttgtaaacaataatcagattccacagcaaataaataagaattttgatcctaaaagaattgaccacagacaccatgctatagatgctttaattattgcacttactaccgaaaatcatgtgaactatttgaataatatatcttcgcaagacaaaggcgaagataaactgaaaacgagaaaaataataaagtatcaattaacggatactaaaagaggtgacaatagcacaaaggaatggtattttttaccgcctgcacaactaaaaacaaaagaaggcattataaactataactatgaatacaaagatataagcggaaatgtttttaaggatattgcaaaaacggcattagaagataccattgcaagcttcaaacaaaaaaataggattattcgtcagcgttggaacaaatattccactcttgaaaatgggagtattgtgattaaagaacaagaggggttaagcggtaaagagaactttagtattaggcaatcgttacacaagagtactttttacggaaaagtaaaacttgcatataaaacttcaaacatcaaattggaggaagctatttttgaagattatgatattgttgataatttgttaagcaagaagattgaggacatgaagaagcaattgtctatatctgaaattgttgcttgtttatcagttaattatccaactgtaagagtctatgataagtttgtagccacaaggtatggttgtaagttggaaagtttggcgaccatttcttctgataaagaggtaaagaaaatgattgaaagcattaccgacacaggtattcaagaaatattacaaaaccatttgaaaaattacgattctgacccacaaactgcattttcttacgatggtataagagcattaaatgaagccatagttaaaccaaaacatgggttaacgaaaaaagggaaaccccataagccaatttataaagtaagaatggcagatgtgatgggagcgaaattttcagtttcggaagatggacaaaaaagtaccaaatatgttgtaacagatgctggaagtaacgcattttgtggtgtttatgaaataaaaaaaggcgaaaggaaattttatattcctacattaaaagaattattgaataatttaaaaaatggcgaaaatccttgccccggtagccaccctgattttcctgaatataattggatttttaatctatgtgcaaatgatttagtgtatcttccaacacaagatgaaatagataatgataataagacccctgttgatattgatagccttgataaaagtaggatatataaatttacagatggtagcgggactacattgaattttgttcctgtgaattttgcttcattactttatgggtttccaaaaaatgttgcccgaaaaaatgcagaaaatttgaaaaaagaacattcattggaatacacagatgtcttattgcagaatgaattggggttaggtagccctcaatcgaaaaatcaaaattcgatagatcgtatacagattaaaaaatactgtataaaacttgatgtagacagactcggaaatatcaaacctctattaccatgatcaagaagacactttactttggcaaccctgcgtacttaagtatgcgcaacaaccagttggtggtaaaactacccgaagttgagaagaatgataccttgcctgaaaacttcaaaaaagcaagtgaaaccctctttctgattgaagacttaggcgtagttgtactcgaccataaacaaataaccctaacacatgggcttatagaaaaactgttggataacaacacagcattgttgacttgcgatagtagtcggatgcctgtagggctgatgctcccattatgcggaaacaagacacaaagcgaaagatttaactcacagattaatgcttctgaccctttaaagaaaaacttatggcagcaaaccataaaagccaaaataacaaatcaagcagaagtattgaagaaatttaggtcttgtaatatccgtaatatgatgcactgggcaggagaagtaaaaagtggtgatcccgataactttgaaggacgtgctgctgcgtattattggaaagaagcttttcctcagattgacaacttcacaagaggcagagaagagaatccacctaataacctactaaactatgggtatgctatacttcgtgcagttattgcccgctcgttagtagcaagtgggttgttaccaacgttgggtatacaccaccacaatcgatacaatgcttattgcttggcagacgatataatggaaccatatcgtccatttgtcgatgaattagttttctcgatagtagatagtggcgaggattataccgaattaacgacttcgttaaaaagcaaattgttacaaataccaaccatagatgtgatgatggggaatcaaaaaagtcccttgatgattgccgcaggtcagacaactgcatccttaaaccaatgtttcgaagggaaactacgtaaaattaaatatcccgaattattataatccatcggtaatatggagcaagaccgattaaatcaataccgtattatgtgggttctagtattatttgatctacctaccgagacaaagaaagatagaaaagtatacgctgattttaggaagaacttacagcgagatggatttaccatgtttcagttttcgacttatttacggcattgtatgagtgttgagaatgctaatgtacatatcaaacgagtgaaaaattttcttccggcaaaaggacatgtcggaatactctgtattacagataaacagtttggtatgatggaactgttttacgggaaaagccctgaatcaaaaaaaacaggagctcaacaacttgaattgttttagaaaataaaaatcccgatcaaagtcgggatttttatttgaaatacattgatttttcaaatgctaatggtgtttgcaatatgttgaaatacatatacttgctgtatggtatgatgtatttcaatgaactaagatacaattttgaaagcaaatcacaactactccatacgcttgttaacgtcgttataagatgtatttcaatgaactaagatacaattttgaaagcaaatcacaaccctgtatctgtattaatcggcggtacgcctgatgtatttcaatgaactaagatacaattttgaaagcaaatcacaactaatctttactactgatagtgaattatggggatgtatttcaatgaactaagatacaattttgaaagcaaatcacaacgtatccgacgttgcgccccgtatggatttggatgtatttcaatgaactaagatacaattttgaaagcaaatcacaactaatgattattaaggctattactcctgttagatgtatttcaatgaactaagatacaattttgaaagcaaatcacaacgtattgatgtctcaaaaaacacacttgatggatgtatttcaatgaactaagatacaattttgaaagcaaatcacaactcgctggggttcttcccagggtcttgttttgatgtatttcaatgaactaagatacaattttgaaagcaaatcacaacgtattgatgtctcaaaaaacacacttgatggatgtatttcaatgaactaagatacaattttgaaagcaaatcacaactcgctggggttcttcccagggtcttgttttgatgtatttcaatgaactaagatacaattttgaaagcaaatcacaacagcatggctttaatgaccgattggcattagatgtatttcaatgaactaagatacaattttgaaagcaaatcacaaccgtttcctgcgctctctgttgtgcgaatttgatgtatttcaatgaactaagatacaattttgaaagcaaatcacaactcattcttctaagtcgtcacctgaggactagatgtatttcaatgaactaagatacaattttgaaagcaaatcacaaccgcttttcagcaaggtatacggcttgcagggatgtatttcaatgaactaagatacaattttgaaagcaaatcacaacaattcaactgctattctgtcttctgagatgatgtatttcaatgaactaagatacaattttgaaagcaaatcacaactattcttctccgactctagatgctaagaagatgtatttcaatgaactaagatacaattttgaaagcaaatcacaacccaaggtgtctttctttaattacaaaaccagatgtatttcaatgaactaagataggattttttcaaatattaagaatgatatttttcatcttttatataaataatgtacaaagaataaacgatcaagaacaagccctacggttttcttatatatacctttttgtacttcaaagcgtaataaagggtgtgtatcagatataaaaagaagaaataatatgaaagtttgcttatagaatattggtgcttaactctattattgttatcagttcatttcatctaatcccactagttgcatgcaaattgcatgtacatataaaaataaaagagagctagattttaatctaactctctgattttgaactgtcgggatagcgggattcgaacccacgaccccctgctcccaaagcaggtgcgctaaccggactgcgctacatcccgtatttgatttcccaaatgcgatgcaaaggtatgacatattttttaataacaaaatatttagagatttttttttgaaaaaatgagatcagcccaataaaatagctatttttgtaactcaagaaacagaatccatattagtcaattattttactatgtatagaaatcatacatgcggagagcttaggctagcagatgaaaataaggaagttatcctgtcaggatgggtgcaaaaagtgcgtaaattgggaggtggtatcacatttgttgatcttcgcgaccgttatggcattactcaattagctttttacaaagatgtaaatgaagatctttatgaggaagctaataagtttggacgtgagtgggttctacaagttgtaggaaccgttcaggaacgctcgagtaagaataaaaatattccaacaggagatattgaaatagctccaagtaaagttacagtattgaattcatcagaaaccccaccctttactatagaggatgagacagacgggggagatgatatcagaatgaaatatcgttatttagatttgagacgtaattctgttcgtaagaatttagagcttcgtcataaaatagcattcgaaactcgcgcttatttggataagttgaactttatggaggttgaaactcctgttctgattgggtctactcctgaaggggcaagagactttgtcgttccttcgagaatgaatccaggagagttttatgctttacctcaatcgcctcaattatttaaacaattgttgatggtatcgggattcgatcgttatttccaaatagtgaaatgttttagagacgaagatttgcgtgcagatcgtcagcctgagtttactcaaatagattgcgaaatgtcgtttgtagagcaggaagatgtgcttcaaatgtttgagggattgactaagcatttatttaaagttgtaaaaggtattgatgtaccagattttcctcgtataacatacgctgatgctatgaaatattatggatcggacaaacctgatactcgctttgagatgaaatttgttgaattgaaagatttgacaacaggtaaagatttcgttgtgtttgatagtaccgaatacgtaggagctatttgcgctaaaggatgcgccgaatatacacgtaagcagttagatgaattgacaaacttcgtaaaacgtccacaaattggagctaaaggtcttgtatatgtaaaatgtgaagcggatggaacatttaaatcatctgttgataaattttatggacaagaagaacttgctacatgggcgaaacgttgtaacgcagaggcgggagacttgattcttattatctgtggagaaactgaaaaagctcagaaacagttaagcgaacttcgcctagaggtgggagagcgtttaggactttgtgataagaacaaattcaactgtttgtgggtaattgattttcctttattggaaaaagatgaagagttgaatagattctttgcaaaacatcatccatttacgagtcctcataaagaggatattccattattggattcagatccggcaactgttagagccagtgcttatgatatggttatcaatggtgttgaagttggaggaggttctgtgagaattcacaatagtgaattacaagagaagatgtttgaagttttaggattcactaaagaaaaagctcaagctcaatttggttttcttatggatgcttttaaatatggagcacctccccatgcagggttggcttttggtttagaccgattagtgtctctatttgcagggcttgattctatacgtgattgtattgcatttccaaaaaataactcagggcgtgatgttatgattgatgctccatctgtaatagatgatgagcaattgaaagaattacagctagttgtaaatctgaaagactgaagctaacgttaaattctataaaaaaaaggatagttgcttttggagcactatcctttttttgtacattaggcgcagtattatgcacctttgattttatattatataagtaaaaaaagttaatttattcaatttttattgatagtaggtgcgcttattataagtacacttactatatttgcacccacaaaatataatggataatgggtaaagatgaataaagattgtaaaataggtgatccatacaatgatttaggttttcttatttggcagataatgaaaacatggcaacgaggtaagcataaactattagatgagtttgggcttactggttcgcagatggaggtattgtcagctgtatatcatttgggacaaacggagcaggaagtaacacaaatcgcaatttcgaatgtaacaaatgttgatccaatgacaacatccacaattcttcgaaatctgcacaagaaaaaattgatcaacagaaaagctagtaaaatagatacaagagcacgtgtggtagaaataacagatgatggtacagacctttttctaaaagcgataaccaaagtacgtctttctacagatgctcttttggaacatatggatggtgatgccttaaaagcacagttacgatctttattggaagtattaaacaagttaaacaattaaataatattaggtatgtttttgaataggttaaatgttggggtattagtggccttgttacttgtttcatgtggaaacagcaagcaggaagcgccaaagcaggaagcaccggtatatcctaccactgtgctgagtgaacagaatacagttttggaaactgtatatcctgcaacaataaaaggacaggaagatattgagataagaccacgtattgacggttttatcgatgcaatctacgttgatgagggagctcttgttagaaaaggacaggcattattcaagataaactcgccacaatcagagcaagctttattatctgctcaagcagcagtaaatagtgcacaagcggctttaaatacagctcagttgaacgttgaacgcatacgtcctcttgctcaaaaaggtattgtaagtaatgttcagttagaaactactgaaaacgcttatgaatcatcgaaagcagctttcgcacaagctcaagctacattgtctaatgctaaagcaacaatgggttggacgagtgtaactagtcctgttgatggaatcgtaggttcaattccttatcgtcaaggtagtcttgtggataaatcttatgtattgaccacagtggcaaatacaaataatgtatatgtttatttttctttgaatgaaaaggatttaatggactttttacaaaaggctccaggaaaaactcaagcagagaaaatcaaaaatatgcctgaattatctcttattttagcagatggaactgtatatcctgagaaaggaaagatatcaactatttcgggattagtaaatactactaccggatcagttaactttagagctgatttccctaaccctcatggattattgagaagtggtactagtggtaaaataagtataccaagacatttggaaaatgttctgcttgttcctcaaaaagcaacatttgcacaacaagacaaagtgttggtatataaggttcaaggagattcagtggttcaaacacctattactgtattacaaacacccggaggtcaagaatatgctgtaacagctggactttctgctggagatagaattgtagcagatggagttgcaacattaaccaacggaaagaaaattaaagttcaataattttagttttctatattaaggtcaaagacctgttattgcctcatttcttgcagttaaataagagtggacggcaatagcgaaatacgatacataaaaatataaactataaaatacaatgttaaaaacttttatagagagacctgtattatctactgtaatctcggttattatagtggtattgggtattataggactggtgactctgccagtggagcaatatccagatattgcccctcctaccgtccaaattagtacgatgtacgatggagccaacgctgacgtggtgatgaatagcgttgtagttcctattgaagagcaagtgaatggtgtagaaggtatgacatatatgacatcttctgcttcaaataatggtcaagcaactattactgtatacttcaaacaaggtatcaatcctgatattgcggcggtaaacgttcaaaacatggttgcccgtgcaactccattgttgcccgcagaagttgttaaagtaggggttactgtaagaaagcaacaaagtagtactattttgttcttagctttatctagtgataatccagactatgacgggcagtttatacagaactatgcaaatatcaatatcttacctcagatcaaacgtgtatatggggtaggagatgctatggtatatggagcgaaagactactcgatgcgtatctggcttaagcctgatttgatgactacttatcaaatttcgccaacggaagttattgctgcgttaacagatcagaatattgaggctgctccaggtgagttgggacaaaacagtaatcagtcatttcaatatacattaaagtatactggacgattaaaatctgctgagcaatttggagatataattgttcgttctcaaaatggacaggttttaagagttagagacgttgctgatgttgaattaggatcgttgaattatacagtacattctttaacaaatggtgcagaatcagttgttatttctattagccagactgcagggtcgaatgctcaggaagtaattaataatattcagcagactttagacgaggcttcagtttcatttcctccaggtatgaaagtgagttatttgatgaatgctaatgaatttttatcggcatctatcgaaaaagtaattcacactctgattgaggctttcattcttgtgtttattgtggtattcgtgttccttcaggatttccgttctacactgattcctgctatcgcggttccagttgcaattataggtacattcttctttttgcagatgttcggattctcaatcaacttgttgactttatttgctttggttctggcgatcggtattgtcgtcgatgatgcgatagtcgtcgtcgaggcggtgcatgctcagttagactcaggagttaaagatcctaaggtggcaacaatggctgcgatgaaagaaattgctcctgcaattgtttctattacattagtaatggctgcggtatttattcctgtaagttttattggaggaacaagcggtatattctataaacaatttggattaactcttgcaattgcgattgttatttcagctgttaatgcattaacattgagtcccgctttatgtgctctgttcttgaagcctcacgaagaagggcatgttgagaaaaaaagcttaatcaagcgtttttattacagctttaatattgcgtttaatgctgcaactcaaaaatataaaacaagtcttcacttcttaggacgaaaaggtcaccgttggattacagtagctattattgctgtaagttcaggtattctattctatttgatgagtatgattcctacaggattcgttcctcaagaagatggtggaggtgttatgggtatgattactttacctccgggagcgtctcttgaaagaacagactctttggttacagaagtaactaaaatagcaaaagatatagagggtgtagatattgtaaccagtatttcgggtgtaagttttatgagtggattgggtagctcttatgcatcaatgattgtaaaaatggtgccatggggagatcgtaaaataaatacaaacgaagtagctagtattttgacgcaaaatacagctcatatacaagatgcaacatttatgttcttcggtatgccaacactacaaggctttggtttgagtacaggggttgaaatgaaacttcaggataaaacaggtggagatattcataaattctatgatataaccaacaagtttttggatgaggtgaaagctagcgataaagtaatgatggcgatgacaacctttaacccaaatttccctcaaaaacagattgaggcgaatatggcaaagataaaagatgcaggtttaggtctttctgatgtaatgacaaccatgcaggcttatatcggtagtatgtatgtgtcgaactttaacttatatggtaaacaatttagggtagtggtacaagcttcgcccgaatacagatctagcattgaagatttaggtaagatatttatccgtacttcaagtggagaaatggcacctataacagagttcttgaatattacagatgttacagggccacaggctttgactcgtttcaatatgttctcatcaatggatgtaactatcattcctaacttttacaaaggatatagttcgggagacgttattcaattggttgacgaggttagtaaaacagcacttcctcaaggttttggatatgagtattcaggcatgactcgtgaagaggttggtagtggaagccaaacggtaatgatctttggtctttgtttgatcttcgtttatcttctgttagctgctctatatgaaagttatatccttccattggcggtaattatatcattaccagttggtcttgcaggtgtattcatctttatctttgtagccatgataggaggtagtggtattgtaaataacatttacgtccagatatccttagtcatgttgattggtctattggctaagaatgcaattttgattgtagaatatgctatacagcgtcgtcaacaaggaatgagtattgttgatgcagctatcaatggtgcagtagcacgtttgcgtcctatcttgatgacatctttcgcctttatctttggtcttatgcctttgatgtttgcatcaggtgcaggtgctattggtaacagatctattggtattagtgccattggaggtatgtttattggtactatgattggagtattggtgattccgtctctatatatcattttccagaatatacaggaaaaatttagtaaatctggagtattgaattctgaggataagacaatagcaagcaagta

SEQ ID NO: 2618 - DNA, 17240 bp, synthetic construct
  misc_feature 1..17240: note = Synthetic
  source 1..17240: mol_type = other DNA
gagcaattacctggcagcataatttacttgtaaaactttgtctaaaactatcgttcaaactagaattagaaattaatccaacattaatacccaaagggtttaatgttttgaaggtaacagtatacctatttgcagaataattagaagaagctaaatagctgttgcaagaggcataaccaaaagtatttgttttggtaagatacatatcgtaattaccggaaccaaaagaattagtagaagagagtaaagaaaaagtactgtccttatttaccacaatttcgctaggccaatgtccatctgtttggctactgccatatgctctggcaaataagggggtgtaaattttggtagtgttatttaatctcaacttaattaaacaagcatcccttccccctgcgggtccattattcaaataacctcctaaaagtaaatcaccatctaaggcttgtttaatatcgaaaagcaatgtgctaccactaaaattggatactttagccccattagccaagagcgtattttcttgaatttcgaaaaggataccaaaattgtcgttattccatcctgtaacataatatttgccgtctttttctatcaaatcataacctctagattctttgtttatttgtaaagaaatttctcttatcccaaaactatatgcacttacaagattaagattagaatctgttttatacaacaacatttgatttaaagagttgtgttcactactttttctataccaacctgtagaaacatagttgccatcagaatcttcaattaaattaaatgattcttggtttcctccatgtaaaaaggctttagaatggattagagaaccatttggactaagttttgccatgtatatatcaaaactatcggaaagggtttttctaagacctgtagctattatatttccagattttgtttcttttaatccgtacagagcaagagaaaacgtatctgaaatagaagtctgccaatctacattgccattggggtgcattctaataaccaaagcttggtctgcctggttatttggagtggtggtatttcctgctaaaacaaatccccctctttggtcacaaataatttgccatgctctttggttttgtgtgttggaaatagttttactccactcaatttctcctaatacattggctttaattacatatatatccaaggttgcactgtagttttctgtgtaacctgccataatatagccaccatctagggttttacaaatagaataattgcggtcgtttccacttgtacctaaagttttttgaaaattgatttgtgcctgagagaaaatccctaattgaacaagcaatataagtaggtatagttttttcatattgtaaatttataaatagcagaaaatgagtttcttgtactttggtttaaagagttaagctacacaaagctatgttattaacatgaataaaacaagataccggattctaagttagaaactatgccataaaaaaagccattcgtaaggaatggcttttttgtttgtgatcccgctgggattcgaacccaggacccctacattaaaagtgtaatgctctaccagctgagctacaggatcgttactttgattttgcaagggtttaaagtgtttccccctccgtgtcaatgtgggtgcaaaaatagtactttttataaagagtgcaaatctatctttgtttttttttattatttttttcttttctttctagtatctatgcttaagttgatgaaaatcaatgtttatgagtatgtaaatgtggataagtgtagtcttgtatccctaataaagtactgcaaaattcattgtttatgggtatgaatccgggtttttattgacttaagccatttaatagaaggataactccataattttgggtgaaggatgtaaaagaacgaaaggatatatacagtgaatgtatggagtaaaaacgggttttagcaggaggagttatacattgaaacggaagtgcatgcaatctccgtctttaactatgtattctttaccttctacatgtagtttaccaacttcttttattgcggcctctgttttgtattgcacatagtcctcaaaagcgattacctcggccctgataaatcctttttcgaaatcggagtgaattacacctgctgcttgaggcgctttcatcccttttgttatggtccaagcccttacttctttttcacctacggtaaaataagtaatataatctaaaagtatataagcacttcgtatcagtttagccaatccgctttcgctaagtccgtaattttccaaaaattcctgtctttcttctgggctttctagttctgctatatccgattctaatgcagccgagatcaaaagtacttcagcattttcggtagtagcatgtttttttacttcttcaacccatttatttccgtttactacatcttcttcgtttacattgcatacgtataaaacgggttttatggtaagcaattgaagatcctgaacaattttaagttcttcttcttccatttcaagtgagcgaacagataaacctttaccaaggtgttcttttactttttctaacaaagcaacttccttgctcgcatccttgtctccggctttggctgctttggcagatttgtttattttattttctactgattctagatcttttaactgtagttcagtatctataatttctttatcgcgaattggatttacgctcccttctacgtgaattatattgtcgttttcaaaacaacgcagtacatgcaaaatagcttgggtacttcttatatttcctaagaactgattacctaatccttcacctttgcttgcaccttttacaaggcctgcaatgtctacaatttctatgctagcgggcactacattttgtggttttgcaatttgggtaagtgtttccagtcttgggtctggaaccgttattacacctatattgggttcaattgtacaaaaaggaaaatttgccgcttgtgctttggcattcgttaagcaattaaataaagtggattttccaacattgggcaatcctacaattccacattttaaagccattttttgattctagattttatttgtatagttagttatagtatggggtaggggactaattttttttcattagttcacctatatccatgataatttttttggcaagattgtctgctgtagtttgcgatttgctttcggcatatattcttactattggttctgtattggatttgcgcaaatgcacccattcttcgtcaaattctattttcacaccatcctctgtattgatagggttacgtttgtacttttcttgaattttttccaagatatattcggtatcaaagccaggttcaatattaattttattttttgaaatcacataactagggtatgtacttcttagtgtcgagatttgtttgccgctttttgccaacaaggtgaggaaaagagctatgccaactaaggcatctcttccgtagtgtatttctggataaattatacctccatttccttctccacctattactgcattggtagctttcattttttctactacatttacttcgccaacagcagaaggggtgtatattttgccaattttttcagtaatatctcttagtgctctagtagagctcatgttggaaaccgtattgcctggggtgtgttgtagaacatattgagcaactgctactagggtgtattcttcgccaaacatagttccattttcgcataccaatgctagtctatctacatcggggtctacggatattcccaaatcggctttttctttttttacagtttgagccaattctgttaggttttcgggaaggggttcgggattgtgagcaaaattgccggtagggtcacaatttatttcaataatatcttcaacaccaagagctctaagaagcataggtacagcaattccacctgtagaatttacagcatctatcaccactttaaactttttgtttctaatagcttctacatctacaagtttcaggtctagaattttttggatatgtttgtctatatatcctccatgctggtgaaatatattgcccaaattctgtacttcttcgtatataattttacctttaaccgaaaggtctaatactgcttgtgcttcttctgtattcaagaattcccctttattgttcagtaattttagggcattccattgttttgggttgtggcttgcggttagtattattccacctgcggcctgcatttctgaaacagctaattctacagaaggagtagtgctaaggcctagatctataacatcaaaacctagtgcaattaaggttgaatttactagtcctgcaaccatgggtcctgaaattctggcgtctctacctacaacgatagtgttaccccagttttgttttttaataaaattaccatacgcagaggtgaatttaacaatatcaggtggagtaaggttgtcgccttttggtcctcctattgtgcctcggattccagaaatagatttgattaatgacatatttttctttttaaaaaaaggttcgcaaaagtaacaaaacctaactttattttaatgctaaagttatgcatattgtataccaaaatatattttacatatttgtttgattaacaaagaactgtggaaaatatttgcagaggtgaataaaatactcaccattgtatcactttgcctttagattctaacaatattttggcttctttccattcgggtatggattcggattcataagaaagtgtaactattttgttggcaagttttgcactttgattcattgctgcaaggtggtttgcacttgttgcaaaatttttcatatcaatttgagaatcccactgacttattgtgtagtgtttttttccgaaacctgtttttttgaattctcgaaacccattactttttttcatttgtaaagtaattcccaatgcaagctgagacagtttgaaaaaatgccaaatggattttaatttgatttctgtaattgtaacatacatgtgtttgtaattaaaaaaaaggctatttcttgcgaaacagccttttggatagaactgaattttatttttttggtttagctatggaatctctcatttcagtgtctgctataatgtttttcattttatagtagtccattatgccaagatttccgcttctgaaagactctgcaatagccattggtatttgggcttctgcttctattactttagctctagcttcttgggcttttgctttcatttcttgttcttcggctacagccattgccctacgttcttcggcttttgcttgggctatgtttttatctgcttcagcttggtccatttgcagttttgcacctatgttttcacctatgtctatatctgctatatctatggagagtatttcgaatgcagtaccagcatccaatcctttagaaagaaccgttttagaaataatatctgggttttctaatacttccttgtggttttttgcagaacctatggtggttactattccttctccaacccttgccaaaatggtttcttcgcctgctcctccaactagttggcgaatatttgcacgcactgttactcttgcttttgcaattagctgaataccatcttttgcaaccgcggcaacaggaggtgtgttaattacttttgggtttaccgacatttgaaccgcttcaaatacatctctacctgctaggtctatagcagtagcagagttaaaatctaagtttatgtttgctttgtctgcacttattagtgcatttactacattaattacatttccacctgcaagaaaatgcgcctccaattggtcgcgtgtaagtgccagtccagccttggtagagttaatcattgcttttactattacagaaggtggtacttttctccaacgcataaagataagctgaagtaatggtacttttacaccggaaagcaatgcagaaaaccacatgccgataggtacaaaatagaagaaaactaaaagagaaataaccaaagcgataaatccacctgtataaaacacagggttcacttccagtaagatactaaagattgtttgtttcattgttatatttttttacgtatatttttttgtctatgtagtgcgatatttctatttcttgaccagcatctatccattcttctctgcttactacttctactatttcattgttaaaaatggcagatcccgagggacgaatggcgctgttggtaattcctcgcatgcctatttttgcatcaaatccaacattgtttcccgactttgcttgcaactcttcatttacactaaatcttttccaaatattgcttttcatgcccatgtaaatagaacctatgctaagcgcagaaagtccaagtgcagatatgtttccccaggtgtttccgtaggattggtacacaaaataaatggcagcaaaccaacaagcaaacccaacaagccctactataaaaccaggagttacaaatatttctagcaacaacaacaatgcgcctatgcctataagaaataaaattgttcccatggttttagttaagagagtttagcacttcttgaattgcctcaaaattagggattttaccagcatcctccaaaatttcttcgtatactatttccccttccttgtttattacaaaagccgaacgcttagaaactccttccatctctaagacaaaattttcgtataaactattgtatgatgcagaaacttctttgttgaaatctgatagtaaatcaaaatttagttgctgttcttctttaaatttccctaaggtaaaaagggagtcgaccgaaatgccgtaaactttagcattggcattgttgtaaaacgatattgaatcccttaccgaacacaattctgtagtacatgtacttgtaaaagccaatgggaaaaacaataacaatacattttgaccttttaaatctgaaagactaactttttcttttgattgattgaatagactgaaatcaggtgcttttttcatagtttttatccgaattttgaagtggtaaatttaacttatttttcgtttttgcaacaagcattcataactttattttgcatgctaagccatttccttcattcctccttttataccaaatattagctttaatttttttatgtttgcaaacgctataaaacctaacaaatttgcatgttgtctccaatctccttaaatttttatttgaataaatttggaccccgtgtattgttttttctttcttttcttttttttacatccattacttcaaacggacaaaattctactacccgggtagagggaacaatattcaacgacgacagcaatcccttggcatttgcaaccatacaggttaggaatctgaaaattactacaacttccgatggacaaggaaggtattctcttcgtgtacccgaaggttcacatatacttactgttagctttgtggggtacatttctcagagtaaaagaataaatattggaggtcaagaaaataaaacagtagatttttatttgcaagccgaagtaaaagaactaaaaactgtagaaatatactccgacagtagaaataaagccaaggagattatgcaaaaggcaagggcaagaagagaactttacaatgaagctattcaaacgtatacttgtagcacttatcttaaatcaggtttggaacataaaccatatatttcagataaaattaaagacaataatatagaagaaacagacagtgggaaaatagaagtaacactgaaaacaaaaaatcaagcaacagaaaatgctttgttggaatacctttcacttacttattttaaacatccagataaaataagagaaaaatttgtggcatacaacgaacacaaatttgaaagaagtggatttagcaggggagtatctgtgggttactctctaaacagtaaagaatttggacctcctgcagaagaaaacaacaatccctatttattatacaaggatttgaatagtagtttgttgaatttttattctaatttgataagttttcctgctgtaagtaccaagccccttatgtcgcctttggcttctacctcttatttgcattataagttcgattacgaagggattagtacaagatttgaaaaaccctgccacattatcaaaattagtcctttctcgagaacagaagctctttttgaaggaacaatttatatagaagatagcagttttgctttggtatatgtagacctaagtattcaccctgctagtttgaatttttgtaattattttactcttacccaagaatacaaagcaatagaacccaatacatatttgcccatacaaagaggcataaactatcgtattgctttgggaaaagacacgctaaatggggaagtgctagtgaatcatttcgagtaccatattaacacagaaattgaatccaaaatttttactggagaaattaaaaagtttgaaataagtgcttttgataaagactcaaatttttggaacagctataggcctgtgccgcttaagccaaacgaaaagttatacataaacacccaagatagtttaagaaactactacgaaagccctgaatatttagcaaagattgattcacaattcaataaaattaatatatggaatactctctatggagtagggcaccgcaaccgattacggggaacggaatggtatataggggggattttcgaacaaatgaatttttttggaataggtggctacagacacaagcttcctggttatttttataaaaccctttcaaacaaaaacaagctagagtttagaggttttatagactatggatttatgaataaagatgtgaaaggcaaattaggaataggctacaattatagtcgcaaaaggtttatgcgaacctttgtagaaataggagatttttatagtcaaattaataattttgcatctatacagcaggcatttagtaggagcaattatgcccgaaatattactttccatataacccaaagactagagatagtaaatggtttgtatgcagaatttggatttgattatggagaccaatcccctataaacaatttgcagttagaaaaatggtcgggagatctgtttggcaaaataaatactcctgtagagtttgagaggtatatcaaatcagagtttcacttaaggttttcttacagtcacaagcaacagtattattttaaaaacaaccgcaaagtaattgtaggcagtaaataccccaaattggtggtaaattaccgcaaaggaattcctagtttatttaaaagtgaggtaaactttgactatttggaactgaatgcatatgacaataaaaaaatagcgagatggggaaccttgaggtgggacgcaatggtggggaatttttataacagtaaaagtcttagattgttggagcacaagtactttaggggttcggatccatttttcttttccgatccattggttagttttcagctacttggccctacgctcaataccaacaaggatttttacaaacttagtggtatacaccatttcgaaggagctattacagataaaatcccttattttaataggctaaagcttcatttggcaggcggtgcaggtctcttgagtataccatccattcagtttcaccatgccgaaatgtttttcgggtttgaaagaaactttaggatacgagaacagatttttaggataggagcctatgctgtttctgctgccaattctaagcaggatgcctactggacctacaagttcggaattagcttttttgatccttttagtgggagatttgattattagggaaggaaaagcattaaaggattaatttaaaagtatttaaacaaaaaaaggcgtttgccccgccttaaatgttttgttcgctttaatttttttgatgaaatgagctcacaaaacatttagttataaaataaaaatgccccgaagatagtcgaggcgctaaatgttttcacaacggaataatccttattgtgaattggtttcacttgcaaatgtaatattttatttttaagttgcaagcatcaaaacaacaagctaagcattatgaagaaaatattaggattagatttagggaccaatagcattgggtgggcattggtggaaattgaccacgaaaataaaattgttaaaatacttgggataggctctaggattttaacaatggatgcagctgaaattgcaaagtttgaaagcggaactaaacttgaaagtactgccgctaaaagaactacacagcgttctccacgtaaattgaatgaaagatatttattaagaagagataggctgcattgtgttttgaatctattgaatgctcttcctgaacattacagattatctattgaatttgaaaatcaaaaaggaaaacgaagtggaaagtttaaaaaagacacggaggaaaagttagcttattttaaagatcaaaatggaaaatttcaatttttatttgaagaagcatatctaaagatggaaaatgaatttagatcaaaatatcctgagataaatgacaaaaaaacaaaattaccttacgattggacattgtattatttaagacataaggcagttacagataaaaactttgaacttactaaagaacagttagcttggattactttaagttttaaccaaaaaagaggttatgaaaaagtagttgggcaagatgaaaaagcacaaaaggaaggagagctaaccgacacatttgttggcaaagtaaaaaatgtaaaaaagctagaaaatgaagatgcttatgaaattattttagtagataataacaatgaaacaatccagctatttaagtataaagaagaaagtaatatttcaattacagaaattggagatttgaaagaagtagaaattatttcaaaatatgatgatgaaggttcaatcgactcgaataaaacagaatatatcattaatgaagtgcgtgaatttaaaattgttgatgttcgtaatacgggtcaaaagagaaaagaaaattttgtttttgaagtagaacttgaaacaggatggataaaagaacaacagagtaaatatctgcctaaatggaaagatacaaaaagagattttattataaaaaccaaatatgatgaaaatgggattagaatcccaaaaggagcagataaagggaggaatattaatattccaaaagaagaagattggactttgatgaaattgaaaactgaaacatcattaacttctttcaatgcaaaacacaacacaaaaggaattgcttcttttgtgtattataatcttcttcaaaatccaaatcagaaaattaaaggtgacttaattactgttatagaaagagaatattacagagaagagttggatgttatttacagaaatcaagagaagtttcatccagaactaaagaatataaatttatacgagcaagctattcaacttttatatactaataataacagtcatcaaaaaacgattaaagaattagattttaatcatttaattaaggaagacatcttaatgtatcaaagagatttaaagtcaaaaaaatctttgattgctaattgtgtttatgaaaaagaaaactttgagcgcaaagatgaaaaaactagtaaaatatttaagaactcacttaaagctatacataaagcaaacccaatttatcaagaatttagattgtggcaatttgtcaaaaggcttaaaataattaagaaaagtgacacctcgggcaatgttaatgtagatgtaacttctcatttattgagcaatgaaataaaagaagaattatttgattacttgaatgataaagaatttgcgacagaaaaagatatacttggatttgtaaataaaaaacacaaagatttggttgtgaatgccgacaactacaaatggaattttacatctgaaaaagaaccatgcaatacaacaagatataaatttattctcctttcaaaaagagtattgggagctaaatataaagaatttttaactcgagaaaatgaatatttactatggcatttcttttattcggttaagaagaaagatgagttcaataaaggattacgaaaggtaataattaaattgcttgaaaagtcaaaatttcctcaagattacctaaacgacttaattaaaagtttcagctcatttggcggatatgccaatgattatggcacatattcagaaaaagccatcaaaaaattgttgccatttttaagacttggtaaatattggaatgaaaaagaagttgaaactattttatcaaaagccaatcaagatgttaaacaaaaggtattagataaagaagaaatcaatggcgaattgaaagattttcaaggtctgtgggtttcgagtgcttgttatttagtatatggtcgttattctgaagttggagaagttcagttatggaaatcgcccactgatatagagaattatttgaaaaatgaattcaagcagcattctttaaataatccagttgttgaaaaagttctagtagaaaccttacatattgttaaagatatttggaatcattatgggaaaggtgtagaaagttactttgacaatattcatatcgaattaggccgtgaaatgaaaaagaataacaagcaaaaagaaaaagacgacaagaataacaaagagaatagaaaagctaacgaaagaattgttgagctaattaaagagttaaagaggagcaattcttcacttcaggaaaagtcaccttttcaacaagagaaattgcgaattttggaagatggacttttatcatcaattgaatttgataaggacacaacagaataccaattaacaaatggaaaaattactaaaaaagaaataaaagaaattacttcaaaagaaatttctaaaatcagtagaagtgattttgaacgatacaaattatggctagaccaacgatatcagtcaccatatactggacagttcattaaattgtcagatttatttgatcgtaaaaagtatgaaattgaacatatttttcctcaagaacgtattacactaaatgcaatgtacaataaggtaatttgcgaatcggaagtaaataaagacaaaagggcagcaacaggttacggttatgttgcaaatgcaaaatgcaaagagattttttgtgcagcacacaataaaaaagtcaaggtgttaagtattactcaatacgagaagttggttaatgataactttataggtaagaaaaaagaaattttattaagtaaagacataccatccgaattcacaaatagtcagcttaataatagccaatacatctctaaaatggcaatgaaattattgagtaatattgttcgcaaaaaagaagaagacacataccgctcaaaaagtgttttggcaacaaatggaaccataaccacaaccttaaaaagacattggcaattaaatgatacttggaatgaaataatttctccaaggtttaaacgtttgaatgagctaactaattcaaatttatttggagattacagagaaattaatggacaccaagtctttatcaataccgtgccagatggaacaaacaataattttgacccaaaaagaatagatcatcgccatcatgctttagatgctttgattattgcattaacatcagaaaatcacgttcaatatctcaataacatttcttcacaaaatgaaaatgaagaacagaaactaaatactagaaaaggtctaaaaaaccagttaactaattcaagaaaaggagcaaatgaggagaaggaatggtattttttaccaccggctcaaattaaaactactcttggaattattgaatatgaatatcaattccgtgaaaccaaaagcgaagtgtttaaagaaatagctcaaaaggcacttgaagcatcaattgctagttttaaacaaaaaaacaaagtaattcgccagcgttggaacaaatatttaaaacctattgatggcaaaattgaacttgtaaaacaagaaggattaatagaaacaaaaaactataatgtaagaaaacgacttcacgaagacacatattatggtaaagtgaaattacaatgcaaaatgataacaattgctattgagaaagcaataaacgaacaatttgatttggtagataagaatcttgctaatagaattgaatctctaaaactaaatgatggaaaatctaatagtgaaattatagaagaaattgggaaaaaacactccaaaataaaagtttacgataaatttgtagcaactcgttttggaaataatttagatacttttgctttaattccttctgataaaataatcaaagccattgaatcaatttcagctacaagtatccaaagaattttaattaatcatcttggcaattataaaacattaattaatgataaaattatatacgacaccgaaaatgctttttctactgatggaattaaagacttgaacaacaacattgtaaaacttaataatggaaagtttcatcacccaattttcaaagtaagaactattgatgcaatgggaacaaaatttcctgtatctgaagaaggtcaaaaaagcaccaagtatgtagttacagcggcaggtagtaatgctttttgcggattttatcaaaaaggaaaggaaagaaaattctatatcccaacattaagagaatctgtacaaagtttaaaagatggtttttctccttgtccagcttcccatcctgatgattcagatttcaaacttattttcttccttaatcctagtgatttagtttatgttccaacagaagaggaaagagaagtaccaaacttggtagattttactaacttaagtaaagaacaaataaatagaatttataaattcagagatggaagcattaatgaaaaaggaagtgtacaaatcaattttatgccatcaaattgggctagtttaatttttaaggcttctaaggaaggagaaaaaatctctttggttactaatcaagaactaaaaggagaagttacattaacatcagataaggataaatcgcaaaatactattgatgatggagttcaaattcgctccttttgttggaagttgaaggtagatagaataggtaatatttcaaaagcataacaattctaaccccttaaatttttaaaaatctttggattatgtagcttgggaatattgattctcaatctactattatattgaatttaccaatttcaaatatgtttaaacctagcagctattaccatatttacaaccatgccaatggttttgagaaccttttccaagaagaagaaaactatcgctattttttacaacaatgggaaaagtatatttcttccattgcggaaacatacgtttattgcctgatgccaaaccatcttcattttttaattaaaattaaagacgaggtggaggttttaaaccttggaggttttcaaaacctccaaggtttggaaggttccgaaaacctccaaggtttggaggataaaacctcgaagattatctcgaaaaagtttagtaacttatttaatagttataccaaagctttcaataaacgttataatcgaatgggcagcctttttatgccaaacttcaagagaaaagaaattgacaatgaaaagtatcttctaaatctaatttactacatacaccgcaatcccgttcaccataaattttgtaaggattttagagattggaaacatagttcttttcatgctttgacttctgactccactacttttctaaataaagattttattgcaagctattttgaagatatagataattttaaagtaagccatgagcaagaattgaacgcaaatgaggaatattttttagaaaagttttaacctttaacttttgcaaagtttgacactttccaaaagttaggaataattaaaaaaaacgatgataaaacgcacgctctacttcggaaaccccgcataccttagccttagcaacaagcagcttgttgtaaaactgccggaggtggaaggcaacaaacagttgcatgaaacatttaaaaaagaatctgttgcaagtattccaatagaagatattggattaatggttttagatcacagtcgcattaccataacacaagcagtaatagcagagctgttagaaaacaatgtagctttaattacttgcgatgcctctcaccatcccaccgggttgttgttgaatttggatggaaataccttgcaagcaaagcgctttatgcatcaaattgaggcctctcaaccacttaaaaaacaactttggcaacaaactaccaaacaaaaaattctaaatcaaggggtgctgttagaaaaacaaaggcaaggcaatgcccaaatgctttataatatggccaagcaggtgcgcagtggcgaccccgaaaactttgaaggaagggctgcggcttactattgggcaaatttatttggagtagaaaaaaattttattcgagatagggaagggctgcacccaaatagttggctgaactacggctatgcaattcttagggccaatgttgcccgtgcattggtaggtagtggcttgttgcctactttgggtattcaccaccgcaaccaatacaatgcttattgtctagccgatgatcttatggagccttatcgcccttatgtagaccaattggtatgcaggcttattgcccaatacccacaagcccaaggcgaactaagtacacagataaaacaagaactactgcaaattccagtattggatgtggagatagaaggaaacaaaagcccactgatggttgcgctgcaacataccacagctagcctaagcaagtgctacgaaggcaaagaaaagaagataaaatacccgcaaatgaatttataaaacatggcaaaatatggctatccaagacagactaaatgcataccgtattatgtgggtattggttttttttgatttgcccaccgaaactaagcaagagcgcaaacgctatgcaaaatttcgaaaagatttattggccgatgggtttactatgtttcagtttagcatatacctgcgccactgcccaagcaaagaaaatgcagaagtgcatattcggcgtgtaaaaagggcactaccagaacacggccatattggtattttgaatattacagacaagcaatttggggatatggaaatgttttatggaaaaaaacctgtagtagaaaaacaaacaggtgtgcaacaattgcaaatgttttagatacaacttcttgctaaacttttagattttcttaaacctgggagcttgaaaaaaatggggatttaggatataaacccccatgttctaaaaccattttttttgttcttggaaaatacgccaaactcttagcgttgcaatggctttgtagagggtatattgtttaagaactctacaaag

SEQ ID NO: 2619 - DNA, 16867 bp, synthetic construct
  variation 1918..1919: note = n is a, c, g, or t
  variation 7995..8002: note = n is a, c, g, or t
  variation 7348..7374: note = n is a, c, g, or t
  variation 4717..4718: note = n is a, c, g, or t
  variation 8717..8791: note = n is a, c, g, or t
  misc_feature 1..16867: note = Synthetic
  source 1..16867: mol_type = other DNA
agctttaacccttagggctcttcatcaccctctacgcaagaaattgcttgagttgattgaagccaaaggaaaagttactgtaaccgagctttatgcaaaattaaagatcgagcaatcagtagcctctcagcatcttgcaattttaagaagggcccaggttgttaacacacaacgtgacggcaagaaaatcttctattcagtaaacggcaaacgtatagctgaaatagttgaacttgctaaagacttagcacaagaaagcgaatactagtatttattcgccattcccaatttttaacaacagagaacccgcctaacagcgggttttttgttttatatcaaaaccttcaaattaattgttgcaacatataatttagatctccccggaaaatagcccggcagcctgacttaatggacaacttctctgtaaaaaaaagaacaggaaacacccaataccatttcagggttcgaatttatcgaagacatatatggaagccgggccttatccccaggcttattttacaaactattatttttcgggtttatgagattataacccgttcaacaagattacttccgaatgagtacggcagaaaggcaagagaagaaattggttttgtgataaatacattcgcctttttacccttggtaatagaacccagctgctgctcaatacccatggcgtaagccgagtttagggtggcggcgttcaccgcttcttcaggcaacattttcattttaatgcacgacagcgccaccacaaaaggcatattacccgatggagaagagccaggattaaagtctgttgcaattgccagcggcaggcctgcgtcaattatttttcgcgccggggcataatgcaggcccaggtaaaaagcggtggagggaagcagtgtgggcatagttacggagttgcggagcacttctatctgctcatcgccggtaaactccaggtggtctactgaaagcgcgtggttttttacgcctacctcaataccgccgctgtaatctaattcattggcgtgtattttgggttgaagcccatacttagccccggcctgcaaaatgcgatcggtttcattgggagagaaaaaaccccggtcacaaaacacatctataaaatcggccaggccctcatcagcaatttggggtaacaggcggttgattaataagtcaagatagccctcgtggttttgtttaaactccgttgggaaagcatgcgcgcctaaaaagttgctttttatggtaagttttgaattttctttcagccgcttaattacacgcagcatctttaactcgccctcatagcttaatccgtagccacttttaatttcaaccgctccggtgccggatttttccatctcctgcagccgcaggtacgcagcatcaaacaattcctgttccgttgcgcctgccagccgtaatgccgaattaaggatacccccgccgcgtttggcaatttcctcatagctcaatccgtgtatcttatctacaaactcctgctcgcgcgagcctgcataaacaatatgggtatgtgaatcgcaccagcagggaaacacgaatttgtccgccgcatctattatttcaccggcacgctccggtgcatcggcgctggcgccaaaagattttatcaagccgttatctatcaacaaataagcatcatcaatagcaggcagggttttcatttcagcgccttttaccatgcgcaggccagcctcgcgtactcctgctaatgactttatgtttcgaataaggatggatgccattttgaattagttaccgcgcaaatatgtgaaaaattatttcgcacggaggcacggagttaacaggggtgcaaaccaaattgtcgttgtctggcaggaattccggttggcggggacgccaaaccgggtgccctcgtggttggcgtccccgccaaccnnaacgacaatttggtttgcacccgttaacagccggaaaatacggttaaaatttacacattggcttaaatcataattaagagttcataccactttattgcatttaaggtattttggaatttctttttattattctccatgccgccgtgcgaaataattggatgttaaaggagtcatttcactataaaaagccgattttagcaattcaacatctagtattcaatatggcaggtaatagttttggagagatttttcggattacaacctttggcgaaagccatggtaaagccattggtgtagtgattgacggatgcccaagtggcttagctttggatttggagcagatacagcatgagcttgacagaagaaagcccggacaatcggctataacaacccagcgcaaggaatcggatacctttgaaatcctctcaggcgtgtttgaaggaaaaaccttaggcagccctgttgcagttattattaaaaacgaagaccagaaatctgacgactacagccacctgaaagaagcataccgcccatcgcatgccgattttacttacgaaattaaatatggcacccgcgattaccggggcggaggcagggctagtgcccgcgaaaccgccgcaagggtaattgcaggggctattgccaaacagtttattcaacattcaggcattcaaatttcggcttatgtttcggccgtaggcaaaataaagcttgaaaaaacctatgctcaattgaaccttggcaaaacagacagcaatatagtgcgctgccccgatgaagccgtagccgacaggatgatagaactgatacaggatacccgcgccaaaggcgacacggttggcggggttattacctgcgtaataaaaggctgccctgtgggactgggagaacccgtttttgataagctacatgcggagttgggcaaggccatgctttctattaacgccgttcatggatttgaatatggcagcggctttgcaggcatcgaaaattacggcagcgaaaacaacgatgctttcttttctacacctgacaaccggattgaaacaaaaaccaatttctcgggcggcatacaaggcggcatcagtaatggcatggatatctatttcaatgttgcatttaagcctgttgccacaattatgcaatcgcaaacttcagttgataaggaaggacatgaggtagaactaaaaggtaaagggcggcacgacccctgtgttgttccacgtgcagtgcctattgttgaagctatggccgccctggttattgctgaccacctgctaaggcatcggactactcaactgtaacaattcccttacgtattacccaggcctctaccttctcccagttcaataaagtaaggtcgaggatgagcaactccatagagaggatgcccattacaaaaagattggccactacaaacaaaatggcaaaccaaaataaaaaacggtcgaactttttagtaaaaaaaccgatggcaaaggaaagttgtaataccacattagccaaaaggagtgcatgcgaaaaattggtatgggaaattaaaaattgggcgatgtgggctttataaccatcagggttttgcaacagcaaattaatttgttgctgctttaaaatgttcgacagctggtcgtgataaaaagccgaaccccgtaaaatcttccacaaggcggctgaagaaaagatatagaggaaataataacgcacggcctcccagctaaaattgaagcgttgttcgcttttaaaccaaaacggaatactgattatcagcaaaccaacaaagccgtggtaatgatggcccgttaccaggttgtaagtaagaaaataattaagtgctgccaaagtgaacagcaccgcaaatatcctgttacggctaagcaaaaatcccaccgttgtaaccaataatgaaatatcgaaaaccgatgaaagaaaagaatgagcggttataaattgtggaataccggttgctaaatacaattggtaaatcaactcagtatccttgaaaataaaaggagggccctgcatctgggccagcatggcattgcttatcaggtgataaaagcagatatacatagccacgccatagacaaaatatgcctttatctgaaactcccgctcaaagcttttatttgccaacataagaatacaccagttccttctttaaaacctttatctgcccggcagaatcgtaattacaacttagtttaaaaacatccattttactgtcgctggtcatgcgcatatccatgcaataattcatcaaccagtttttaaacctgcttacttcttgggcgctcaactttccctcctccatcaaaggcacagcattccctaatgttgatgtaatcaattcgcgctgcgaatcgcgcagtttggaatattttatttcggtatcgtcaactttgatggtgtaggcgatataggtatcctgtggtttctcttttaaagaatacatgccatagagaaaaaagggaaattcttcgcgctgctttaaaacatggtaaaataccccggccatgtatattgctataacggcaaacaacagcttgtctttttgaaacagccggaacagaaaggtatttttaaaaaattccatttttaaattaatacaaggttaaccacaaaggcactaaggtcacaaagaaatactaagaaatacaattggaaatacatttttaccgcaaagaagcaaagagcgcaaagaaattcagtttaataaaaaaataccgcataacctttcaaataattcttagtgctgcttagtgctcttcaaacctgtttaaaattaaatccaaatgcannagagtatatttttggtgtgctttgtgttaacctgtatttcctttcttcaatttaaaacagcttcttagtgccttggtggtaaatttctctacaacaccatcagattacatcctcttatctctgcgttatccatcctgcccagaatttcaaagctgccgttttcattcacctttgcaatatcgttagttgcaatgaacgagcaagacaaaacattggccaggtcaataatatttactgcaccagccttgccgggttcctgcagtttaagggggtcgtacacatcgcgggtaattattttcatccagggcaccgactcaaaaataccctctccttttgaataagcctggcttaaaagctctgtcattccatattccgagtggattttagaaaccccaaaggctgcgcacaatttttcgtgcacttcttcacgcgtcagctcttcgcgcttgcctttcatgccaccggtttccataattatcagttcgggaaaatgggtattaaacaactcagcaaaatcaagcagggcaaaggttacgcccagcaaaatcaccttctctcctcttgctttcaaatccagcaaaatgccccgcagcttctcaaattcattcaaaaaaaagccgctttccttttttcctgaaagacgaatcagcttatcagccatatataccaatgaagaatttccccgttcaaggtaagaaggcaatagggctaaaatggtataatcttcaggtttgccataaaatgcatcaaagccttttaaaaagcttcgttcgtaaataccggtatcggccacataatgccgggaaggtgtgcttccggtggtgccgctgctttcaaaaacctttacagcttctgctccttgttttattacccggtaacttttaaaaaattcgattggcagaaaggggatatcagttaattgcgtaacggagtttggggttcttttcaacgactggcaaaacaggcggtatatttctacctctttaaactgaaatctgaacacttcaagggcagtttcttcaaaatccggttcgcttacggaaaatattttatcaataagtggtaacaagcttaactaaaattaggccgcaaaaatgcaataaataaggcaaatttcagtttctttgaatctatgcgcaaagcagcttttgtatatactatacttgcctttaccctttattcgtgtataaagccgcctacgtattccattattccggcaattgcctttgtgtcggtgtcatcctctaatattaccagtgggtttgctgatactattactttttcttttaccgatggggatggcgacattggcgttagtgccagtgacaccaataccagcgactctgtttgctgcggtattcaacatggagattcttcctgtttgcatttgccgcagtttgatgtttttcttattgacggcagagatttatgtattgaagcatttgcctccgccaatgttcaacctgccggtaaatacaaggctatatcaggaacaattgaagttattgccgaggcgtataatacaaaatgtttcggcggttgcccctgcgcggtaaacgatacggtaacttatgccattatactcagggatatggcagggcatttgagtaatacaatacacactacgcctattgcaataaactgcaattagcctcacccctttgtctgtcggcatctctccatcagaaagctaatggttcggctacgctcaccatgacagcgcaaagcaatctgacagagagggaagaaccatattgcatctgatcactgttatttataaagtaaggcaataattacctgtaaggacttctgttctttaccctctgcaccttccctctgcgaaaaactatgctttacccaaattttttgagaatcataaattatggcctttcaaaactatgagaaacaatcaaacggggagggtttgtatttaaatataagcagatgtgattgcgaagccttttccaataaaaaaacagaagagaaaaggctgcggccctgcctgccggcaggcagggccgcggttaatattttttttattttttacgggtgccgatagctatcggcataaccttgcaatgacatctgttttattttaatacatctgccgtattaggtaaggacaatattcaaaactaaaattccagctaatttacctgtaactacttctgtttttcacccaattgcttctgctggctttggtggcaactgctgcttttgcagtaactgattcggttttgttttcgaaaatgtgggcgcctatcagtgcggcaatttccatttcgtcttccttttcggctttcaggtattcgggcttaaagtgtttggctacaaaatgggtatcgaacttacccgaaacaaaatcggggtgcagtaatacaaacctgccaaaggccagggtattttttacgccttcaatacggtaatcgtctatggcccttattaagcggtctatggcttcggtacggtctttgccgtaggcaatcagtttggcaagcatggggtcgtaatagatgggtatagccatgccttcttcgtagccgtcatcaacccgcacaccggggccttcgggctttttatattgaagcagtttgccaatgtcgggcaaaaaattgttcatggggtcctcnnnnnnnnnnnnnnnnnnnnnnnnnnntctaccgttccagccccaatgtatgcgcagcttttgcctaccttaacggcagcttcgccaatagccttgcgtttttcgggcgtcaggcaactgcttggcgcttcttccaccaccttctggtgacggcgctgaatggagcactcacgctcaaacagataaacgatattgccatagttatcgcccaatatctgcacttcaatgtgcttgggcgagcccacatacttttcaataaaaacactgccatcgccaaaggcatttatagcctcgctttgcgcccgttgaatctgctcttccagttcttcaggagcatttaccacgcgcatacctttaccaccaccaccggcagaggctttgataagaatgggataaccggttatttccgccagcctgcgggcttcatctatatttttaatagcgccttcgctgccgggcaccatgggtatatcaaattttttggcagcttctttggcggccagtttgctacccattacttctatggcttcgggggtggggcctataaaggttataccgttctcctctaccagtttggcaaaggctgcattctcacttaaaaacccatagccggggtgtatggcatcaacctccagcaacttagctacnnnnnnnnacagccactgtttttatacccatttcccgcgcactacgcataatgcgtaaagcaatttctccacggttggcaactaatattttgttcatcggcaatccatttgtttaggtaacatatcaaattattgcccgcagaccacaatcaaccccgaaagggtgagagaaaccctttcggggtgggcgcggcaatttatttaggcccagcaaacttgcgaaaaagatttttgattgtgggtattaaaagggcgtgccctgccgatagctatcggcagggccgggctatccgctgcaactccccgctcccaaagcgttgcggagtttatcccgccgctttgggcgggagggttttcgctactatcccgcacgcagagcagcctgaacagccaccccttccgtccccttcccgctcaaagctgcgggatgaaacaaaaggggataccagagcaaaacagccactccagcttgtcatggtgagcgtagccgaaccacctcacgcagagcagcctgaacagcctttgtctgaactgtgatttatgtgattataggattaaacgcatgattaaatacataacagccgcccccggctgctaaatactcccctccttttttcaactatgccttacccaaattttataatcatttgtattaaacccgaagggttgatattattatagaaacaacatgccatagtgaactcaaacgccggagggcaatgnnnnnnnnnnnnnnnnnnnnnnnnnnnnnnnnnnnnnnnnnnnnnnnnnnnnnnnnnnnnnnnnnnnnnnnnnnnaaaaatttgggtaaggcatagcttttttcaaggagagcctgtcccgcagttttgggcgggaggcagccctggggtggttgtatttttggctgttttgcattaagccctgaaagcggcataatataacagcaccgggtgaagcccggtggatttagtggttggttttatacaaccctgaaaggggcaatgttgtatgaagaaagaacaaaaaaatacaaatctgaaaccaattcacaaccttgaagaaaatttcgtaaatttgcatcgaggctaaataccagagaatgcgtttcggacgttggtggcagggtttgttaaatcagacgcatagtcacgctttggttgatgcctcatttttgtttatacatagtagcaaaggctattttcgaattgtttttagctcgccgcacaacctggcatactatataaagcgctcccattctctttttataattgaacgcatcctggtttaatttgtttttccctgcatattcaatagtatctggattttgaattatcagcgggattaatgaaaaatcggcaggtgtaatggctatttgcccacgttgcgcttcttcttttgctttgccatgacgatttatagcgtgtcgaacagcgtggctgtcaataacacacccacaccggttaaatcaacctgaataaattgcttcagtatttttgcctgctttcgggacaaaaccgaaaacgaaaattcaatatgctggttgtgccccgcagttagggctatgttaaccaactcccgtataccttgcttgttcatattcttgtcgctaataaagctgcaagttagagcatctactgtctctttaatattttataaagcaaaatacccacttatagcgatatgtaatttcaatatttattctataccttgctgagggagcggcgtaatataacagcaccgggtgaagcccggtggatttagtggttggttttatacagccctgaaagggcgtaagacgggatttgattgagcaacgctataaaaacgttatgctaaatgggaaggataaaaactcacggttttccgttataggaaattcaaatatttattctataccttgttgagggaaataaaaaaagcgacacgaaataaatcgcgccgccttaaatgttttcacaacggaataatccttattgtgaattggtattagattgtatgctgtaaaagtaaaaaaaaatacgaacatgggaaaaattttagggttggacttagggacaaattcaattggttgggcattggtagaaattgaccacgaaaataaaatggttaaaatacttggattgggttcaagaattttatcaatggatgcgggagaaataagcacattcgaaagtggtgggaagttgaaaagtgcagcttctcaaaaaaccactgataaaacagcaagaaaacttcacgaacgttttttactgagaagagatagattgcattgtgtcttaaatctcttaaaaacattgccaacacattatcaagtttcaattgattttgaaaacgaaaaaggatatagaagcggtaagtttaagaaaggaacggaggtaaaactggcttatgccacggatacaaatgggaaacccaggtttctgtttatggattcttataacgagatggcaaaggagtttaaagcgaagaatccgttgcttttttacaaaaaacgaaatggaaaagaaactaaaatcccatatgattggactttatattatttacggaagaaagctttaaagcaagagatatcaaaagaagaacttgcctggattactttaagctttaatcaaaaaaggggatacgaaaaaacaattggtcaggatgaaaaagaacagaaagatggggaattatcagaaacatttgttggcatagtaaggtctgtaaccgaagttggagagaaagatgggctgaaactttttgaaatagtattaatcgatgaaaagaatgaaactgaattgtacagatataatgaagaaagcttgtttcaaataacaaataaaggtgatttaaaggaatttgaaatagtttcgaaatttgatgaggatggcaatatcaacgaaaaaaatacaatttatacagttaaagaaatcaggaaaataaaagttagtgatgtaaaatatacggacgagaaaaagaatgaaaattttgtttttgaaatttacttgcaaacggggtggataaaaaaaaatcagcaaagcaaatatcttcctaaatggaaagatactgaacgcgactttattattaaaactaactataacaaggatggtgacagaatattaaaaggaactgatgaaggaaggaatataaatgctccgaaagaagaagattggacattattgaagttaaagacagaaacagaactcacttctttcaatacaaaaaatagaaccgttggtattgcctcgtttgtttacaatgccttgcttgaaaagccccaacaaaaaataaaaggcgatttaattacagtaattgaacgtaaatattacagggatgaattagaaagtatatttgaatgtcaaaggcaatttcatccggaattggaagaccctgaactttacaaaagagctattaatctcttatatcctcacaatgaaaaccataagcggaaattggaaggctttttatcaaagcagccattttcgaaattactaacggatgatgtcattctttatcaaagagatttaaaatctaagaaatcgctaattgcagattgcgtttatgaaaaagagaactataaaaggattgataaaaaaacggggcaagaataccatcaacctttaaaagcaatacacaaggctaacccactgtatcaggaatttagaatttggcagtttatcaaacgattaaaaatcattcagcatgaggaagtagaaaacgatgagatactgctaaatcaggataaatcagttcttctacttaccaatgagataaaagaaaagctgtttgaatttttaaataatagggaacatatcactcaatcagttttgttgaagcatttaggcctttcagataaagaatataaatggaactacgaatcagatcataaagaaccatgtaatgaaacccgttataattttattcttaggcttaaacgaataaaaggctttaactggaaagcatttttatccccggaaaacgaatatcaactttggcacttcttctactctgttaaaaagcaggatgaatttaagactgggataaatacactatttgaaaaactgttggttaaaagcaacatttcacttgaactcaaagctgatatagtaaagaacttcatcagtttcggtggatataataatgactacggcacttattcagaaaaagcattaaaaaaaatattgccttttttacgcataggtaaatattgggaagaatcaaaggataaagcaatctccattttaggcaagattgaacattcggtaaaagtaaaagtattaaccaaagaaaacattcagggagagattatcgattttcaaggattatggatttcaagtgcctgctatctggtttataacagatattcagaggttggcgatgtaaaatattggacgaccccttatgatatagaacgttatttacagaatgagttcaaacaacattcacttaataacccggttgtagaaaaagtattaatagaaaccttgcaattggtaaaagatatttggaaaactttcgctgaacaagaaggaaaagataagaatggaaacgttgtttacaaaaaattgttcgacagaatcaacatcgaacttggcagagaaatgaaaaaaaatgccaaagaacgaaaaagagaatcagaccaaaataatgaaaacaaaaaaacaaacgaaagaatcattgaattgttgaaggaattaaaaagagaaaataacgatgtgcggcccctatcgcctttccaacaagaaaaactaaaaatattggaagatgatcttttgtcgtctgttgaatatgataaagatgctactgtctataaattcagcaataatcaatatgcaattaccaaaaaggaaatcaaagatattacaactaaagatatagctaaagtatcgaaaagtgattttgagcgatataagctttggttagaccaacgttatcaatcgccctataccggtaaggtaatcaagctttcagatttgtttaacagggagaagtatgaaatagagcatgtcttcccccaggagagaataacattaaacgctttttacaataaagtgatttgtgaaacggaagttaataaagccaaaaaggcttttactggctatcaattcattctaaattctcaaggaacaagaaaaattaaatgttccgcacatggcaatgaagaagttacaatattatcgcctgaagcttatcaaaaattagtaaaagataattttacagacaagaaaaaacaagaaatactattaagtaaagatattccagatgaatttaccagcagccagttaaataacgcgcggtacatttctaaaatggcgatgaagctattgagtaacattgtacgagaagaggatgaagacagttttcgctcgaagaatgtattgccaataaatggtgtaattaccactaagctaaaacaagactggcaactaaacgatgcctggaacgaattaatacaaccacgatttaagaggttaaacgaaataacaaaatcaaatctttttggcgattacgaaaagataaacggacacgaagtttttattaacagggtgccggaagaattaaataatgattttgataaaaagagaattgaccaccgacatcatgcaatggatgcgttagtaattgcattggcaaccgaaagtcatgtaaactatttaaacaacatttctgcacaaaattcaaaagacaaaaagtttaaagaaaggtttgacataaaagaaaaatttatgacaagcaaaaagaatgatgcaggtgataaatcccgattctttttaccgccagcccaatttaagcaagagggaaaagttgtagaatacagctatggatttacagataataatagcaacgtgtttaaggagattgtgttagaagcattacaaaatacaattgtaagctttaaacagacaagtagagttataaagcagcgaacgaacaaatatcagaaatggaatgaagaaaagggcaagtttgaattgatttcacaggaaaatttgaataaaaaagaaaaatataatatacgcctgaccctacataaagcaacctattacggcaaggtaaaactaaagcaaaaaaccagcaatgttttattaattgatgctataggtcaagttgacagtattgtagataataacttaaaagagcatattattaacctaaaagaacagaaatttcaaagccatgaaatacgaaaccaattggaaaaaaaccacccgaaggtagaagtatttgatgattatgtggctacaaggtatgaaaacacattggcgagtttaggggtaattgcatccgataaaattattacatttattgaatccattactgatataggaattcaaaaaatattattgaagcatcttgcaggttataactcagtagaaaagagtataaaagaagctatccaatatgttgatataatcgccaatgaggagcatcaaaaagtcataaaagcattacttgaaaaaaattttccttttgaagaaatagaaattgataataaatcaatttcgaaaacggaagtgtttactaagggcatagaattatccattgacgaaggcaagaatctaattctcaatcctcaattcgcgttttcctttgaaggcattaatgaattaaataaaaatataaaagcgttaaatggcggtaaagaacacaaacccatttataaagtaagaatgtttactcctttaggaaaaaaatttccggtatcagaagataaagaaaagggtaacaaatacgtgataaccgctgctgatagtaatatattttgtggtttctatacaaatgagatgggagaaagagaattctttgtgccaacgttaagagaaacagcagaaaatctaaaacaagggagtaacccctgcccggaaattatttttaaggataacgctaaatatgagttgctatttattctttctccgaatgacttggtttatttgcccacaaaagatgaaatacaaactccgtcaattgtaaactatcaaaaactaaacaaggaacagaaaaatagaatctataaatttacggacggcaatagccaaggggtaatgaattttgctccttactgtgttgcaacacccttaatagatgttagtaaagccgattataaaaagctgcagcttggcaaattaatatttacagaagtttcgaaatcaggaaaagattcaaagacaaaggaacttgtaaatgaaattggattagggagtactcaatccaagaatcaaaactcattagacagtgaacaaattaaatcaatttgttggaagttaaaagttgaccgtctcggcaacatcaagcttgcaactcaaattgaagtgcatgaaaataaaacgccaggccatccagcaaaaatgatgcagaaaggcgatatagaacctgcaaatgaacattaataattatgatcaaacgcaccctctttttcagcaaccccgcccacctgtataaaaggaatgagcagctatgcattagcatgaacaaggctaccgaaactgaggacgaaaccaaagtagtaaccatacccattgaggatattggcgtagtggtgctggataacaagcaaattaccctgagccacgcgcttattgatgccctgctgcaaaacaacgccgcactaattacctgcgatgataaacacatgccatcggggcttatgtttcctttggatatgcacaatacacaagctgaaaaattcagggcgcagttagatgccagcgagcctttaaaaaaacaactctggcaacaaacgataagttcaaagttgggcaaccaaggcaggctgcttaaaaagatgtcgctaaatccatacaccaaagtacggcaaaaacaactagccgaagcatctgattatttaatgagctttagtaaagatgtaaaaagcggcgatggtgataaccatgaggcacgtggtgcagccatttactggcaaaacatctttccacccgaaatgaattttagaagagaatatcccggccccagcggagagccgcctaataatttattaaactatggttatgccattttgcgcgcggtagttgcccgcggtttagtaggttctggcgccctacccaccttaggcatcttccaccgtaacaaatacaacgccttcagcctggctgatgatattatggagccttaccgtccttatgtagaccagatagtatggaaaataatgtgcagtggcgaagactggaaggaacttacaccttccatcaaaaaatattttctcgaaataccagccatagatataattatagatagtgagcaaagccctttaatggttggtttacaacgtaccacatcgggtttaatgaaatgctttgaaggcgaggcgaaaaagatgatatatcctgaattggtttgaggaggagtattgagtataaagtattaagtattaagacatgaggggtggcccgcatttttaaagtggacggctgttatctaaatactttatactcaatacttgataccaaaaatacccaatactaacagccatggctacccggctcaatgaatatcgcattatgtggatactcgtatttttcgaccttcctaccgaaaccaagaaagaccggaaaaactacacccagttccgcgataaaatgatggatgatggttttaccatgttccagttcagcatttacgtacgccactgcgccagccgcgaaaacatggaagtgcatataaagcgcataaaaagcattttaccacccaaaggcaaagtaggcataatgagcataaccgataaacaatttggcatgatggaactcttcgacagccaaaaagaagaactgcacaaaaatataccccaacaactggagatgttttagtggctgttaaaaataaaacagatgtcattgcgaagtcttttcccgtaaaaaaataaaagataaaaggctgtggcaatcttccgttgtgtc

SEQ ID NO: 2620 - DNA, 20361 bp, synthetic construct
  source 1..20361: mol_type = other DNA
  misc_feature 1..20361: note = Synthetic
cacatattgtatgccgtccatgtcgcggaatttccctttcagagtcagaaaattgctccagtttttgccggtcaggtgtgctgtcagtgcagcttcccatatatggtcgttgaccgaagcgtctttcttgggcacggtgggattgcggtcaaagttctcgacacggcgcgagtagtccacgctcgcgagcaggttgaagccctttgcacgatagttgtactgaagacctccgccgagtttcgtgccgtgatagtcgaggcgttcaccgtcgcctatctgctcggtagccactccgagaccgtacagtatatagtaggtctgtgccacggtaacgttgacgtttgacatgcgtgagtcctccttgagcgcgcagaactggaagtcggcgccgatactgttgcggtcgtcaatcttgtagactacaccgggattgatgtcgagctggaagtagcgggtgtcgacgcgcgggtcgagctgcttggcggcaagcgaggccttgtatacaccctctacacctatggcgaggcggtcccagtagaatggggtgcctacgcggaatttcatgtcatagtactggttgcgccagttgctcaggtgagtatcggccatgaagtagggcatgccgcggtaagggtcggtgatcgatgcgttaaacgacgcgtcgttgatgttgcgctgctcgaagttgaattcgccccatgcgtaggcgctgttgaggttgaggaagccttcgcaacctaccataatgctcttctcgtcggctccctgctgcggacggtggaaatctccctttgtcatgccgtagcctatgttgacgagcgaatagttctgcaggttatcgagagccgctccggctgcgtttgacgagtgaaaccacagtttctgttctttcagcaactcaagcgaggccgaagtgtagccttgtgccgatacatgtgccgaagtcgcgcctataagtatagcgagcgcgcccgctttatatatgaagttactcattttattcagtgatttaaaccaagttgtttatttgagagtgtgattccatgccggcattttggagtggcggtgaagcaccggagtgacacctacttcaaaatcgtcggtagtgttgttgctgtcctgatagagtatggcgccgttggctccgtgtccgtcaccgtcgagcttacgggtaatggactggcttaggtaagcgcctcctattgatgcgaatccggcgtcgagtacggcaggtatgtttttggcgtcgacgtacgatgcgttgcgtatgcactctacggcgtctaccacatatgtcacggggactttggccgatatgccggcccaagaattggctgcatttgtggcctgaagcgacttgtcgttgacgggatcccaagtatcgccttctggaatacggaatataacgtaaccggtaccgaataccgatgtcaggtattgcatgcccgacatggtggagttgccgtcatagaatacgtgaagcatgtcttccgccggttggtcgggatagttgacgttgttcatgttgaactcaaactccgcgcttgagcagtcgacgggcgatgtcgggttatatatctccagtttgtggttggcggcaaactgtgctatgacacacgattcgccgggctgcagcggatagtcggtgccgttgccgggtactttccagacgcgctctacgtatatgtacttgtcgccgtcttcgcttggccataccggacgtaccttgtcaaagtcgattgtctcaagattggcaaaatggagtccgtcaagatactgaacctcggtagtgttgttggctatctcataaaactggtcgcggaagtaggagaacgcgtttaccggcttcgagccgcagtaatatatctccgagaatacgagattgccttttaccgagccttttatatcaatagttatcggtgcactgtcgataagcgatttgttcacgatattgcctgctacgataaactcctgaccgtcggcgtcatatccgtgccccgagacaagtatggtgtagatgccgggtactatattctcgactttcgtcgtggctccggtgaagttttgttcgtaatgcagtccttcaatatagttatccatcttgacggtcatgtcgccgaatgttatgccgtcagctctaccgccggtctcgataagtgaattaagatcgatgtctatggtaagtccggctactgtcggcgagtcagacgcttcgttgaactgcccgcaggctgcaagcgtcaatgtcagaaatgctgatgttatatattttataatcttcatgattcaatagtgttaaagagtcaatgcaagttcgatgccgaagtagaatcggttgttgagcaggacgaatgagccgggatttcgcttcgattcacgtcgcggatagctgcggaacatgttgttggcgaagaacgacacgcgcatcatgtcgccgatctctttggtaacgttgatgttgaagcagaagtaggggctgtagctctctttaatctccatagggtggagtgtattttttaagagatggttaagctctgcatctttaacatcctgaatggtgttgaagcgcccttcttcaaaaaatgtcggtttggcatccttcagtgagatatatccgataggaattgagtcgttgccgtattttccccagtcggcatctttccataccgtctgtgcggtcagggttactacaaaaccgatactcggaaggttgtgagtgacgcgcaatgctgttgagaacctctcgctgtatgagtcaagggttccgggtgcatatatggcgacgtcggtgcgtttggctgccgttttgtcgttgttcggttcatagaaagtgtaagcaccgttgttacttttgttgcgtatatatgagccgttcaaagagatacttgtattgattttttcgatacgtccgaaattgaagtcaaattcgatacctttggatatatagctcatgcagttatcgggagtataccatgacgataataccgaattgcttgatgcaagttcgagctttccgtcgctgttgcgtttgtattcattccacataaacggcatgaacgtatcaaatgtcttgttgagtgaatatccgtttttgagccgttcacggaatgcggttacagagaatgtcatctgaccgagtttcatatcgataccggcttccgccttacggttggtagctattttcaaattacggtttgacgcgtcgtatactttggttgtggttatgaacagctgttcatcttcaggtatttttgaactgcctatctcatcgagatttttgtattcgaaatatgcctgttcggggtgtaggtaaagcagcgtcggcattttggctgtcacaccatagcctccgcgtatccacaacttatttgggataagttcaaacgatccgttgaaacggggcgatactatgccgcctactttcgatgcatggtcgtagcgaaccccggcttgaagtcgcaattcacgaagcccgagctgccatgagaagttttcttcggcaaatacaccgacttgatttataaaaggtatgtcgctgtaatcgcgcggacggaaagaaccgttggccgatgtaacctcacgctgtggcggtgcggtggggtcaaatgttttgccatgacctacattgccgtcggtgcggaagtcggctccgaagagtatgcggttgttgatcattccggtctgtttgaacagtgttcccactagtttggcaaatacgtttacttcacgcgagtcgatgtcgtagcgtgcgaagtagttggccggcaacttgtaggtatatttgtctctgtcgatgtctccgaagtctgtgattttgttgccgtcggcatcaaatatgtcttgtccggcaaaattggacaagattgtgccgtcggttgttgtcattgaataaggagtgttgtttgaagtcatcattgactggtaaaatgactgttttgaggtatatgtccccgataccacatagcgcagtgactttaaccagcctttattgatgtcccaagttccgttggtgtttagtgtaaatccatactcttcgctgcgtgaggctcgcttgtagtcttcgtcatcagggttgagtgagcgtgaatcgttgccgtaatggaagttgaatgaagtattgctacgcaaatgtttccaaagctcctttgaatacattactctggctgacagacgttgatatgttctgtatgactctatcgggtcattggtgttgtgggtgtaatcggcatttacgttaagagctcctcgattttcgccaagtagaaaacctgtaccgatcgagcccatgtatactttgggattggctttagctgtgatgcgtagcggctcgcggccggctttggtgttgattataatcgcgccggaggtcaggtcgccgtgctctactgaaggtatgcctcgtataacttcgattgattctatgttgtcagtagatattgagcgcaggtcgctgccactcataggattggagccaccaccgacaagcgaagtggaattagcggcgtttgtaccttgtatggttgggtttagagtctgtaggttggcattgttagataccggggctccatcccttattatagcggtaccgagtgagttcatattgcctgaccctcgtatgttggcggtttttgccgcgctaaggttgggctcggtagtaagtccgccgggaagcaatgacattacgtcgttgaggctggtggcctgcatgtggtccatggctgtgcgtccgatgattgacgaggtcgattggccggcctgcgatgcttgtgccgttacggtcacctccttgatgcggaagttctcgttctcaagggtgaagtcgaggacggtgttggccgtcaggttgacagtctgttctacgggaagtttacctacataggtgattgtgagtcgggtcttgcctttgggaacaccgctgaactcatagtatcctcctatgcgtgacgcggtggacatgccgtagtcgggcagtgctatgaccgcatactctaatggtacggagtcggaattctctctttcgaagatcgttcccgacagcttcaccgtgttgtggtgggcgtgctggtgttgcgctgtcactgtcaacacggaaaaagcgattgcaattagtaatgaaaacagctttttcatacgttaatgaaatgtgaatggttgataaattttaacaaattgttgtggtttggcaacatttgctgacaaaatattaagttttatgccgtaaagatataataaatgttttaatacttattaactatccccccctattttagcgttttttaacgcgaaagggcataattaacttaatacatataccatatacttgaaatccataattatttgccgttttgttgcaccaaacaattgatatgcaaaattaggaattaacggcagcgaagacaatcgcataaattgagtaaaatacaagcgtaaacagtgtgttttctaataaggattaggtaattcatagtgcacaattcataattcataattctcaatgcacttgaactatgcactatgaattatgaattgtgaactaagcattatgcactaagcactatgcattatgaactatgaattggtaaaggttacttaacgcggtcaggattttttgctataaattctttccacgaacgtggacctttggctatgtcgggcttggccgactcgtagaagtgacatagggcggctccgagggcgtcggtggcgtcaagttccggcaacagattctctcgaggtatgttgagtatgcggcgcagcatttcctgcacctgctccttggcggcggctccgttgcctgttatcgccatctttattttacgcggttcgtattcggttatcgatatgtcgcggcttatggcagccgccatggctacaccctgcgcgcgtccgagtttgagcatggactgcacgttcttgccgaagaaaggtgcttcgatagccatctcgtcgggaaggtattgctccaatatgccggtgacgcgcttgaagatatggccgagccgcaggtaatgcgactcaaatttgttcagttttatgacacccatggctatcatggacggcttgccgcgcttcactccgagcacaccgtagcccatgacattggtgccgggatcgatgccgatgattattcgttcccagtcacgcagcgattcattgcggaaggcgctcacagagccacctcctccatgacggtagtgaaatacatgactttgtcagcccacatagaggccatcttggtcaacttgacgggttgctgacattcaagccactgctcggtggcctgcactgaagcgcttttaaactgtacggcatagcccgtccctccctccatgtcggcaagtatgcgcatgaaaagaggggcggatagtccgcagtccatagtggcgtagggtatatacgtgctcaatatccactccttgaagtcgcattcaacttcgggcgccacatgaaaagtagtgtttatgatcattccaagttgcccgatacggcggcaaataccattaagcctatataaagtatgcctacaacgaagcctgatatggctccgattatggtccagcgtttggcgtttgccgacgatttttcggcttcctcatagcgtccggcactccactggctgttgacattggcggcgtttatgatgccgactataccgaagggcaggcagcacaataaggtgacgaggatcgactcgacgagccagcttttgggaggagccatatagctctgttgcggttgttgaagcggttgctgatagggttgctgctgataaggctgctggtagggagggggaggaggacatcccggtgtcgtattttcgttaggcaactgggggatggccgcttcgcggtatgcgtcggcttgggcggtagccggggctgcaagagcttcttttatctcaaagacgctgtcggcgcgaacccatgtttcgtaaccttcggcccatacgagatccgatcctttaagtccgcgggccacgagctggcttatctcaaaggggcctacgggcttttcgttttctgctacgtaaaatttcataatgtaaggtattgtttaatttgtataaatgtcattttcgggagggttgccggtcgagccggtccaatgcggagcgctcacggcgacgctgtctgatgaagcggggtataaaagcgacatggcgagctatcgtaggcatccagccgtagtagtagcccatgatgcgcatgcgttccataagcgatgcacggcggttggctgtggtggtgccctcgttaaggtagtcgatgatggtgtcgggtatgtatacgttgcggcgcgagcgctgcagacatctgatacaccactcgtagtcggccgagtagcggtatttcaggtcataatgctgtgcgagcttgcggttgacgataaacgcctgatgacacacgaccatgccttcggcaaaactgttgagcgtaagccgctcgggtgcggtgaggtggcgcggagctataaagcgccgttcattgtccacaaggtcggtctgtccgtatacaatgccgggaaagtcattgtccatcaccgcttttgctattttatcgagagtgtcggcgctgtgaaacgtgtcgccggcgttaaggaatatcagatattcgccggtggcaatgtctatcgccttattcatggcgtcgtatatgccggagtccttgcttgagaatatcttggcttgcggtatgccggcgtctatggcaagtttgagtgtcttgtcttttgacacaccgtccataacgatgtattcatacaggtcaaacgtctgctcccgcacgcttgcaagcgtcgggggcaatgtcgactcggcattgtacgttacggttattatggaaaacaacggagacattacggcataaacgatagatgttcttaatgcaaatatacatacaattcaactaaaaaaccaaagaccgtgcaaattttagcgaaatattttacacatataaattaatacagtttgaatttgcataaataataatgcttgcatatatttgcaaatgcaggaggtacttctccgcgcagaccataaaaacgcaaaagccattaaaaaagaaagagggctttaggcccccgttctaaatgttttcacaacggaataatccttattgtgatttgcttacttttatggtgcaaatataagggttaaaataaaaacttgcaaattttttcatatggaaaaagcaataaaaaatactacaagagttattttgggattggatctcggggtcggatcgatcggttggtctcttattgaagtcgatgaagccggtaagcctttacgtattatagatatgggtgtacggtgcgtaccattgactacagaccagtctgacggctttgtcaagggcaacggcaaaagtgtgaatcaaggacgtaccgagtgccgcactgcccgtaaaggttatgaccgttatcagttgcggcgcgccgatttaaacgaggctattaccgaattgggtatggcctatggtgccgaattagtggcactgccgcccttgacgctgtggaaactgcgggctgattccgcaactacggggtgtcgtatggctttgccggaaattggccgtgtgttgatgcacattaatcagaagcgcggatataaacatgccaagtcggatttgggcgataagaaacagactgaatatgtggcgtcggtgaataaacgctataaagagatacaggatgccggattgactgtcggtcaggctatatacgctcgccttaaagaatcggctgtaaccggcgaaaacggtaaagtgcagtgtacttaccgggccaaaggcgaggtatttccgcgtgcggcatacgaagcggagtttgatgcggtaatgacggcgcagcagccgttttatcccgacatattgaccgatgaagtgatagagcgtctgcgtaatatcatcttttatcagcgaccactcaagtcgtgcaagcatctggtgtcgatatgcgatttcgagaagcgtaaatatgtcaatgcacaaggcgctgtcgtgtatgacggaccgaaagtgactccgcgtacatctccgttggcgcaactgtgttctatctgggagtcggtaaacaatatcgtcctgaaaagtcggcgcaatacatcgaccggatcgctgtttgatacggcggcggagggccgatatgagctgtcgattgacgaaaaacgtgatattgtggcgtttatgaatacccatgaaaagttgaccttgaccgatctgttaaagatactcggattgagtaagaagcatggtttttcagcgggagagtcggtaggcaaaggccttaaaggcaacactacttactgccggttgaagaaagcgctcggaaattaccgtggagccgaagaccttttgcggtttgaggtacatgatgttgataccggcaaggttgatgaggagaccggcgaaataattgtcgagacgagcaatgaccttatggagcagccaatgtataagttgtggcacacggtctattcaattaacgataaagaggagcttcgcgccgcactttcgaagagattcggcattgatgacgatgaggtggtggagcgactgtatgccattgacttcaccaaagacggttttgccaataagtcggcgcgtttcatgcgcaggttgcttccttatcttgaacgcggtcttatgtacagcgaggcttgtaaatatattaatgtaaatcattccaatagtctgacttcagaggaaaatctgaagcgcgagcttaaaagccgacttgaagcgctgaagaaaaacgagctgcgtcagcctgtagtcgaaaagatattgaatcagatgataaatctggtcaatgccgtatttgataaatatggcacggtcgacgaagtgagggtggagcttgctcgtgagcttaagcgaagcaaggatgagcgaaacgacatgtggatcaaaaactccaagcgcgagcgcgagaacaaacagtatgcggaactgatattggagcataatattgcgccatcaaagagccgaattaagaaataccgtatgtggtggaaggagtctggaaaattgtgtatgtattgcggtcaacctgtcaattttaaggagtttggagagggaaacggggctgagatcgagcatatactgccgaagtcgttgttttttgacaacagcttctcaaacgtagtgtgtgcatgccgtaaatgcaatcaggacaagggcaacatgactgcttatgattatgtgaagaagatgctgcccgataagctcgaaagctatgtggagaaagtcgaggagttgtataataagcatgacatctcaaagacgaaacatgaccgtctgctcatgtcgcagtcagatatacctaccgatttcctgaaccgtgatcttcgtgagacctagtacatatccaaaaaggcaaaggagctgctgctgtcggtagtacgcgacgtgactgtgacaacaggatcggttactgactttttcagacatgtatggggatatgacgagattttgcatgaccttaatgttgagatatataagaggagcgaccgtacacagccggtggaatatatccataacggtcagcggcatgttgaggagcgtataaacgactggtcaaaacgtcttgaccatcgtcatcacgccatcgatgcgttgactgtggctttgatgaaaccggcctatataaatcgcttgaatcgtcttaacaccgagcgtgacaagatgtatgaggagcttaaagcacagtcgccggagtatcagcgtaagcattcgctacttgaggactggagtgcgcggcagccgcatttcaaggtcggggaggtggtggaagcggtgaagcgtatagctatctcgcttaaggctggcaagaaagttgtcactccgggcaagcggttggtttataagaacggcaagcgcgtagtcatgcagaccggcgttcttgtacctcgcggtgcattgacaaaagagagtgtatatggtaaaatcaaggtgcttgaacggaatcgtcctttgaaacaactgctcgcttcgcctgatgaaattgctgatgctgcgatacgcgacgaaatcatggagctccttaaactcaacggcaatgatcagaaaaaaacgctcaattacctgaagaagcatcctattgttgtcaatggccgggaggtgacagccgccgattgctatgtcgatcgtttcgtaataaaaacagacataaaggccttaaagagcaaggatgttgatgcgattgtcgatgaaggtgtgaagcgagctgtacgcgcacgcatggcggagtgcggcaacaatgattcagcatttcagaagagtctcgccgaacggcctgtttatgtcgataaaaacaaccgatatccggtgcatacggtgagattgtttgacagctggagtccggactctatagcgccgataagaaaagacccgtcaggacgccctatcggttatgccgcgaagcaaaataaccaccatgtggcgttgtataagtcatatgataataagatgcatgagattgtgcttccgttttgggatgcagttctgcgctgtcgttacaacttgcctgtagtcgttgaaaagccttacgaggtatgggacaacatagccggacgcggtgaagagctgcctgatgacgttcttgcgactttgcctcagcccggttggaagctgtttatgactatgcagctaaatgagatgtttatactcggcctttctgatggcgaatttatggaagcaataaaggaagataacaaagcattgcttacgtctcatttatatcgtgtacagaaacttcgtgcatcagagtattatttacgtcttcatacacagaccactgttgataaagcaaatgaggctaaagataaagaaagtagactgttgtacgtagttagtagcatgggcgcattgcaagctttgaatccgataaaggttcgagtaacttacttgggcgaaattataccgatatagtattatgattaagcgtacgttatatttcggcaacagggcttatctgtcattggagaaccgacagattgttatctctaaacttgatgataacaataaaccggtaaaaacgacgcggccgattgaggacataggagttgttgtcatagacagccctatggtgacgataacttcggggctgatggaagctctgttggaaaataattgcgctgtcataacatgtgacaaaagtcatatgcccgtcgggctgatgcttccgttgtatggaaactcgacccaaaatgagcgttttagagaccagcttgatgcaagtctgccgctgaaaaagcagttgtggcaacagactgtttcgcagaaaatagccaatcaagccgccatattaaagcatgtcggagtggagtgcggcaatatggttgtatggtcacgttcggtaaagagcggtgatgtcgacaatctggaaggtcgggcggcggcatattattggcgtagcatatttccggagtatcccgactttactcgcgggcgtgaaggtccgccacctaatgctttgctgaattacggatatgccatactgcgtgccgttgttgcccgagggcttgtttcaagcggcatgttgcctacgttgggtattcatcatcacaatcggtacaacgcttattgtcttgccgatgacattatggagccgtatcggccgtatgtagatgaacttgtacttgacatgcttaaatcaggctataatgactttctcgacaaagaagccaaggcccggttgctgtcagtgccgacattggatgtcgtcattggaggacgtcgtcgaccgttgatgatcgccgtatcggaaacgacagcttcattgtataagtgttttagcggtgagtgccgaaaaatatcttatcccgaacgttaattgtggaccggcttagtgaatatcgcattatgtgggtactggtattttttgatttacctaccgagacaaaacgtcaacgcaaggaatatgccaaattccggaaattgttggtgtgcgatggatttactatgtttcagttttcaatatatctacgacattgtccgtcgaaagaaaatgccgatgttcatatacgcagagtcaagagttttctgcctccgcatggaaaggtcggaatactttgtataactgataaacaatttggtaatattgaactctttcaaagtgccgctccgtatgatgccgacactccgacacagcaattggagctgttctgataacaaaaagtgaccgttgtaaaaagggttacatctgttttcacatctacccacaaaagtatataagaataaaaaacgagcatccaaaacagagctcgttttttatttctaaatagattggttacagcttgtctcttagttagttgtgccgattgtgctgtatcctatagcacaaaagtaataaaaagtaagcaaattacaactcagggtccctcgaatgatgtaaagcgcaagctgtatcctatagcacaaaagtaataaaaagtaagcaaattacaacgtgttaatatcgatgatgtccaaaagttttgctgtatcctatagcacaaaagtaataaaaagtaagcaaattacaacgtcgagcaaattaaacgtatgcgtgctgctgctgtatcctatagcacaaaagtaataaaaagtaagcaaattacaactcaaggtcctgcgaatgatgtaaagcgcaagctgtatcctatagcacaaaagtaataaaaagtaagcaaattacaaccggtcgagattatgttgtcgttaattaatggctgtatcctatagcacaaaagtaataaaaagtaagcaaattacaacgcaacactggtcaaggttttatcaacactagctgtatcctatagcacaaaagtaataaaaagtaagcaaattacaacgaacaaggtcttcagctgctcaacctgcaggctgtatcctatagcacaaaagtaataaaaagtaagcaaattacaacttacggcctccgaagcgaaacttttttaacgctgtatcctatagcacaaaagtaataaaaagtaagcaaattacaactggtctgattggcaggattacatcggcggcgctgtatcctatagcacaaaagtaataaaaagtaagcaaattacaactccgaagcgtttattactcagaagccggacgctgtatcctatagcacaaaagtaataaaaagtaagcaaattacaacctgcctcaggcttatgtcgttgtccctcgtgctgtatcctatagcacaaaagtaataaaaagtaagcaaattacaacgttgtggcaagtgtattgcttgtctgctttgctgtatcctatagcacaaaagtaataaaaagtaagcaaattacaaccttcctcaggcttatgtcgttgtccctcgtgctgtatcctatagcacaaaagtaataaaaagtaagcaaattacaactgagttcagttctgttcctactctgtccgagctgtatcctatagcacaaaagtaataaaaagtaagcaaattacaactaaagcccgtcacacgtttgcttaaaccaagctgtatcctatagcacaaaagtaataaaaagtaagcaaattacaacacggccatacttggctgtctcttcgggaagctgtatcctatagcacaaaagtaataaaaagtaagcaaattacaacacgtcgcggactcaactaatccgaacgtgctgtatcctatagcacaaaagtaataaaaagtaagcaaattacaacgaggaggtgggtatcggttacaatgcgctggctgtatcctatagcacaaaagtaataaaaagtaagcaaattataaggtgtattgaatattcttcgtatatttgtatatggataagattataaaatgtaattcagatgactacggtgcgctcttgaggatatgggagggtgctgtccgggcaactcatgacttcctgactgaaagtgtgattgaagaaataaaagccgctatgatacccgattatttcccttctgtcgacttatatgcgatacatgacggtgaggctttagccggttttatcggaatttgtgatgataagatagagatgctgttcattgatcctaagcggcttagaaacggctttgggtccaagcttattgactttgcaaagcagcgcggagcgaaatttgtagacgttaacgagcagaatcaatctgcgttgaagttttatttggcaaaaggcttcggaattgtgagtcgggatgaacgtgatgaagcgggtaggccataccctatacttcatttatctttatgatactaccgatgtgttgacccatttcctttttgaattgttatacaattactatggaggtttggcttataataggattgtcatttttaggtatgatttgtataaatgcaggtcgtatatggcgtgctgtagagtcctacaagagccgtaagcgtgaggcttatgtaagccgtcatatgcaggctataaccgctttacgttatgcgggttacggcctgtttatagtcgcgctgtttttgctcatgtttgttgagacgcaataaaaatctgtcgcgacgtggtgccgatttcaataattgttattagctttgtcccctgttatcttaagacgaatgtttaacttggataaaacacaattaaaatgaaacagattcttacggttgctgcagttgcagcgctcatgctttcgtcgtgcggaagcaaaaacaattcacaaaatactgatgctgcaaacgatacaattgctgaggccgaaaccgtttattcgctgctcggcaaatggaatatagagaatgttgtagttaacgactccgtttcggtaagacccgactctattgacgcatactttgaatttaaaaccgccggttacagagtagaaaccggatgcaattccattcagggcgattatactcttgccggcgactcgatcaaatggggcaactcaatcaagacaacaatgttttgtcccgacaatatggcagttgaggacatgttgacgcaggtccttccaaatgttgttgtcgtggactttgagaatgataccgtggctcggttaaacacttctgtccccggccagtacatcgagctagcaaaggctccgtcggaactttaagcaagtcgctcatcgcttgtcgtggaagcggtagccgaaaccgatcataaggttgttgggattcttgaagctgtttagctgatagcctatatgcagaaatgcctgtggcatgatatgcaccttaagcgcaagtatctgatagaagttacggttttctctacatgctatgaagttgcgccctatgcccatattgattgaaaatatgggcattacaagttcaccgcgtatcgacactccggcactgatgcagtccttcaacggtggccggcgaaattttatatcttcatcatgggttccttcaatccagtatttggataggttggaaccctcgtcatattgtatgtcagccgacagaccggcacggaagtaacggttgaagttatacatgggcgcgaagtttatgccggctaccgcgaagtgtcccggcaccatctctgtctcatatgtctacaccgcacgtttgcgggccgcgccatatattaccaggtcataacttatatgtggcttcatgagtgcggtatcgggtattgtatagcttttgcgctcaggcacggtgttgagcgtgtaagtaagtccgacccttccgccgattgagtttactccggggttgggccacgatgtgttgccgttggagtagtgcgacatgtctatgccggccgtcagattaagccgctgcgacagccggtagttaaacataaaaccgagattgatgtaggcgtttactttcgagccaacaacaaggtttacaggcggcagatccgggtcatatttcttccagccgaatgtggctccgaaattccactcatagtttagcgacagtctgtctgacaagtgcactatcggcgctccctgaaatatgtaaagtcctatcggattacctatgcgctcgctgttgaaaaatgaggtgtatccgatgcctattccttgatatgcttccggatacatacggccgagtttggtagcgtcagagaagctgaacgcccatttcagatggcccgacagcgcggagtgcatttcgtcgggacgctcttcaccggtgtagctgtatgttactgcgtttcgtgacgatgccacatatgacgggcgcacgtctaatcctatacggtgtatcaatttgggcgataccgcgcatgtgtcatcctgcgcggcgtgtgacgagattaccgacagcgcaatcagaataaccgctgcaatttgtcggcatgtcggtgccgatatccgggatcttttattctgctccataaggcatatctttccatttaagatcaaacatgaaaggctgcattacgccaactgtaaatttgaggtctacatatcttcctgacgaggtgttgactgcatgtatattgccgtaggcccgggctatgcctgaatcagttctcattatagcctgttttgtggaatacggagccacctccgagctgtatgtctcgttaaatttgggatcgagcgggtccatttttattgtcgttgtggaaaacatgacctttactccgtgaaaccccggcacatacattccgtccacctcgtctatgagcggataggtgggtatctccacttcaggcatttcatcggtaaactttatccggtctttgtttagtttgaatacaacttgcatgggtctgtttcggcccggggtcactttcatatatgaagtgttgggtgtactgtttgtataagtcagtacaggcgacgttatgctatgggtttcaaagtcgatgcctctgtcggagtcataagtgacgccgattatgcggtataatgacggctgacccgaattgatgttgaatgtgacctcatctcttttatagtcatattcaagctcaatgtatcctgcaagattgatatcgtacggattgtccagctcggtaagtgttattgtattgccgttaagctctactttaaatgacagttcctcctctgtggtgatctcgacgtatttaggctgaacgtaagaggctgttctgtcaattatgggagtggagtagccgttattctctaatattatttcaccttcggcattatagtagacctgatgtgtataatcatatggagtgttgatattaagacagttaagattgtcggtctgatatgtcagcgatgccgaggctccggctccttcaagcgtaagctcttcggtcgatggctttttgtcatcgataaaaacatcgtcgttacatgctgcaataactgttgataatatgcaaagcaacaagtacttgaaatgtgcgtgtcttatattcatgtcaaggcaataatgaagggtttatatccgacaaagatagtcaatagaattgccttgtttattgaatttgttttattttgatttttttttaacaaatattttgattcatgtcggtatcagcctatcgatatgccggcaaagcccatgaatgccattgcgagaagccccgcgcagataagggcgatgggtacgccgcgcattgccgcaggtacttcggtaagcgcaagtcgctcacgtatgccggcaaaaaggaccaatgcgagagtgaaccccagtgcggtagctaccgaatagaccagcgactctccgagcgagaagcctttctgtatgacgagtatagccactccgagcactgcgcagttggtcgttataagcggcagaaacactccgagcgcgctgtacagtgcaggtgctatcttcttgagaattatctcaagcatctgcacaagtgcggctatgacgagtataaacaatatggtctgcatgtatccgagtccgaatacgtcaagcacatacttctgaagcagccatgtcacacaggtggcgagtgccatgacaaaagtcaccgcggctcccatgcctgccgcggaacttagcttttttgacactccgagaaacggacatatgccgagaaactgtgcaaaaacaatattgttgacaaatattgccgttattattatggatatgtatgtgatcatgactgcttgcggttacgtacatggtttataatagcaatgagaaaacccagagcgatgaaggctcccggtgcaagtacgaacaggagcgacccgtaggtctcgggaaatatgcgggcgccaaacactgtaccggtgccgagcagctcacgtatgctgccgagcattgtcagcgctacagtgaagccgcaccctatacctattccgtcaaagaccgagtcgatgaccgaccggcgcgatgcataggcttcggcgcgtccgagaagtatacagtttaccacgatgagcggtataaatatgccgagactttcgttgagagagggcagataggcctgcatgaacatctgaagcagtgtgacaaacgtggctatcaccactatatatgcgggtatgcgtaccttgtcgggcaccatgttttttattccggatatggcggcgtttgagcacacgagcactcccgacgtggccagtcccatggaaaggcccgttatggcggagcctgtcgtgccgagggtggggcacatgccgagcagcagtacaaatgtcgggttttcggttatgagaccgttatatatgatgcgcagtttattcatgcgataccgttttttcagttttgtaatacttaaaagcgtcgtaacattcgcgcagagtggccagaaatgcccgcgacgatattgtggcggctgttatggcatctatttctccaccggggtccttggtgacatacattgatgtctcggcgggattcttgcctattaccgacctgtggccgatatccatgcgaaaccattcgtccatttttgcaccgagtcccggtgtctcggcgtgtgacagcacttcgtagccggtaatgtcgccttcggcatcgaagccgtacatgatgcgcacctcacccgagaacccgttaagcgaatatccctctacggccgctccggcaaaaacgtcgcctttgtatgccggaaatatggtaaacggctccgagcctgacggaggagtccatgtgacctgttgagcggtaggatcgttgtcaaattcaggcaataccgcacgtatggcttcgacttgtttgcgttgtgccgcttcctcaataggtgcggcggttatttcatgtacccaagcaagcagtgctcctgccacgattgtaatcacaccgagcgataaggtcatgtatgtcagcgttgacggtaacttcttcatgactttgcccccctttctccgaatttgcgcggttttatatatcggtctattagcggcacaaaaccgttcataagcagtatggcaaaagatactccttcgggatatgctccccaccgtcgtatgattaccgtgatcaggcctatcatgatgccgaatacaagcatgccttttttcgacatgg

SEQ ID NO: 2621 - DNA, 20042 bp, synthetic construct
  source 1..20042: mol_type = other DNA
  misc_feature 1..20042: note = Synthetic
atacctctgattttcggctcataaccctttgataatatataatatatagattaatatcttttttacactattaaaggaaatcgtttggagaagggtatgacagcagtgattataattttgcgaataggattttgggttggggacggagaaatattcttaaaaagcttttgataaaatagagatatataaaaaagaacgaggagtataaatactcccccttccaaatgttttcacaacggaataatccttattgtgatttgctttcaaatttatgttgacaaatatatatataaatgctggaataacctcggaaaatgggagaaatgacgctaaatgactttgtaccaatgtcgttacggtgtcagatgaggacaaaccgaaaaagcgggaaatgcaaggaaaagcagaatatagcaggagaacggtttgcaaatcattacccaagaagatgtaagatttaacacatgtaggacgctattgcaccgtttgtcaccgttttgcgtagcaaggtttaactcgttgatatttaactttgcaaacaaaaaaacgagtatggcaagaagtacattcaaagtgctgttctatgtgaacggcagcaaggagaaaaacggtattgtccccatcatgggacgagtgacaatcaacggttctgtggcacagttcagttgtaagcagaccattccgaaaacgctttgggatgcgaaaggcaaccgagccaaaggtaagagcattgaagcgagggacatcaaccacgctttagacaacattaaggcgcaaatcatcaagcactaccagcgcatttcagacagagaggcgtatgttacggcagaaatggtgcgcaatgcctatcaaggaatcggcagcgaatatgagacattgcttggagcattcgacaaagacaatgccacatttcaaaagcgtgtgggtactgaccgtgtaaaagggacttacatggcaagggttcgtgcaagaaaccatgtggcggcattcatcaaggcgaactacaagcgaagtgacctgtctatgcttgaacttactcccgacttcatcaaggagtttgccgttttcctttccaccgacagaggactgcagaacggcagcatctggactaactgcatgtggctgaaaggtgtggtcatgcgtgcacacttcaacgggctgataccgagaaatccgtttgcccaattccacataagccccaatataaaggagcgtgagtatctgacggaagaagaactgaaaacattgatgacacacgaatttgcggatgccaaactttcctacatccgtgacatctttgtttttgccagcttcaccgcactttcatttgtggatgttaaggaacttaccactgatgatatagtggaggtgaacggtgagaagtggatattatccaaacggcacaagactaaagtcccgttccaagtgaaactgcttgacatccctttgcagattatcaagcgttacgaggagtttcaaacggacaagtccgttttcccgaatctgaactattggtctatatgcaagccattgaagaagatgataaaagagtgcggaatcacaaaggacatctcattccattgtgcgaggcatgggttcgcaacccttgctctaagcaaaggtatgccgattgaaagtgtcagccgtgtgttggggcatacgaatatcgttacgacccaactctatgcgaagataaccacgcagaaaatagaccacgaccttacgatgttcagtgacaaactgaaccaatcttttggaaacacaacaatggcataggactatggaaagaaacattataagcataagcgagttcggcaatgtgactttgccgaatgacacaaccgatgtatggatgaacgaatctgagctgttggatttgttcggtgtcaccgccccgaccattcgggcagggataaagactctttgtaagagtggtgtattgagggagtacgagataaaacgtattatacgcctatccgacaagtgtagcatggagttttacaaccttgaaacgataatcgccctcgctttccacttcggtacattcggagcgaagcaggtacgcaatgtcattctgaaaaggttgtacttgcgaaaagagaaacacgccatcttcttttcgctgaacaatgccgatatagccaagtccaaatacctctcgtagatttggatgagggactgacgtaatgcagtcagtaaatctgcaagtcagtacaacaacacgacagatactctgatttttctcccgaaaagcgtaacgcaaccattcgcttttcgggagttttttcgtcttttcaatccgattccattgcccagccattgaaagtttttgtcccgaggggcttttttctatattctgctatattttgcgtaacaacttatccattaaatgcttatacttttgtagctggtatttttcaaacttaagaccatttgattatgtcagctaacaaacaacaagacagccacaagccgccatcagatggcagcgtggcaaaagaagagttcatccgagtgggaacaacgctctacaagattgtggagcagccaagactgaacggagggtatgtaaagaaacgtatcgcatggaacaacgagaccctgcgccaagactatggcaaggactacatcggcagcgttcccaagtatgacggtttctgtaccgtccccgaacacatcggctaccgtcccgtggtcggtaagttccttaatctctatgagccgatagaccaccaaccaaaggagggcgatttctcgcacatccaatcattggtacggcacatcttcggagaacagtacgagttgggaatggactatctgcaactgctctacctgcaacccgtacagaaactgcctattctgctgctggtgtcggaggaacgtaacacaggcaagagcacgttcctcaactttctgaaagccttctttcagaacaatgtcacgttcaacaccaacgaggatttccgcagtcagttcaattccgattgggcaggaaaactccttatcgtggtggatgaggtgctgctcaaccgcagggaggacagcgagaggttgaagaacctcagtacaaccctatcctataaagtggaagccaaaggcaaagaccgtgacgagattgcgttctttgccaagttcgtgctatgctccaacaacgagtatctgcctgtaatcatagatgcaggggaaacacgctattgggtgcgcaaaatagaccgcttgcagtccgatgacaccgactttctgcaaaagctgaaagcggagatacccgcctttctccatttcctgcaacacagacagctatccaccgaaaaggaaagccgtatgtggtttgcaccatccttgctgcgtaccgaagccttgcaaaagattatccgcagtaaccgcaaccgattggagatagaaatgcaagaacttatccttgacatcatggatagtgtcggtacggacactttttcgttctgctacaacgacctccttcttttgctggtacactcacagggaaaggtggagaaacaccaagtccgaaaggtattgcaggagtgctggaaactaactcctgcaccgaatacacttacttacaccacctatcaagtggactatacccgagagtgccgctattctcccatacggagaataggacggttctataccgtaacaagagaacagttgacagcactctgattattttgatgaaatgatgaataagtatataactgtactgatatgcaaatgattactttctcatcaaacactcatcaaaaacaacttactgatgaaaagagaaaacaggtcagacagataatgctcaataaggcaaatgatgattttctcttttggtaagtgctttgatgaaacaatgatgagagcgtataaggctgctatccaatagtttggcatacacattcatcaattcatcggttttacattcatcatcaaaccataagaaaatatgaacatacaggaagtaaagaacatacgcattgcagactatctgcaaagtttgggctatacgcccgtgaaacagcaaggcaacagcctttggtacaaatcgccgttgagagaggaaaaggatgcctctttcaaggtaaacaccgaacttaacaagtggtacgatttcggacttggcaaaggcggcaacatcatcgctttggcagaggaactatacgcaaccgactatgtaccctacttgctcaataaaatattcgaacgagtaccgcatatccgtcccgtatctttctcttttcgtcagcaagcatccgaaccgagtttccaacagttggaggtgggagaacttacccatcccgcattgctcagatacttgcaggaacgaggtataaactccgacttggcaaggcaggaatgtaaggaactgcacttcatccataatgacaagccttatttcgccatcggtttcccaaatgtgacaggagggtatgaagtgcgcaaccgtttcttcaagggctgcatcgcacccaaagacatcagccatatacgccagcagggagaaccgagagagaaatgtctcgtgttcgagggtatgatggactacctgtcattcctcaccttgcggatgaagaattgcccagccatgcccaaccttgaaaggcaggattatgtcatcctcaattcggttgccaatgtttccaaagccatagacgtgctgcacggctacgagcgcatccactgcctgcttgacaatgacgaggcaggaagaaatgcctacttggaattggcaagagagttcagcggtcgtatccgggacttctccgacaactacaacgggcataaagacctgaacgattacctgtgcgggaagcccatgtcccaatcggcagagccgataaaggagaagaagcaagtccaatccacaagacggatgatacagccaccgaaaaagaaagggctgaagatgtaaggggatgcttgcagcggcacgggtatttaccgatggaaaataccgtagcttattagggaattttccgagccgcattgcaagcaacgctgaaaattccccaataagccaaagaggttgcacctctccggactctccatgaacaacggcaacagccgtacataagcaataatcaaacgatgttttacaagcagaataagaaagtaattatatatgggattcgtagtattacacatggaaaaggcgcacggttccgacagcggaacgaccgcccacatcgagcgtttcatcataccgaagaacgcagaccccacacgcacacaccttaaccgaaaactcatcacataccccgatggaataaaagaccgtacggcagccattcagaaaagattggaggaagcgggactgacacgcaaaatcgggaacaaccaagttcgggcaatccgtatcaacgtgtcgggaacgcacgaggatatgaagcgtatcgaaaaggagggtagacttgatgaatggtgtgccgacaatatgaaatactttgccgacctgttcggcagggagaatatcgtggcagcgcacctgcacagggacgaggaaacgccacacatacacatcacactcgtcccgattgtcaagggagaacgcaagcgcaagaaacgtgaggaacaggtgaagaaacgctatcgcaagaagccggccaatgccgtccgcctgtgtgccgatgacatcatgacacgcttgaagttgaaatcataccaagacagttatgccatagcaatggcaaaatacggtttgcaacgtggcatagacggctcgcaggctcgccacaagtccacgcagcagtattatcgggacatacagaaacttgccgatggtctaaaatcggaagtcgtggaattgcaggagcggaaagaaacagcacaggaagaactcagacgagccaagaaagaggtgcagaccgagaaactgaaaggcgcagccaccacagcagcgacccacattgcagaaagtgtcggttctcttttcggaagcaataaagtcaaaacattggagcgcaggaacgaggacttgcaagaccgcatccttgaacttgaagaaaaagcgcgacaaagggaacagcaacaggcaaagcacatacaggagataacggatgcttacgaacaccgataccgcaagctgtccgagtttgtggattatgtcaagcactatttcccgtatgtggagaagctgatgccgaccatcaagttcctgcgtgatacgctgaactttggtgatgccgttatacgaaagctatgcacgttcaaggatgtttccatcaaaggcgagctctattctcgcgagttcaaccaacattttagggtagataaaacgatatgttcacttaaagaggacaaggagagaaaatataacctccacatagacggtattcctcatgtcagttggttcagacggaagaaagaggagtttatggagaaactgagaccacaagtaagaagccaaaacagaggtattaagctgtaaatcataataaagtccgtgataattaatgccatatcacggattttttatacttttgtattcggatttaggtaacattactcaataaatttaatcgtaaacatgaatatttcagttatacataaaacaataatcgcaatcgtgttagtgctgtcggttatagttcatccattaacagcacaaacaacgataaaagggaaaagaatctattacatcgataattatacagaatatttagcaaaacaatattttgacaataacctatctgacttagatcctatagagggaatttggataaatgatggtattacctattctattgagaaagattataatggtcatagtcgaaatcctaatagatatagaggtgtcgtcatagatgtagttggtaacaatgcttgggagagaggggatatccaattttttttagaaaaaggagcctcgcagggtttatttaatggtacttattatgcatttattgctgaatggagtcgtggacaaagagattataatatcaagcctattaaaacgataggtattcttaggtcatttgcatctttagtacatcaatgtccagaatttgacgattatggaagtgttacaggaacacgcaatgataattttacaaaaatctatccggtagaaactatagctaattcacaaaactctatagcggagaaatcaacagaatggtcaggtacagggtttgctctcaaaagtggttacatcgtaacaaatttccacgtaatagatggtgcaaaatcaatcataataaaaggtgtatctggagattttaataaatcctacaaagcatctcttattgggactgataagaataatgatttggcgttattaaagattgatgactctgcattttgtggtttcgggaacatcccttatgcagtatcgtctacaatgtctgaggttggtgaagatatttttgttttaggctatccattaacatctactatgggagatgaaataaaactgactacaggaattattagttctaagacaggttttcaaggagatgtcgctctataccaaatttcagcacctatacagcccggaaatagtggtggacccttgtttgacagaaagggaaatcttatcggcattgtcaacgctaaacataaggatgcagaaaatgtcggatatgcaattaaaacatcttatttgaaaaatcttgttgaaagttcaacatcaacttctatcttacctaataataaccaagtagttggacaaccattaaccgagaaggttaaaaagttgaagaattatgtttttatgattacatgttcaaaatgataataacagcaaattcttaagtatatatagaatcatcagaccacaaatagttatgcccacatgacactattcaataatcatacttctgataatatttttcaggactttgaacaaaagttcaagcctatattatatcagaagtatccccatttaagtacattgcacatagattgttacacagtggttcaatataaccaacaaaaaaacattccactaatcgatggcttatgcaacgatacgtttgcatattctattgatgtaacaaacgatggagaacaaaataaggtgtttgcagctatcgttatttctccagaattgtgtgagtcgtttaattttacagagatggaaaaaatggctgcaataagtcatgaagtagggcatataatccatcattttaatgaagctttaagcaaagccggtaatatgatggttgaaataaaggctgatgaagttgttgcaaaattaggcatggcagaacctttaaagtctgttcttcataaactaaaatcgtccaatcggtattcaaaagagcaatgtcaattaatggatttaagaatacagatgttgagttgttctgatgactgctgatattactctataatccaattgataaattcagagtttcaagaaatagtattacctttgtagacaaatcgagttatttgatacgcaaatcaaggcagaacacagcaaatggcacagttgccaaatcattacctcaaaattgggtaattttcccaaagtcctttgtataaggcactaagaaaagtattccaaagttacggataattttttaatactattgtatttttcgataaatttttttatgtttacatattaaatataataataccataaaatatatagtaggcatgaaaaacatcttaggattagatttaggttcatcgagtataggttggtctgttataagagaaaattcagaagaacaggagttggtagctatgggtagccgagttgtatcgcttacagccgcagaactatcttcttttacacaaggaaatggggtgtctataaattcacagaggactcaaaaaaggactcaacgtaaaggatatgacaggtatcaattgcgtcgcacattgttaaggaataagttggatacattaggaatgttacctgatgactctttatctcatttgcctaaacttcaattgtggggattaagggcaaaggctgttacgcaacgaatcgagttgaacgagttggggagagttttgttacatttgaatcaaaaacgtggatataagtcaataaaaagtgatttttcgggtgataagaaaataaccgattatgtaaaaattgttaaaacccgttatgatgaattgaaagagaagagattgactattggggaattattttttcgaagactgacagaaaatgccttttttcgttgtaaagaacaagtatatccccgtcaggcttatgtcgaggagtttgattgtattatgaattgtcaaagaaaattttatcccgatatattgactgatgagacaatcagatgtattagagatgagattatatattaccaacgaccgttaaagtcgtgcaaatacttggtgtcgcgctgtgaatttgaaaagcgtttctatctgaatgcggccggtaaaaagaccgaagctggccctaaggtagcaccgcgcacttctccattgtttcaagtatgccgtttgtgggagagtatcaataatattgtagtcaaggaccgtcggaatgaaattgtttttatttcggcggagcaaagagccgctttgtttgattttttgaatactcacgagaaactcaaaggtagcgatctcttgaaactgttgggtttgtccaagacgtatggttaccggttgggtgagcagtttaagactggaatacaagggaacaaaacccgagtggaaatcgaacgagctttgggcaattatcctgataagaaaagattgttgcaatttaatcttcaagaggaatcttcgtcgatggttaatactgaaacgggtgagattattcccatgattagtctgtcgtttgagcaggaaccgctttatcggctgtggcatgtattgtattcgattgacgatcgggagcagttacagtcggtgttgcgacagaaattcggaattgatgatgacgaggttttagaacgactgagcgctatcgatttggtgaaagctggttttggaaataaatcgagcaaggctatacgtcgcatattgccatttttgcagttaggcatgaactatgcagaagcttgtgaggctgctgggtatacccatagcaataactatacaaaggctgaaaatgaggcgcacgctttgctggatagattaccggcgattaaaaagaacgagcttcggcaaccagtggttgagaagatcctcaatcaaatggttaatgtggtgaatgcgcttatggaaaaatatggacgattcgatgagatccgtgtggagttggctcgtgaattgaaacaaagtaaagaagaacgttctaatacatataaaagtataaataagaatcaaagggaaaatgagcaaattgctaaacgtatagttgaatatggtgtgccaactcgatctcgcatacagaaatataaaatgtgggaggaatcgaaacactgttgtatctattgcgggcaaccggtagatgtgggggattttttgcgaggatttgatgtcgaggtagaacatattattcctaaatcattgtatttcgacgatagttttgcaaataaagtttgttcttgtcgtagctgtaataaagagaaaaataatcgcactgcatatgattatatgaaatcaaaaggcgaaaaagccctgtccgactatgtcgaacgagttaacacaatgtacacaaacaatcaaatcagcaagaccaagttgcaaaatttattaaccccagtcgataaaatttctaccgatttcatagatcgacaattacgagagagtcagtatatagcaaggaaagccaaagagattctgacatcggtttgttataatgtgacggctacgagtggttcggttaccagtttcttgcgacatgtttggggctgggataccgtattacacgatcttaattttgaccgatataagaaagtgggtttaaccgaggtaatagaggtaaaccataggggcagtgtcattaggagagagcaaataaaggattggagtaagagattcgatcatcgccaccatgccattgatgcacttacgattgcctgtaccaaacaggcgtatgttcagcgtctgaataatttgagagcagaagaaggaccggatttcaacaaaatgagtttggaacgttatatacagtcacaacctcatttctcagttgcacaagtccgtgaggctgttgatagaatattagtgtcgtttagagccggtaagcgtgcggtgactcccggcaagcgatatattattcgtaagaaccgaaaacgtatttccgtccagtcagttttaattccacgaggtgcgttgagcgaagagagtgtatatggcgtaatttatgtgtgggagaaagatgagctaggtcatgttatacaaaagcagcgtgctgtaatgaagtatccgataacctcgattaatcgggaaatgttggataaggaaaaagttgtggacaagcgtattcatagaatcctttccggtaggcttgctcaatataatgataatcccaaagaggcgtttgctaaacctgtatatatagataaggagtgtcgtattccaattcgcacggttcgttgttttgcgaagccggcgattaatacgttagttccactcaaaaaagatgataagggaaatcctgttgcttgggtcaatccggggaacaatcatcatgttgctatttatagagatgaagatggcaagtataaggaacgaaccgttacattttgggaagcagtggatcgctgtcaggtaggtataccggctattgtcactcaaccagatactatttgggataatatacttcagcgaaacgatatatctgaaaacgttttagaatccttacctgatgtaaaatggcaatttgttctttcattgcagcaaaatgagatgtttattttaggaatgaatgaggaagattatcgttatgctatggatcaacaagactatgcattattgaacaaatatctttatcgagtacaaaaattaagtaaaggtgattataattttaggtatcatacagaaacttctgtcgaagataagtacgatggaaagctcaatttggaattgtctaggcagatgggaaaactaaaaagggtgagtataaagtcgttattgggattaaatcctcataaggtgcatatctcagttttgggtgaaataaaggaaatatcatgatcaaacgcacattatattttgggaatccctcgtatctgagtttgcgcaatgcccagctagtactgcgtctgccagaagtgtcgaataacgacacattacccgatactttcaaaaaggcggcggagcggacgattcctatcgaagatataggagtggtcgtactcgatcattcgcagataacaatcacacaaggattgctcgaagcccttctcgaaaataattgcgctattatcacttgcgataaaagtcgtttgcctgtgggactcgtactacccctttgtgggaacacgacacaaaacgaacggttccgagaccaacttaatgcttcgttacctttgaaaaagcaactttggcaacagacagtgcagcaaaagattgccaatcaagctgcaattttggagagccggggaattgtagccaaaaatatgcgggcatgggtgggcgaagtccgtagtggagacatcgataatatggaggcacgggctgccgcctattattggtcgagtatattccctcacctcgatagctttcgcagagacagagacggcgatccccccaacaatctacttaattatggttatgccgttcttcgggctgttgtcgcccggtcgctcgctattagcggattgttacctactttgggcatatatcatcataatcgttataatgcatattgtttggccgatgatgtgatggagccttatcgcccctatgtcgatggcttggtctgtgaaatcatggaaagtggaaaggactattcgatgttaacgaccgaattgaaagcaaagctattgtctttaccggtggtagaggttggcattcagggacggcgtagtcctttgatggtcgctgtcgcccaaactaccgcctctttatacaaatgttttaacggggagttacgtaaaattatctatccagaattataattaatatggatagattcagcgaatatcgtattatgtgggtattggtatttttcgatttgccaacagagtcgaaacgggagcgtaaattatatgccgacttccgtaagaaactgttacaagatggatttactatgttccaattttccatttatgtacggcattgtcctagtcgggagaatgccgatgtacatatccgccgggtgaagctttctttaccgccgtttggaaaagtaggtattctctgtgttactgataaacaattcggtatgatggaaattttctatgggaagaaagaggtaaagccacaggttctacctcaacagctcgaactcttttgaaaaacaaaaagccggttttttaaccagctttttgataaaatacagctttaatttttaattctaattgatcgtgtaattatttgactattaaaatactacacaaattgtactgtatttaatatgtcaaagatacaaatttgaaagcgaatcacaacaataacataagtgtgttcataattgtttgtactgtatttaatatgtcaaagatacaaatttgaaagcgaatcacaactacaacatcttgattaattgcccattttaaactgtatttaatatgtcaaagatacaaatttgaaagcgaatcacaacttgttgatattggttttgtagagccataatactgtatttaatatgtcaaagatacaaatttgaaagcgaatcacaaccgcgaagccgtcgggcaacttgctgccataactgtatttaatatgtcaaaggtacaaatttgaaagcgaatcacaacctcttatcatatacgcctatgaaagcaaagactgtatttaatatgtcaaagatacaaatttgaaagcgaatcacaaccggtgcgatcaagcacatcgatttgtggaaactgtatttaatatgtcaaagatacaaatttgaaagcgaatcacaaccgataagccattttagagcactcattattgctgtatttaatatgtcaaagatacagatttgaaagcgaatcacaactcgaatcgtacactttaacggccttgttgggctgtatttaatatgtcaaaggtacggatttgaaattaaatcataattaatttagttggattttaaactgttaatttcttatgtgttgagaataccacggataaatactattgaattacagtgttggtaggtgtgttttgtgtggaaaagcgtatctttgatagctcaatcaaagggataatgaatgtatggaaccgttaggtatttgtcgtacggctttttatgtgtctaaaaagatcatgtgtgccgtacttatcgtattttcattgagaggcagagcgcagagcagtgtaatgatggagaaggagacttgtgcgtttcttcaatctttgcctgcgggtttacaaaagacacaggccgatgccgtgcgtcgcgccataaacggggattgtaccgctttgatatctgtgcgtaattcgcgtaatacgaaccctgaatcgaaaagtggggtagtggcaacggatatcggagggtgttatcgtttgtatcgccctgccggattcgatactattccgttgcctgtgttgatttacttacatgggggtggctggtgtttcgggagtatcaatagttgcgctcatttttgtgcggggttatcgtatagggcaaagattgctgtgttggccgtggaatatcccttagcacccgaacatgcttatcctgccgccctcaatgcttgtaccgaggccgtcgcattcgctttcgagcatgccggggagtatggctttcttcccgatcggatatctatcggcggagatagttcgggcgggaatcttgctcttgctacggctcttaacctaattcttgcaaaggattctcactcttgccgcatggacagtggaacgatgtgctcttcactttgttcgctcgtgctgttttatccggtgacaaaagcttgggcagacggttcgtcttcgtggaaaaactatgccgagggatatggtctcgatgcccaattgatggaggctttcaatgccgcatacatcggtacaggagatgctcgacagcctcttgtctcgccgggtgtagccgatgacgagctactgaaacagctaccgccgacgcttatcgtcaatgccgagcgggatattcttttatgtcaggggaaggaattggcggccagactttccgggctcggcgttgccgtgagccatacggttttgcctcatacggtgcatctctttatcaccgtgccgggacagcctacggcattcggggagtctgttcgtttagccgccgactttctcacgttagagtaggggaatcattccgtatcagagaggtggctttacaactatatcgggattgagactccttagatgatcgatgaatgcttgcctctggttgggagacaagacgagagtctttttgtcggcgaagcggatttctatcctgtccatcgataaggccggtgcgcttaaacaactattggttttcgagattttcgttattcggtcgatcgggaaggaggacgacaagaatatgccgcatttgatatgcagcgtgccgttgtctatggtgtagctcgtgttacagaacgggtcggcaatgaaagcggccgtgacgaccaataaggcgagggctatccaagagaattcgaacaggagcggcaggtaggacagaaggacaattgctataatggcgattagcaagcctttatcgacctttgatttgtaaacagttttcattgtctcgtaggagattagaatatccctccaccaagcataaggcgcagtatacccaaaacgatagatacgatgcagagggttttgccattgtctgatttgagaatggcacagatgatgaggaaaatgaccgatatgggtatggccacccagttgagaaatcccaataggggaataaatgcgacaagggtgatgagcagtgctacgatacctaagaatgttcccattgttttatgctttttgtcgattaacaaatgtattttgtgatttgttccgggggattgatgtcttgtcaatccattcgggttttatagtcgtagtagtcgtattcccgccagatttccgctttcccgtcgcttttgaggcaggctatggaggggtgggggattccgttgaacatagttgtcttgactgtcgtatagtgaatcatatcctcgaatatgattcggtctcctatttgcaattcgtggtcgaaatgccagtctcctatatagtcgccgctcagacaggagtttcctcccatgcgataggcgtatgtgccgggtgcgggttctaccgagcctcgtatcgccggtttatagggcatttcgagacagtcgggcatgtgacaggcaaaagaaacgtcgagaatggctgttttgataccgtggttctcgactatatcgactatggtggatactaatgtaccggtctgccaagcgaacgcactaccgggttcgagaatgatttcgaggccggggtgtctttgtttgaagccccggaggaggttaatcaaatgtgcggtatcgtaatccttgcgggtcatgaggtgaccgcctcccatattcagccatttgatatgggggagtagatgcccgaatcggtcttcgacctgtgccaaagtcttttcgaggtcgtaggaggtggactcgcagagggtgtggaaatgaagcccctccactccctgcggaagttcaggcagcttgtcggcggttattcctaagcgggaacccggtgcgcagggattatagaggtcggtttctacctcggaatattcggggttgatacgcaacccgcacgatacccgattgccgtcggctactacttgggggtaaaaccgttcgaattgagtcagggagttgaaggtaatgtggctgctgtatttgagtattgtcgggaaatctcgctcggtataggccggtgagtaggtgtgtgccggactgcccatctcctcgaatgccagccgtgcttcgtgtatggagctggctgtggagtgcggaatatattcccgtatgacggggaatgatttccaaagggcataggctttgaacgccagtataatatttactccggcggcttctttgacggagcgaatgagagcgaggttgcggcgcaatagttcttcttcgagaacatagcagggcgatggtatttgcgatagcgtatcgtgcatgacgtatgaaaattattctatgattgtgaacttggcgaatttgagcaggagctgtttgcgtccgacgttttcaaattcgacggttattttgcagttgtctcccgtatcttctatggctgtaacggttccgtttccgaagcgggcatggcagatgaatgttcctatttctacttgcccggcagcggttgcgactgtggattgtgtcgtagaatgggtttcacctgtgggtttagagtctatcttggtcaaccgtttgcccggagacggagcagtgaatggtctcggtgcaggtgtgcgatccgtatcttcttcgttccatcgggaagttttgcgcggtctttccgcatcgaatggaaatcggttccacgatatggtttctctgggagactcctgtttggtttgtaccggcatatcgacgtatcgagaatcgaggtctttgatgaaccggcttggaggggaggagaccgtttgtccgttacgatagcgggagagggcatacgtgagggtgcagttttcttctgcgcgggtgatggccacatagagcagacgtcgttcttcttcgatttcccgttcactgtttttactcatggccgaaggaaagaggtcttcttctactccaacaatgaaaacttgtttgaactccaatcctttcgatgcatggaccgtcatcaaggtcactttgtcttgctcggtttcatcgccgttgtcttgatctgtcgccaaagaaatttcggctaagaagtcggatagggaggtttgttcttctccggcttcttcgcgcagggcgcaaaattcacggacaccgttcaaaagttcttcgatgttctcttgccggctgatgttttcgggagtacgatccgaggaaatctctccccaaatacccgaccgcttgataatcgtttccgccagttccggtgtgttctttttatcggcttcgtagcgtaattcgtctatgaggtccttgaaggttttcaacttgttcaatgtgccgttgttaacggccaagttgtggcctatggggtcggaaatcacattccatatactggattcctgcgagtgtgcccgttcgatgagtttcgagagagtggtatttccgattcctcgtgcgggatagttgatgactcgtttgagcgcttcttcgtcatcggggtttatcgtcaatctgaaataggcgatggcgtccttgatttctttcctttggtagaacgacatgcctccgtagatgcggtagggtatgttgcgcttgcgcagagcctcctccaatacacgggactgtgcattcgtgcggtagaggacagcgaagtcgttgtaatcacagtgagtcgtgagacgcatttcggcaatacggttcgagacgataaagccttcttcgaaatcggaataggcacttattacttgtactttgtttccttgttctttttcggagaatacttgtttgggtatttgctccttgttcttggcgatgaggctgttggccgcattgacgatattttgtgtggaacggtagtttcgttcgagtttgaatattttcaatcccgggaactctttactcagtccgagtatattgtggatattcgctccccggaacgagtaaatgctctgggcatcatcgcccaccacgcagatgtgattgtggccttttcctaactggctgacgatgtggtgttgggcgaaattggtatcttgatactcgtctaccaagatgtaggcgaataggtcgcgatagtgttgcagcacgtcggggtggtccctgaaaagtatattggtattgagcagcaggtcgtcgaaatccattacccccgacacggaacagcgttgttgataacgttgatatattttatggattaaaggtcgtttcgaacgagtatccctttcgataagttcccggtttcgcgcataggcttgcggatcgatgaggtcgtttttcgcctgggaaataatcgcctgcacggttgcgggtttgtatattttctcaatgagttgtaattcatattcattgagttgctcattatcttttttatcttttgactctttgagtacctctttaataatactttttataagcgacagggaatcggaggcatcgtagatggtgaagtcgtgacgatagccgatccggtcggcattggctcggagtatgcgggagaaaatggagtgaaacgtccttgcccacaagcgttgagctgtctctgtccctaccaatgcggcgatgcgttctttcatttcgttggccgctttgttggtgaaggtgagtgccagcagccggtagggcggatatcccatttgcagcaggtgtgctatcttgtaggtaagtactcttgttttacccgatccggctccggcgataaccaattccggtccatcggtatagagtacggcttcgcgttgctggtcgttcagactgttcagaaaatcttgttccacttttcttttcctttgcttcgtgcaaagatagtgtaaagggttaatagaaacaagcctcggttttgtctgtgtgttatctatttttttgagaatcatactttcgtcattgcataactgagttttatttcttcttttcaagttctgtatcggtggtggagttttattcttggttcgttcttctcagcagcgagaagaacgaaccaagaagcgccgccgcggttatcgggctttttggcttgtcgctacggtcgccgtcggggtttgcggaactcgcttcgctcggacagtcctcgccctttttcctccgtcttccttgcgacttcaccgcccgataaaggcagggattttgcttgtgcttttgctggtcttttcaaccccctcgccctttgggcactccccctatattcccttacggaaacacagggggagaggagggttaact

SEQ ID NO: 2622 - DNA, 17113 bp, synthetic construct
  misc_feature 1..17113: note = Synthetic
  source 1..17113: mol_type = other DNA
ttgtaacacgccggggagggggctaaagtcgaaacaagttagccgtaccggaaggtgcggctggaacacctcctttctggagaagcaaaacctggaacaagactggagaagaccgagttctctcttggtactacacgcttcgttcaatataaaaaagaaggaaaacaacccgccgcaggcacgatttgaagaatagtcctatagctcagtaggttagagcgctacactgataatgtagaggtcggcagttcaaatctgcctgggactaccaggccggaggtcaggtggtaaaaggggggattagctcagctggctagagcacctgctttgcaagcagggggtcaacggttcgaatccgttattctccacgaaagatccttgacatgatgaaaaagaagagtaaacgagcaaagcaaacccatatcaacccctaacgtcgccgtctctaagcagagacggaagacgcggaagaaagtaaacaagggcgcatggaggatgcctaggctctcggaggcgaagaaggacgtgataagctgcgaaaagttacggtaaggcgcaaatagccgtagacccgtaaatatccgaatggggcaacccggccagcaatggtcataccgccaagcggtaagccaacgcggggaactgaaacatctaagtacccgcaggaaaagaaaataacaatgattccgccagtagtggcgagcgaacgcggaacagcccaaaccacccgtgttacggcacgagtggggtagaaggatccacgatacggcaagaaataagttagcagaatacgatggaaatcgtagccaaagacggtgacagcccggtacgcgaaaaccgacagaagcccagtggacacctgagtaacccaggacacgagaaatccggggcgaatcagcggggcccatcccgtaaggctaaatactcccgagagaccgatagcgaaccagtactgtgaaggaaaggtgaaaagaacctcgaacagaggagtgaaacagaccctgaaaccatgcgcctacaagcggtcggagcatgttaaaatgtgacggcgtgccttttgcataatgaacctacgagttactctcgctggcaaggttaagcgattcagtcgcgcagccgaagcgaaagcaagtccgaacaaggcgtacagtcagcgggagtagacgcgaaaccaagtgatctacccttggtcaggttgaaggttgggtaacaccaactggaggaccgcaccgataagcgttgaaaagcttacggatgaactgagggtaggagtgaaaggccaatcaaacttggagatagctcgtactccccgaaatgcatttaggtgcagcctcgaagcagagtgatagaggtagagcgactgataagatgcgagggcttcaccgcctatcaagtcttgacaaactccgaatactatcacttgatcttcgggagtgagggcatgggtgctaaggtccatgtccgaaagaggaacaactcagaccaccagctaaggtcccgaaataagggctaagttgaataaacgaagtaaaactgcaaagacagctaggatgttggcttggaagcagccattcatttaaagagtgcgtaacagctcactagtcgaggagttttgcatggataataatcgggcataagccctttaccgaagctgtggatgtcgtaagacatggtaggggagcattccggcggcgacgaaggccgtcctcgaggacgactggagctttcggaaaagcaaatgtaggtataagtaacgataaagggggcgcgaaaccccctcgccataagactaaggattcctgatcaacgctaatcggatcagggtaagtcgggccctaaggcgcagccgaacggcgtagccgatggaagaaacggtaaagattccgttactggatataggagcgatgtggagacggagaagtgacacacccgcctgccgacggaagcgcaggttaaaggaagtaggtagacgccgggtaggcaaatccgcctggcgtgccgaagctgacagtatcgagagcccccgggcaatcgaatagcggtggtaatcaggctcccaagaaaatccgctaagcatattctatattcacccgtaccccaaacggacacacgtagtcgggtagaatataccaaggcgctcgaaagactcacggttaaggaactaggcaaattgaccctgtaacctcgggaaaaagggtccccagtaagatggggcgcagagaataggtccaggcaactgtttaacaaaaacacagggctgtgcaaaatttagagatgaagtatacagcctgacacctgcccggtgccggaaggttaagaggagagctaatcgcaagagaaggcttgaattgaagccccggtaaacggcggccgtaactataacggtcctaaggtagcgaaattccttgtcgggtaagttccgacctgcacgaatggtgtaatgatctggacactgtctcaaccgtgacttcggtgaaattgtagtatcggtgaagatgccgattacccgcaacgggacgaaaagaccccgtgaacctttactgcaacttagcattgcgtttgggcatttgatgtgtaggatagtccggaggctacgagtcggcgacgccagtcgtcgaggagccgttgttgaaatacggaccttcgaatgtttgagcgctaactcgcaggtgcgaggacactgtttggtgggtagtttgactggggtggtcgcctccaaaagcgtaacggaggcttctaaaggtaccctcagaccgattggtaaccggtcggagagtgtaatggcacaagggtgcttgactgagagacccacaagtcgatcaggtaggaaactagagcatagtgatccggtggttccgcatggaagggccatcgctcaaaggataaaaggtactccggggataacaggctgatccctcccaagagctcatatcgacggagtggtttggcacctcgatgtcggctcgtcacatcctggggctggagaaggtcccaagggttcggctgttcgccgattaaagtggcacgcgagctgggttcagaacgtcgtgagacagttcggtctctatctgttgtgggcgcaggaaatttgcggagatccgacactagtacgagaggaccgtgttggacagacccctggtgcatcggttgttccgccaggagcacagccgagtagctaagtctggaagggataagcgctgaaagcatctaagtgcgaagcccactccaagataagatttccatatagggacgtcaaagacgatgacgtagataggccgcaggtgtacaggcagcaatgtcacagccgagcggtactaatagcccgaaactttcggaagtgcgagacgtcgagggtagataagggaggcagagattgcgagagactcttttttttcgtcaaggattgagacattcaggcggttacagcgcgggggatccacctctacccattccgaacagagaagttaagccccgccacgccgatggtactgcgcaagtgggagagtaggtagccgccaacttataggagagagagccggagagggagaaccccttcggctttctctctttttgtatataggactcacaacgaggcaaggcaggagagacacatgaacgcccctaaagtcacatcgtttccatgattatccctctcccctgtaccggaatgctgaacaggagagaaggacaaacacgatatataagaaagtattaccctcctcctttaccgtgtcccgtaacacggcagaggagaaaggcgaatacagttatctcgtttgttaaaacgatgtaacaagggcgttaaaccacctcccctatattttgctacgcaaaacacaggggagctgtccaaaggacggaggggttgatacaagccaaagtttctaagacaaaaaatatcttggatttgcacagcggattaaaccccacccctcagaaactcccgtccctgagagctcgccccgtcgtccccgacgctactccatacccctgattttcggctcataaccctttgataatatctaatatatagattaatatcctttttacactattaaaggaaatcgtttggagaagggtatgacagcagtgattataattttgcgaatgggattttgggttagggacggagatattcttaaaaagtttttgataaaatagagatatataaaaaagaacgaggagtatgaatactcccccttccaaatgttttcacaacggaataatccttattgtgatttgctttcaaatttgtgttaacaaatatacatataattttttaatactattgtatttttcgataaatttttttatgtttacatattaaatataataataccataaatagtaggcatgaaaaacatcttaggattagatttaggttcatcgagtataggttgggctgttataagagaaaattcagaagaacaggagttggtagctatgggtagccgagttgtatcgcttacagccgcagaactatcttcttttacacaaggaaatggggtgtctataaattcacagaggactcaaaaaaggactcaacgtaaaggatatgacaggtatcaattgcgtcgcacattgttaaggaataagttggatacattaggaatgttacccgatgactctttatctcatttgcctaaacttcaattgtggggattaagggcaaaggctgttacgcaacgaatcgagttgaacgagttggggagagttttgttacatttgaatcaaaaacgtggatataagtcaataaaaagtgatttttcgggtgataagaaaataaccgattatgtaaaaactgttaaaacccgttatgatgaattgaaagagaagagattgactattggggaattattttttcgaagactgacggaaaatgctttttttcgttgtaaagaacaagtatatccccgtcaagcttatgtcgaggagtttgattgtattatgaattgtcaaagaaaattttatcccgatgtattgactgatgagacaatcagatgtattagagatgagattatatattaccaacgaccgttaaagtcgtgcaaatacttggtgtcgcgctgtgaatttgaaaagcgtttctatctgaatgcggccggtaaaaagaccgaagctggccctaaggtagcaccgcgcacttctccattgtttcaagtatgccgtttgtgggagagtatcaataatattgtagtcaaggaccgtcggaatgaaattgtttctatttcggcggagcaaagagcagctttgtttgattttttgaatactcacgagaaactcaaaggtagcgatctcttgaaactgttgggtttgtccaagacgtatggttaccggttgggcgagcagtttaagaccggaatacaggggaacaaaacccgagtggaaatcgaacgagctttgggcaattatcccgataaggcgaggttgttgcaatttaatctccaaaaggaatcttcgtcgatggtcaatactgaaacgggtgagattattcccatgattagcctgtcgtttgagcaggaaccgctttatcggctgtggcatgtattgtattcgattgacgatcgggagcagttacagttggtgttgcgacagaaattcggaattgatgatgacgaggttttagaacgactgagcgctatcgatttggtgaaagctggttttggaaataaatcgagcaaggctatacgtcgcatattgccatttttgcagttaggcatgaactatgcagaagcttgtgaggctgctgggtatacccatagcaataactatacaaaggctgaaaatgaggcgcacgctttgctggatagattaccggcgattaaaaagaacgagcttcggcaaccagtggttgagaagattctcaatcaaatggttaatgtggtgaatgcgcttatggaaaaatatggacgattcgatgagatccgtgtggagttggctcgtgaattgaaacaaagtaaagaagaacgttctaatacatataaaagtataaataaaaatcaaagggaaaatgagcaaattgctaaacgtatagttgaatatggtgtgccaactcgatctcgcatacagaaatataaaatgtgggaggaatcgaaacactgttgtatctattgcgggcaaccggtagatgtgggggattttttgcgaggatttgatgtcgaggtagaacatattattcctaaatcattgtatttcgacgatagttttgcaaataaagtttgttcttgtcgtagctgtaataaagagaaaaataatcgcactgcatatgattatatgaaatcaaaaggcgaaaaagccctgtccgactatgtcgaacgagttaacacaatgtacacaaacaatcaaatcagcaagaccaagttgcaaaatttattaaccccagtcgataaaatttctaccgatttcatagatcgacaattacgagagagtcagtatatagcaaggaaagccaaagagattctgacatcggtttgttataatgtgacggctacgagtggttcggttaccagtttcttgcgacatgtttggggctgggataccgtattacacgatcttaattttgaccgatataagaaagtgggtttaaccgaggtaatagaggtaaaccataggggcagtgtcattaggagagagcaaataaaggattggagtaagagattcgatcatcgccaccatgccattgatgcacttacgattgcctgtaccaaacaggcgtatattcagcgcctgaataatttgagagcagaagaaggaccggatttcaacaaaatgagtttggaacgttatatacagtcacaacctcatttctcagttgcacaagtccgtgaggctgttgatagaatattagtgtcgtttagagccggtaagcgtgcggtgactcccggcaagcgatatattcgtaagaaccgaaaacgtatttccgtccagtcagttttaattccacgaggtgcgttgagcgaagagagtgtatatggcgtaatttatgtgtgggagaaagatgagcaaggtcatgttatacaaaagcagcgtgctgtaatgaagtatccgataacctcgattactcgggaaatgttggataaggaaaaagttgtggacaagcgtattcatagaattctttccggtaggcttgctcaatataatgataatcccaaagaggcgtttgctaaacctgtatatatagataaggagtgtcgtattccaattcgcacggttcgttgttttgcgaagccggcgattaatacgttagttccactcaaaaaagatgataagggaaatcctgttgcttgggtcaatccggggaacaatcatcatgttgctatttatagagatgaagatggcaagtataaggaacgaaccgttacattttgggaagcagtggatcgctgtcgggtaggtataccggctattgtcactcaaccagatactatttgggataatatacttcagcgaaacgatatatctgaaaacgttttagaatccttacctgatgtaaaatggcaatttgttctttcattgcagcaaaatgagatgtttattttaggaatgaatgaggaagattatcgttatgctatggatcaacaagactatgcattgttgaacaaatatctttatcgagtacaaaaattaagtaaaggtgattatagttttaggtatcatacagaaacttctgtcgaagataagtacaatggaaagcccaatttgaaattgtctatgcagatgggaaaactaaaaagggtgagtataaagtcgttattgggattaaatcctcataaggtgcatatctcagttttgggtgaaataaagaaaatatcatgatcaaacgcacattatattttgggaatccctcgtatctgagtttgcgcaatgcccagttagtattgcgtttgccagaagtgtcgaataacgacacattacccgatactttcaaaaaggcggtggagcggacgattcctatcgaagatataggagtggtcgtactcgatcattcgcagataacgatcacacaaggattgctcgaagcccttctcgaaaataattgcgctattatcacttgcgataaaagtcgtttgcctgtgggactcgtactacccctttgtgggaacacgacacaaaacgaacggttccgagaccaacttaatgcttcgttacctttgaaaaagcaactttggcaacagacagtgcagcaaaagattgccaatcaagctgcaattttggagagccggggaattgtagctaaaaatatgcgggcatgggtgggcgaagtccgtagtggagacatcgataatatggaggcacgggctgccgcctattattggtcgagtatattccctcacctcgatagttttcgcagagacagagacggcgatccccccaacaatctactcaattatggctatgctattcttcgggctgttgtcgcccggtcgctcgttattagcggattgttacctactttgggcatacatcatcataaccgttataatgcatattgtttggccgatgatgtgatggagccttatcgcccctatgtcgatggcttggtctgtgaaatcatggaaagtgaaaaagactattcgatgttaacgaccgaattgaaagcaaagttattgtctttaccggtggtagaggtaggtattcaagggcggcgtagtcctttgatggtcgctgtcgcccaaactaccgcctctttatacaaatgttttaacggggagttacgtaaaatcatctatccagaattataattaatatggatagattcagcgaatatcgtattatgtgggtattggtatttttcgatttgccaacagagtcgaaacgggaacgtaaattatatgccgacttccgtaagaaactgttacaagatggatttactatgttccaattttctatttatgtacggcattgtcctagtcgggagaatgccgatgtccatatccgccgggtgaagctttctttaccgccgtttggaaaagtaggtattctctgtgttactgataaacaattcggtatgatggaaattttctatgggaagaaagaggtaaagccacaggttctacctcaacagctcgaactcttttgaaaaacaaaaagccggttttttaactggctttttgataaaatacagctttaatttttaattctaattgattgtgtaattgtttgactattaaattgctatataaattgcgctgtatttaatatgtcaaagatacaaacttgaaagcgaatcacaacgattggaaatgtatctcccggtagtactaggctgtatttaatatgtcaaagatacaaacttgaaagcgaatcacaacggataaagagacatatcgtaaacaagtaggctgtatttaatatgtcaaagatacaaacttgaaagcgaatcacaacctgcaaggaatacagcgaaacgagctctggctgtatttaatatgtcaaagatacaaacttgaaagcgaatcacaaccgattggaaaagtatcgcccggtaataaaagctgtatttaatatgtcaaagatacaaacttgaaagcgaatcacaacaatgtcggatacttcaccacattaacaatagctgtatttaatatgtcaaagatacaaacttgaaagcgaatcacaacatttgaaagatagaggaacatcaggacatagctgtatttaatatgtcaaagatacaaacttgaaagcgaatcacaacttccataagtaagcccatacttggattttgctgtatttaatatgtcaaagatacaaacttgaaagcgaatcacaacgagtgaatctaattgagccattcaaatgaagctgtatttaatatgtcaaagatacaaacttgaaagcgaatcacaacgatatgtgcacgacaaccaatcaggagatggctgtatttaatatgtcaaagatacaaacttgaaagcgaatcacaactttcggggcttcggagtataaagaggaaaggctgtatttaatatgtcaaagatacaaacttgaaagcgaatcacaactgacggaaagatttgcagtgcggtcaactagctgtatttaatatgtcaaagatacaaacttgaaagcgaatcacaacttctcaatgcggtagggcaacagattgctcgctgtatttaatatgtcaaagatacaaacttgaaagcgaatcacaactgctggtgtcccttatcgtgtatctgctagctgtatttaatatgtcaaagatacaaacttgaaagcgaatcacaacgccctactttcgcattggaagctatgcctagctgtatttaatatgtcaaagatacaaacttaaaagcgaatcacaacatgaacatctgcttattcttcagtaggttgtttaatatgtcaaaggtacaaatttgaaagtgaatcacaacgatgaggtgcaaactttggctaaatactacgtcgtcaaggaaaatgtttgtgtatcgaatggggttaaattaatgctaactgctttgttcccaaattgatacaatagggaatgttaatatgcagtttccatgcctatatctgatattcattcggtgtcacacctatcgctttcttgaatatccgtgtaaaatgctgggaatattgaaaatcaagaatgacggattaaacattggtacaagataggaggaaattttgatgcgagcaagttgtggaagattaatgtttttcccgacgaggatgttcttcgtgattgaattgcctttcttctctgacaatctcttggctgaccaatttggaatcgacaaaagtaaaagccgtcgtgacgatgaaccaacttccccgatataaatcttctttataaaacaatgtttcccttttgtgcttatcgtaagtataagccatttctttgttaaacggtttaccaaacttttggataaactcattttggctcatacctaattcgacttgtgtgtctgagaatttacttactaattgggacgtatagcaactactcaggaaacataggcatagcaacggaactaatatcttgaatttcatattgcatttattgatttggtttgcgaagataaggaaaatcacggagcggtacaatagctgtaaatgctgtttaagaattactaaatgaatatgaattgcttgttttggatgtagacaatggctttctgcttggaaagaatttcataatcgataagtccgtcagccgtatttaatatgccagagctgcaaatttgaaagcgaatcacaactttttctgcccacgggattggcggccgatcgctgtatttaatatgtcaaaggtacggatttgaaattaaatcataattaatttagttggattttaaactgtcaatttcttatgtgttgagaataccacggataaatactattgaattatagagtcggtaggtgtgttttgtgtggaaaagcgtatctttgatagctcaatcaaagggataatgaatgtatgagaccgttgggtatttgtcgtacggctttttatgtgtctaaaatggtcatgtgtgccgtacttgtcgtattttcattgagaggcagagcgcagagcagtgtaatgatggagaaggagacttgtgcgtttcttcaatctttgcctgcgggtttacaaaagacacaggccgatgccgtgcgtcgcgccataaacggggattgtaccgctttgatatctgtgcgtaattcgcgtaatacgaaacctgaatcgaaaagtgaggtagtgacaaaggatatcggagggtgttatcgtttgtatcgccctgccggattcgatactattccgttgcctgtgttgatttacttacatgggggtggctggtgtttcgggagtatcaatagttgcgctcatttttgtgcggagttatcgtatcgggcaaagattgctgtgttggccgtggaatatcccttagcacccgaacatgcttatcctgccgccctcaatgcttgtaccgaggccgtcgcattcgctttcgagcatgccggggagtatggcttttttcctgatcggatatctatcggcggagatagttcgggcgggaatcttgctcttgctacggctcttaacctaattcttgcaaaggattctcactcttgccgcatggacagtggaacgatgtgctcttcactttgttcgctcgtgttgttttatccggtgacaaaagcttgggcagacggttcgtcttcgtggaaaaactatgccgagggatatggtctcgatgcccaattgatggaggctttcaatgccgcatacatcggtacaggagatgctcgccagcctcttgtctcgccgggcgtagccgatgacgagctactgaaacagctaccgccgacgcttatcgtcaatgccgagcgggatattcttttatgtcaggggaaggaattggcggccagactttccgggctcggcgttgccgtgagccatacggttttgcctcatacggtgcatctctttatcaccgtgccgggacagcctgcggcattcggggagtctgttcgtttagccgccgactttctcacgttagagtaggggaatcattccgtatcagagaggtggctttacaactatatcgggattgagactccttagatgatcgatgaatgcttgcctctgtttgggagacaagacgagagtctttttgtcggcgaagcggatttctatcctgtccatcgataaggccggtgcgcttaaacaactattggttttcgagattttcgttattcggtcgatcgggaaggaggacgacaagaatatgccgcatttgatatgcagcgtgccgttgtctatggtgtagctcgtgttacagaacgggtcggcaatgaaagcggccgtgatgaccaataaggcgagggctatccaagagaattcgaacaggagcggcaggtaggtcagaagaataattgctataatggcgattagcaagcctttatcgacctttgatttgtaaacggttttcattgtctcgtaggagattagaatatccctccaccaagcataaggcgcagtatacccaaaacgatagatacgatgcagagggttttgccattgtctgatttgagaatggcacagatgatgaggaaaatgaccgatatgggtatggccacccagttgagaaatcccaataggggaataaatgcgacaagggtgatgagcagtgctacgatacctaagaatgttcccattgttttatgctttttgtcgattaacaaatgtattttgtgatttgttccgggggatcgatgtcttgtcaatccattcgggttttatagtcgtagtagtcgtattcccgccagatttccgctttcccgtcgcttttgaggcaggctatggaggggtgggggattccgttgaacatggttgtcttgactgtcgtatagtgaatcatatcctcgaatatgattcggtctcctatttgcaattcgtggtcgaaatgccagtctcctatatagtcgccgctcagacaagagtttcctcccatacgataggcgtatgtgccgggtgcgggttctaccgagcctcgtatcgccggtttatagggcatttcgagacagtcgggcatgtgacaggcaaaagagacgtcgagaatggctgttttgatactgtggttctcgactatatcgactatggtggatactaatgtaccggtctgccaagcgaatgcgctgccgggttcgagaatgatttcgaggccggggtgtctttgtttgaagccccggaggaggttaatcaaatgtgcggtatcgtaatctttgcgggtcatgaggtgaccgcctcccatgttcagccatttgatatgggggagcagatgcccgaatcggtcttcgacctgtgccaaagtcttttcgaggtcgtaggaagtggactcgcagagggtgtggaaatgaagcccctccactccctgcggaagttcaggcagcttgtcggcggttattcctaatcgggaacccggtgcgcagggattgtagaggtcggtttctacctcggaatattcggggttgatacgcaacccgcacgatacccgattgccgtcggctactacttgggggtaaaaccgttcgaattgagtcagggagttgaaggtaatgtggctgctgtatttgagtattgtcgggaaatcccgctcggtataggccggtgagtaggtgtgtgccggactgcccatctcctcgaatgccagccgtgcttcgtgtatggagctggctgtggagtgcggaatatattcccgtatgacggggaatgatttccaaagggcataggctttgaacgccagtataatatttactccggcggcttctttgatagagcgaatgagagcgaggttgcggcgcaatagttcttcttcgagaacatagcagggcgatggtatttgcgatagcgtatcgtgcatgacgtatgaaaattattctatgattgtgaacttggcgaatttgagcaggagctgtttgcgcccgacgttttcaaattcgacggttattttgcagttgtctcccgtatcttctatggctgtaacggttccgtttccgaagcgggcatggcagatgagtgttcctatttctacctgcccggcagcggtcgcgactgtggattgtgtcgtagaatgggtttcacctgtgggtttagagtctatcttagtcaaccgtttgcccggagacggagcaacgaatggtctcggtgcaggtgtgcgatctgtattttcttcgttccatcgggaagttttgtgcggtctttccgtatcgaatggaaatcggttccacgatatggtttctctgggagactcttgtttggtttgtaccggcatatcgacgtatcgagaatcgaggtctttgatgaaccggcttggtgaagggaagactgtttgtctgtgacgatagcgggagagggcgtacgtgagggtgcagttttctcctgcgcgggtgatggccacatagagcagacgtcgttcttcttcgatttcccgttcactgtttttactcatggccgaaggaaagaggtcttcttccactccaacgatgaaaacttgtttgaactccaaccctttcgatgcatggaccgtcatcaaggtcactttatcttgctcggtttcatcgccgttgtcttgatctgtcgccagagaaattttggctaagaagtcggatagggaggtttgttcttctccggcttctttgcgccccacgcaaaattcacggacaccgttcaaaagttcttcgatgttctcttgccggttgatgttttcgggggtacgatccgaggaaatctcaccccaaatgcccgaccgcttgataatcgtttccgccagttccggtgtgttctttttatcggcttcgtagcgtaattcgtctatgaggtccttgaaggttttcaacttgttcaatgtgccgttattgactgccagattgtagcctatggggtcggaaatcaccttccatatactggcttcttgcgagtgtgcccgttcgatgagtttcgagagcgtggtgtctccgattccccgtgcgggatagttgatgactcgtttgagcgcttcttcgtcatcggggtttatcgtcaatctgaaataggcgatggcgtccttgatttctttcctttggtagaacgacatgcctccgtagatgcggtagggtatgttacgctcgcgcagagcttcttccaatacacgggactgtgcgttcgtgcggtagaggacagcgaagtcgttgtaatcacagtgagtcgtgagacgcatttcggcaatacggttcgagacgataaagccttcttcaaaatcggaataggcacttattatttgtactttgttcccttgttctttttcggagaatacttgtttgggtatttgctccttgttcttggcgatgaggctgttggccgtattgacgatattttgtgtggaacggtagtttcgttcgagtttgaatattttcaatcccgggtactctttactcagtccgagtatattgtggatattcgctccccggaacgagtaaatgctttgggcatcgtcgcccaccacgcagatgtggttgtggtcttttcccaactggttgacgatgaggtgttgggcgaaattggtatcttgatactcgtctaccaagatgtaggcgaacaggttgcgatagtgttgcagcacgtcggggtgatccctgaaaagtatattggtattgagcagcaggtcgtcgaaatccattgcccccgacacgaaacagcgttgtcggtagatacggtatatttcgtgaatgaggggccgtttcgaacgagtatccatctcgataagttcccggtttcgcgcataggcttgcggttcgatgagggcatttttcgcatgggaaataatcgcctgcacggttgtgggtttgtatgtcttatcgtcgagttgaagttctctgataatgctttttataagcgacagggaatcggaggcatcgtagatgggaaggtcgtgccgatggcggagccggtcggcattggctcggagtatgcgggagaaaatggagtgaaacgtccctgcccacaagcgttgagctgtctctgttcctaccaatgcggcgatgcgttctttcatctcgttggccgctttgttggtgaaggtgagtgccagcagccggtagggcggatatcccatttgcagcaggtgtgctatcttgtaggtaagtactcttgttttacccgatccggctccggcgataaccaattccggtccatcggtatagagtacggcttcgcgttgctggtcgttcagactgttcagaaaatcttgttccacttttcttttcctttgcttcgtgcaaagatagtgtaaagggttaatagaaacaagcctcggttttgtctgtgtgttatctatttttttgagaatcatactttcgtcattgcagaatcgggttttatttcttcttttcaagtactgtatcggtggtggcggagttttattcttggttcattcttctcagcaacgagaagaacgaaccgttcgggctgctgttttttattaacccctccgtcacttcgtgccacctcccctatattttgcggtgcaaaacacagaggaggagattgatagtaaccctccgctcattgcagtgcgatacccccgcatacggggcacggcaaggggagaaggttgaatactaatgattttctttccctgtcaaa

SEQ ID NO: 2623 - DNA, 15195 bp, synthetic construct
  source 1..15195: mol_type = other DNA
  misc_feature 1..15195: note = Synthetic
ggctcgactaccaatactctgattttcaacggtaaagaaaccatagtcggcagcaaccagaacaactcgtatccaacaacggccggggtaataagaggcggtgtcaactattcaggcggtcagcaatcgttcggcgcatactaccgttacaacccggaacgcggcgatttcagcaactccggttcggaatggctcgatttcaatcctcctgtccgggacaaaatcgacaagcacaccagggcgcacagccacctcgtttccctttattacgaaaaccttcttgccgggaaatttctactgcacctcgacggggatttccgcagcgctcgggaaaacaacagcgtttcaaccacttacccggaatctgccaatccagccgtcaactccacggataaacgctcatctaccctttgggccggaaagctctatctgaatttcccactttggaacggcacgttcaccgccggaacgcaggacagttacacccgcacttccctcgtttaccggatgctcaatgccgatgtcagcgaatatataccctcatcgctgaccgatgcacgtcagacttccgcatcactcttcgcctcatggtcgcgcatattcgggaagttctcactctcggcaggcgccagatacgaatacgtggattatgacttcaatgtcgacggaaaacgggactcggatgtaagccgccacgaccatacgctcacacccgacatttcgctcggttactccttcaacgacttcgcgcaagtgagcctcagctacagactctccaccgtaaagccgccctattcgcagcttaccggttcgctgagttacacgggaatgcatcagatagagggcggcaatcccgcgctgcacgatgaaaagctgcacgacgtgcaactgttcgggacgtggaaaaacttcatgctacaagccgacttcatacgttcgcttgacacttacgcatttgtcaaacaactatatccggctgacaacctacaacttatcatgcatcccgtcaacatcgacgttgctgcattgagcctttatctcgtctggagccgtcccgtgcgccgctggacgcccaacatcacggtcgggatgtaccggcaatggctcacactcggcgataaccgctacgacaaaccgctctttacctattacttcgacaataccttctcgctgccccgtggatggctcgtcaccgccaacgtcagcggcagttcgcagggcgacatgcacacaaaccgattcgccgcctcatggtttaaaatggacgcctccgtcggcaagactttcctcaacaagtcgcttacagtaaaactcaccgccaccgacatcttcaacactgccaacaacgactggacgatgcggacttacggcgtcttcgtggacaaacgcatgagcatggaccggcggggtctcaccctcgacataatctacaacttccagccacgcaaatccagatacaaaggctccgccgcttccgccgccgaaatgaaacgcctctgaacctacctttacttttagtttagatatatgcgacaagtccccgtcgggtaggcggggacttggtatttcaaggatggccggagccgagctgttgaggctacagccgggccttttccttttggatcgcggaagattagtgctgcaggtagtcggcgagctgctcgggacggaagttggcgatgaagtcggcgtgttttgccacttcggcctgtccgtatttcacgtaaacatggcagctgcgacggaacgctgcgttgcgctgcgtgtcttcaagaagcagatagcccatgatgatatggcctgccatctccacgaggcggcgtgccatgaagtcctcgaactctttgttcttggttccggtgacggcctctacggcgttggcatactgctgtgtcatgaatacgagcgtgctcttgatgtcctggtcttcggcgcagacttcctgagcctcgaactctttgatgcggctgaggtaagtgccggtggtgacgtggcgtatggcggccactacctggagctgcgtcgtgccctcgtagatggaggtgatacgggcgtcgcggtagaggcgttcgcagcggtagtctttcataaagcctgaacctccgtgaatctggatggcgtcgtatgtgttctggttggcgaactctgaagtcatccccttggccagaggggtgaaggcgtcggccaggcggctgaacatcttgcactccttcttctcgtcaggggtaagcttgcgttcgcgctctatgtcttcgaaagccttgtagaggtccacgtaacgtgcacaggcgtagaggagtgcgcgcgaggcgtcgagtttggctttcatcacggccaggatttcacccactgcagggaagtcgatgatggctttgccgaactgacggcggtccttggcgtaagagagggcttcgcggtaagctgcctcactgagacctacggactgtgcggcgatgccgagacgggctccgttcatcagagccatgacatacttgatgaggccgaggcggcgtgagcccaccagctcacagggagcgtccttgtagacgagctcgcatgtgggagaacccttgatgcccatcttgttctcgatacggcgaacggtgacgccaccattgcgcttgtcatagacgaacatggagagaccgcggccgtcgcgcgaaccctcttcggagcgtgccagcacaaggtggatgtcgctgtcgccgttggtgatgaagcgtttcacgccgttgagcacccatgagccgtcctctttctgagaggctttgagcataacgctctggaggtcggaaccggcgtcgggctcggtaaggtccatcgacatggtctcgccgtggcagacgcgcggcaggtagcggctgcgctggtcttcgtcgccgaactcatagagggtttcggcgcagtcctggaggccccagaggttctcgaagccggcgtcggcgcggctgacgatatcggcggccattatataaggggtgatgggaaagttcagaccgccgaaacggcgcggcatggccatacccatgaggccggccttgcggcaggcgtcgagattacgcttagtgccgtcggcgtaaataacgcggccgttctccacgcgcgggccctggtggtcgacgtcctcggcgttttcggcaacgatgtcgccgcagatttcgcccacaacttcaagtactttgtcgtacgagtcgatggcgtcgtcatagttctggggagcgtagtcgtagttttccttgtcgcggaaatcgcgctctttgagagagactatcttctccatcatcggatgggtgagatagtgtttgagttctgaattatcagtataaaagttagccattacttcgagttctttttgtagtatttgatgagtttgggcacaacgtcttccatcttgccggtgatgacatagtcggcgatggtgttgataggtgcgttgggatccgagttgatggagatgatgatggaggagtcctgcataccggcgatgtgctgtatctggcccgagataccgcaggctatgtagagcttgggacgcacggtgacgccggtctgtcctatctggcggtcatggtctatccatccggcatcgacggcggcacgtgaggcacccacttcgccgccgagcgtctcggccaacttctgcagaagttcaaagttctccttgctgcccacgccgtagccgccggccacgatgatagggcttcctttcaggttcactttcgacttctccacgtggcggtcgatgatttccaccacgaaatcttcgggagaagtgtatttgcccgggtcgaggtcaattacctcacctacatagttcgagtcgcgcacctcgcgtttcatgacgccttcgcgcacggttgccatctgcgggcggcactcggggttgacgatggtggccacgatgttgccgccgaaggccgggcgaatctggtaaagcaagtcccggtattccgtgccggtcttggggtccttgtggtcgccgatttcaagggcggtgcagtcggcggtaaggccggagtgcagggcggaagaaacgcggggaccgaggtcgcggcctattgaggtggcgcccatgaaggcgatacgcggctctatctcgcggaagaggttgatgaggatggagctgtgcggaagcgaagtgtagggatagaggcggctgtcctgcaccttgtagatggtgtccacaccgtaggggaatatctgtttttcgatgtccttgaggttgtcgccggcaacgacggcctggagcttcacgccgagtttgtcggccagttggcgtcctttggtgagcagttcgaggctcacgtctgctacgcggccgtcttcatactcgcaatatactattatgttgtttttttctgacattttatgagacttttagccgattgtgtggttgacgataagttcctgtatgagctcttcgagagcctggtcggtgttctcgacgttgcgggcttccttggcggtgaagaccacgttctcgatggctttcacctttgtgggggagccggcgaggccgcactggttgaggtcggcgcccacatattcggcgttccactcgccgatgccgaggaacggacgtttctctatgaggggtttgcgcgcatcgtcctgagcgagttccgaaggggcggcggcatatttgaatttctggagattcttggcgttgcgcggacggcagggagcggcgctgccgttgacggtcactacgcagggatagggtgcgcggacggtctccacgccgttttcgagccggcgcttcacggtcactttgccgtctttggcttcgatgatctcctcggcgtaagtgacttgcgggaggttgagtttttcggcaatctggggacccacctgcgcggtgtcgccgtcaatggcctggcggccgccgatgatgaggtcgaagttgcctattttacgcacggccgtggccagggcgtaggaagtggcgagcgtgtcggcaccggcgaaagcgcggtcggagagcactatgcccccgtcggcgccgcggtacattccctcgcggatgatttcggctgcacgcccggggcccatggtgagcaccgtgacggtggtgccgggattctcgtctttcagtttaagcgcttgctcgagcgcattgaggtcttctggattgaagatggcaggaagggccgaacggttgatggtaccgtcttccttcatggcgtctttgcccacgtttctcgtatcaggtacttgcttggccagtacaatgatatttaaactcataattatatagtttgatttgtgtttattcaatctgggtcacggctccaagttaattcgcgtcagaaccggctgcaaaggtagtaaaaaatcctcaatgcaacaaatttttaagatagatttggtatttcggtcaataatagctaaatttgcataagaaattttagaatagatgagactcagacccatactcacggccataggggcggcgctgtgcctcgcggcggcggccgacgtggccgacgaagcgcgtggactgctcgccaagggggacgccgacagcgcctgcgaactcctccgcgccgaacttgacaagaaccccgacggcgggaacgccggcacactgaactcgctgctcggcgacgcagaactgatgaagggcaaccgcgctgctgcccgcgaggcttacaaccgcgcaaccaaacgaggcgtggccgatgcctaccgcggtctcggacgtatcgggatgcaagagtacgacttcagccgggcggccgccgacttcgcaaagtacaccgagctgaaaaacaacgccaagaaacccgcagaccccgccgtggagcaggaacggaagaccgccctcaacgccgtgcagcatcttcgccgcgtcgacgatgtggtgattctcgacagcatagacatgccccgccagagtttcttcgaagcttacaaactgcccccttcctccggccgcttactcaccgccgaccgcaccccgaaccccgacgagatgacgagccactccgcctttataaatgaacaacaagacttcatgctgctcggagtcaccgatacggtggcagagagcaaaccgctggaatacatacgcctcaacaccggcgaatggcaacccgcggaagtggactccactctctacataggcaacttcgactaccccttcatgatgccggacggccagacgctatatttcgccagcgacggcgacctatcgataggtggcctcgacatcttcatggccacgcgcgatcccgaagatgacagctacatgcccccggtcaacctcggaatgccatacaactcgcccttcgacgacttcatgatggccatcgacgacgagcacaacgtcggctggttcgccaccgatcgcaactcccccggcggcgacgtgacggtctatatgttcattcccaacgagatacgccgcaacctcgatcccgacagcgtggacattgccgcccgcgcacgcatcgccgacttcagggccacttggcccgaaggcgccgactacacggagttgctggagaaagtggccgccatcgaccccgacgctgcacccaaagagagcatcttcttcccgctcggcgacggaactgcagtcaccgaccctgacgacttcaacgacgatgcccgcgaattttaccagcaatacatcgccgccgagtcggaactcgccgacgtcaccggcaagttgcgggagatgcgcacccgataccacgaccgcccgtcggaacggctccgcgacgagattctcggcgccgaagccgcccaggaacgctaccgcgagcagatgcgccgactgcgctcacaaaccgtcaggacacagctccgaagaaattaagaatcccatatactattatgataaccaacacctaacctaccatgacctcattcataatagcattactgacgctgctggtcggctctttcctctacggcaagttcgtggagaaagtcttcggagcagacggcaagcgcaagacgccggtccacacgatggccgacggggtggactacgttcccctcccgacgtggaaaatcttcctcatacagtttctgaacatagcgggcctcggacccatcttcggcgccatcatgggcgtgatatacggcccgtcggctttcctgtggatagtcttcggcaccatcttcgccggctccgtgcacgactacctttccggaatgctctcgctgcgttacggcggcgcctcgcaacctgaaatcgtcggtgccgagcttggcaaccgcgtcaagaacgtgatgcgcgccttcgccctgctgctgatgattctcgtcggtgccgtcttcgtctacaaccccgccgacctgctggccatgctcaccccggaaagccttgacaagaccttctggatagtgctgattttctgctactacatgctggccacgcttctgcccatcgacaagctcataggcaagctttatcccctcttcggagtggcattgcttttcatggccgtcggcatcctggccatgctcttcgtgcaccatcaggccgtgcccgaaatctgggaccagttctataaccacaccgccaatccggagcagacacccgtattcccgatgatgttcgtctccatagcctgcggtgccatttccggtttccacgccacgcagtcgcccatgatggctcgctgcatgaagagcgagaagcacggccgctggattttccacggcgccatggtgaccgaaggcgtagtggcactcatctgggctgccgctgccgtggccttcaccggcggttacgacaagctcggcgagtatctcggcaacggctcgcccgccattctggtgaacaacctttctgaaacatggctcggcacgttcggcggcatcctggccgtcctcggcgtcatagccgctcccatcacctccggcgacaccgcgctccgctcagcccggctcatcgccgccgacttcctgcatttcccgcagaagaaaatcaggaaccgcctgatggtgtcggtccccatcttcgtgctctgcttcgtggtgatgctcatgccctacgacgtgctgtggcgctacttcgcgtggtgcaaccaagtgctctctgtcttcaccctctgggccgtaaccgtatggctcgccaagcagcacaagaactacttcatcaccctcatcccggcgctcttcatgacggccgtgacggtgacatacatctgcttcgcccccgaagggctctcgttgctgacacaggagttcttcggcagtgacataccttacacagtggccgtcggcgccgggcttgcggcctgctgcctctttttgggtctcttcgcgcgtttcctcaaaggacgcgaacccaaggtcacccttgaccccgaattatgattgattttgaagcaattacctcactttcggagtactataacctccatacccacacgcagttctgcgacggccacgcccccatgtcggaaatggctgccgcagccgctgcccttcactacaccacgctcggattcacgccacacggcccggtgcacatcgagtctccctgtaacatgagccgcgactacattccggcatacttcgccgaatgtgaccggctacggcaactttatgccgggaggatggaaatactgcgcggcatggagatagattacctcgacccgcgccacggcccgtcgtctcaatattacgccgacctcggcctcgactacagcatcggctcggtgcacttcgtcgccaaccggaaaggggaacagtgggactgcgacggctcgccggaacgcttcggccgctatgtgcgtgaacacttctgcggcgacctgcgttatgtagttgaaaaatacttcgccgccgtttgcgacatgctgacacgcggaggcttccaccttctcggccacttcgacaagatagggcgcaacgccgatgccgtggagccgggcgtagaggactgcgaatactacctgcgcggcgtggaagacgtgctcgcctgcatacacgacaccggcgtcgccgtggagctgaacacaaagtacctcaaggataccggctcttcccaaacgtgcgctggctcccgatggtcatggaaaccggcgccacgctcgtggtaaacagcgacgcccattaccccgacaagctcgacaacgggcgccccgaagcgctgaaattaattgaataacagaaagataattatgaaaacaataggcgacagcgtccccgacctgctgggacgcaacactgacggccaggaagtaagactctccgacttccccggcaagaacttcatcatctacttctaccccaaagacaacacgcccggatgcacggccgaagcctgcgacttccgcgacaactacgagacctttctcgagatgggctatgtagtgataggggtaagcaaggacagcgacgcatcgcacgcacgcttccgccagaaatacgaccttcccttcatcctcatcgccgacacagagcacaagctctgcgaagaattcggagtatggcagctcaagaagatggccggccgagaatacatggggatagtgcgcacaaccttcgtagtgaacgccgcccacgaggtgaccgacgtagtgaaaaaagtaaagaccaaagaagcctccgcccagctctttgccctcctcgaccaacgcaacagccccaaccccgcctgacgtaaacaattccacaaaccccaccgcagctgccttcccttcgcaggcagctgtttttgcgtatatctccaaatgcccctattttataaaacgtctaaatcattattgaaattcattgcaagtcactcaccctgccgacatttaataaaatattaatcctaaaaatcattttggtaattcgataattatagttacctttgcaagtgattaagtgctgacgacttttcgtcgtagtaaaaagacgagagaaagaccgtagtcctcctctccaaatgttttcacaacggaataatccttattgtgatttgcttcttttattactttacgcggcaaagttaagcattttttctttaacctcaaaataaaataccgaaaaaatgaaaatattaggcttggatcttggcgtaggttctataggatgggctttaatcgagaccgacaccaacgataatcttttggatatcacaggcatcggttgccggatagttcctttaacgcccgacgaaaccaatggtttcacctcaggcaacggaaagacaaaatgtcaggaacgcactgtcgctcgcactatccggaaaggaatggacagataccaaatgcgccgggagcaattgtcggaagcgcttaaacgcttgcaaatacttgaccctcaacatactctgactaatcttcctcccctcgaattgtggggacttcgtgccaaagcagcttccgagaaagtcacactcaaagagcttggaagagtgcttatgcacatcaaccaaaagcgcggttacaaacatgccaaatcagacatgggcgattcatcgaaatctgactatgtggcacgtgtaaaccaaaatttcgccgacattctcgccgaaaatatgaccgttggccagcacttctatcacaaactgaaagactcaaaggcaatcggctccaagggaggcgaattcgtatcgttccgcatcaaggaaaatgtgttcccgcgcaaggcatacgagcaggaacttgacaccatcatgcaagtgcaacaagcctcctatccagacattctgactgatgccatcgtagccgaactgaaaaatataatattctatcagcggccattgaaatcgtgcaaacaccttgtgagtatctgcgagttcgaaaagcgcgaatttaaaaaccgggaaggaaaacctgtcaccgtaggaccgaaagtagctccgcgtacatctccgttggcccacactaccgccatttgggaagctgtcaacaatatacggctttcaaatccgcacaacagaaataaggcaacggaacttacaggttccctcttcgacaaagggaatcaacttccgcggcaagcacgattgctgcaacgcgacttcctcttgactccggaagaaaaaaggaccgtctttgacttcctcaacatacatgaaaaacttactgtcaccgacctcctgaaactgctcggactcaaaaaagcggatggtttcaaaccggacaaggccgtaggaaaaggcataaagggaaacacgactttcgtagctctcgaaaaagccctcgaaggaatgcctgatgctgaaaagcacctgcagttcgatctctctttgattgaaaaagttgacccggaaacaggtgaaatagtccaagtgatagaccctgcctatacacaacaaccgctctaccgtctctggcacaccgtttattccgtctccgataaagacgaactggccaaagctcttgaaaaaatcggaataaccgacccagatatagtcgaaaggctctatgccctcgactttgtgaaacccggatattccaaccgctctgcaaaattcatgcgtcgcatacttccacatctgatgcaagggcacgattatttcgagtcctgccaagccatcgggataaatcattccggaagcattactacagtagagaacgattcccgtccgttgcttgaccatctggagaatctcaaaaaaacgaacttcgccaacctgtcgtcgagaagattcttaatcagatgattaatgtagtcaacggcatagtggaagaattcggacctatcgacgagatacgaattgagctcgcccgggaactacgcaagaccaaggagcagcgcgccttgatgacatctaatctgtcaaaacgtgaacgcgaaaacaaaggtatcgctgaaaaaataacggagatgaacatcaatgcttcccgaacgagaatacagaagtaccgtctttgggaagaaaccggacatgtctgcatgtattgcggacagacggtgcccgcgtcgcaatttcttgaaggaaacggtgccgaaatcgaacacatcataccgcgttcactactgttcgacgacagtttcgccaaccgcacatgcgcttgccgcgactgcaacaaggagaaagggaacatgacagcgtacgacttcatgaacaccaaaagcgatgatgaattcaccaaatatgtgaaacgtgttgaagatctcttctcccgcaaaatcatttcaaaaaccaaaagagaccgactactcactccgggcaatgaaatccccgccgatttcctgaaccgcgatttgaccctcagtcaatacatagccaagaaagcgcatgaaatattacgcggaatagcccgcaacgtatggtccactaccggctcggtcaccgactttttccgccacgcttgggggtatgacgaaatccttcatgatctcaacatcgaccgctaccgcctcgggggccgagtcgggttggtgcaatatgaacacaatggccagacgcatcagcgtgaacgcatcaccgactggaccaaacgactcgaccaccgccatcacgccatcgacgcgcttaccatcgcactcacaagacaaagtttcattcaacgcctcaacaacctcaattcccaacgggggaatatccacgtcgaactgatggagcaaactgatgagttgcggaaaggtcgttccttgttggaggaatgggcacgtacccgtccgcatttccccgtttcagaagtgaccgccaaagtcagtgaaattgccatatcactgaaatcaggcaaaaaactcaccactccgggaaagagatacgtcattaagaacgggcggcgtaaactcgtacaaagccagatacttgtgccgaggggagctctgcacgaacaatccatctatggtaaaatcaagttgccgacagaaaaagtgaccgtcaaaaaatccttcgaagcagtcgaccgcatttataacagcaaaattcagtcagcagtccgcgcccgtatcgaacaacatgccggggacttgaaaaaggcagttaaatctcttaacacccaaccgctgacagtcatgtcacgcaacggcactcctaccgaaatcacaactgtaacgctgcttgcaaaccactacgtgctacgctataaagtggaaacgctgaaatacaaagatttgtcatcaatcatcgacaaggctgcacgcgaagccattgaaacccgcttcgccgaatgcggcaacgatgacaagaagtaccaaaaaagctttgccgacggtaactgcatcgtttcaccatgcaccggcatgcctatcaagactgtaagatgccttacaggcttgaaagaacaaagcgtcgtcgctgtcagaaaagatgtttccggcaattgtattggttacgcaaagaccggtggaaacaatcatgtggcattctaccaaaatgcaaaagggaaagtcgattcgcttgtaacgtcgacatggatagccacaaaacgcaaacgcctgggcgtccccgtggttatcactgaccctgcatcagcctgggattacctcgctgaactccccgaaatcgacgatgtgcgcgaagtcgcaatgtcaatgcccgaacgtgactctactttcattatggatatgaggatgggcgacatgtttatccttgggatgaccgatgaagaataccgggatgccatagctaccggtgacaaagcgactttgctcaaacatttgtatcgcgtacaaaaactaacgcagggcgattattattttagactacacacagaaaccacaatcggcaaagaagagaaaaaggacatcttaatgaaatcgctctatcgcgttacttctaccaaaacgcttttcagccttcatccccgaaaggtaaaaatcagccatatcggaaaactaatcatgtagagccctaaaatgatcaagaaaaccctctgcttctcgaataaaacacaactttcactgaaactcgggcagctggtaatacggcttcccgaagcttcagatgagggcagtgtcataacacgacctatcgaagatataggaataatcgtacttgaaagccgttttatcactatcacctcggcactcatggcctgtcttgcggaaaacaatgtcgccgttatgatttgtaatgacaaacatataccctccgccatgatgctgccactaagctacaattcgcagaccacgaagaaagcgaatgcacaaattgcatcttcacaacccttgaaaaaacagctatggcagcaaacagtgtccgcaaaaataagcaatcagggagcactgcttgccgaaaaatgttcagaagagaccggatgcatggctatatgggctaaaaatgtaaagagcggcgacaaggacaacctcgaagcgagggctgctgtcttttattggaagaatctgttcccggaaaattacgacttcgcccgaggtgacgatacacaccccataaatcctcttctaaactatggctatgctatcctgcgtgctgtcgttgcccgtgctatcgttgcaacaggactaattccctctatcggactgtttcactcgaacaaatacaatccttattgtttggctgacgacattatggaaccataccgaccttatgtcgataaaaaggtctgtgaaataatcgacctttatgggcgcgaatgtggcctgacaaaggaaatcaagaaagagctcctttctattcccgttgttgatgtaaaaatcaataatctcagacgtccgttgatggtggccgtcaccattaccgtggcctcacttgcaaaatgctattgcggagaaatacgtaaaatttcatatcccgatatgtgatgtcgttcaacactcgtttcagtgaatataaaattatgtgggtgatggtatttttcgacttaccgaccgaaactaaaaagcaacgcagggatgccgctaaatttcggaaatacctcattgaagacggatttacaatgttccaatactccatatatgttcggcactgctcttcaaaagagaatgccgacacacatcaaaagcgtgtgagccataatataccgggcgacggaaaagtttgcctgatgataattacagatcgtcagttcagtgagataaagatattcgaaggcacagcccgggttcaaccgatgcctgctgcagttcaacttgagcttttctgagcaagaaaataggattgaaaaatacagtaaaaaaccggtatcgagatatagcctcgccccggttttttattttgaacacgaacctgtgtaattcactgaataataactttttacatacaataaggtagtgtttcactgagtgtgtctgaggcgagttcactcaagcctatagacctca

SEQ ID NO: 2624 - DNA, 8097 bp, synthetic construct
  misc_feature 1..8097: note = Synthetic
  source 1..8097: mol_type = other DNA
ttaccctcctcctttaccgtgtcccgtaacacggcagaggagaaaggcgaatacagttatctcgtttgttaaaacgatgtaacaagggcgttaaaccacctcccctatattttgctacgcaaaacacaggggagctgtccaaaggacggaggggttgatacaagccaaagtttctaagacaaaaaatatcttggatttgcacagcggattaaaccccacccctcagaaactcccgtccctgagagctcgccccgtcgtccccgacgccgctccatacccctgattttcggctcataaccctttgataatatctaatatatagattaatatcctttttacactattaaaggaaatcgtttggagaaggatatgacagcagtgattataattttacgaatgggattttgggttggagacagagaaatattcttaaaaagtttttgataaaatagatatatataaaaaagaacgaggagtataaatactcccccttccaaatgttttcacaacggaataatccttattgtgatttgctttcaaatttgtgttgacaaatatacatataattttttaatactattgtatttttcgataaatttttttatatttacacattaaatataataataccataaaatatatagtaggcatgaaaaacatcttaggattagatttaggtttatcgagtataggttggtctgttataagagaaaattcagaagaacaggagttggtagctatgggtagccgagttgtatcgcttacagccgcagaactatcttcttttacacaaggaaatggggtgtctataaattcacagaggactcaaaaaaggactcaacgtaaaggatatgacagatatcaattgcgtcgcacattgttaaggaataagttggatacattaggaatgttacccgatgactctttatcttatttgcctaaactccaattatggggattaagagcaaaggctgttacgcaacgaatcgagttgaacgagttggggagagttttgttacatttgaatcaaaaacgtggatataagtcaataaaaagtgatttttcgggtgataagaaaataaccgattatgtaaaaactgttaaaacccgttatgatgaattgaaagagatgagattgactattggggaattattttttcgaagactgacagaaaatgctttttttcgttgtaaagaacaagtatatccccgtcaggcttatgtcgaggagtttgattgtattatgaattgtcaaagaaaattttatcccgatatattgactgatgagacaatcagatgtattagagatgagattatatattaccaacgaccgttaaagtcgtgcaaatacttggtgtcgcgctgtgaatttgaaaagcgtttctatctgaatgcggccggtaaaaagaccgaagctggtcctaaggtatcaccacgcacttctccattgtttcaagtatgccgtttgtgggagagtatcaataatattgtagtcaaggaccgtcggaatgaaattgtttttatttcggcggagcaaagagcagctttgtttgattttttgaatactcacgagaaactcaaaggtagcgatctcttgaaactgttgggtttgtccaagacgtatggttaccggttgggtgagcagtttaagactggaatacaggggaacaaaacccgagtggaaatcgaacgagctttgggcaattatcctgataagaaaagattgttgcaatttaatcttcaagaggaatcttcgtcgatggtcaatactgaaacgggtgagattattcccatgattagcctgtcgtttgagcaggaaccgctttatcggctgtggcatgtattgtattcgattgacgatcgggagcagttacagtcggtgttgcgacagaaattcggaattgatgatgacgaggttttagaacggctgagcgccatcgatttggtgaaagccggttttggaaataaatcgagcaaggctatacgtcgcatattgccatttttgcagttgggtatgaactatgcagaggcttgtgaggctgctgggtataaccatagcaataactatacaaaggctgaaaatgaggcgcgcgctttgctggatagattaccggcgattaaaaagaacgagcttcggcaaccagtgttgagaagatcctcaatcaaatggttaatgtggtgaatgcgcttatggaaaaatatggacgattcgatgagatccgtgtggagttggcgcgtgaattgaaacaaagtaaagaagaacgttctaatacatataaaagtataaataagaatcaaagggaaaatgagcaaattgctaaacgtatagttgaatatggtgtgccaactcgatctcgcatacagaaatataaaatgtgggaggaatcgaaacactgttgtatctattgcgggcaaccggtagatgtgggggattttttgcgaggatttgatgtcgaggtagaacatattattcctaaatcattgtatttcgacgatagttttgcaaataaagtttgttcttgtcgtagctgtaataaagagaaaaataatcgcactgcatatgattatatgaaatcaaaaggcgaaaaagctctgtccgactatgtcgaacgagttaacacaatgtacacaaataaccaaattagcaagaccaagtggcaaaacttattaaccccagtcgataaaatttctatcgatttcatagatcgacaattacgagagagtcagtatatagcaaggaaagccaaagagattctgacatcgatttgttataatgtgacggctacgagtggttcggttaccagtttcttgcgacatgtttggggctgggataccgtattacacgatctcaattttgaccgatataagaaagtgggtttaaccgaggtaatagaggtaaaccataggggcagtgtcattaggagagagcaaataaaggattggagtaagagattcgatcatcgccaccatgccattgatgcacttacgattgcctgtaccaaacaggcgtatattcagcgcttgaataatttgagagcagaagaaggaccggatttcaacaaaatgagtttggaacgttatatacagtcacaacctcatttctcagttgcacaagtccgtgaggctgttgatagaatattagtgtcgtttagagccggtaagcgtgcggtgactcccggcaagcgatatattcgtaagaaccgaaaacgtatttccgtccagtcagttttaattccacgaggtgcgttgagcgaagagagtgtatatggcgtaattcatgtgtgggagaaagatgagcaaggtcatgttatacaaaagcagcgtgctgtaatgaagtatccgataacctcgattaatcgggaaatgttggataaggaaaaagttgtggacaagcgtattcatagaatcctttccggtaggcttgctcaatataatgataatcccaaagaggcgtttgctaaacctgtatatatagataaggagtgtcgtattccaattcgcacggttcgttgttttgcgaagccggcgattaatacgttagttccactcaaaaaagatgataagggaaatcctgttgcttgggtcaatccggggaacaatcatcatgttgctatttatagagatgaagatggcaagtataaggaacgaaccgttacattttgggaagcagtggatcgctgtcgggtaggtataccggctattgtcactcaaccagatactatttgggataatatacttcagcgaaacgatatatctgaaaacgttttagaatccttacctgatgtaaaatggcaatttgttctttcattgcagcaaaatgagatgtttattttaggaatgaatgaggaagattatcgttatgctatggatcaacaagactatgcattgttgaacaaatatctttatcgagtacaaaaattaagtaagagtgattatagttttaggtatcatacagaaacttctgtcgaagataagtacgatggaaagcccaatttgaaattgtctatgcagatgggaaaactaaaaagggtgagtataaagtcgttattgggattaaatcctcataaggtgcatatctcagttttgggtgaaataaaggaaatatcatgatcaaacgcacattatattttgggaatccctcgtatctgagtttgcgcaatgcacagctagtactgcgtctgccagaagtgtcgaataacgacacattacccgatactttcaaaaaagaggcggagcggacgattcctatcgaagatataggagtggtcgtactcgatcattcgcagataacaatcacacaaggattgctcgaagcccttctcgaaaataattgtgctattatcacttgcgataaaagtcgtttgcctgtgggactcatactacccctttgtgggaacacgacacaaaacgaacggttccgagaccaacttaatgcttcgttacctttgaaaaagcaactttggcaacagacagtgcagcaaaagattgccaatcaagctgcaattttggagagccagggaattatagccaaaaatatgcgggcatgggtgggcgaagtccgtagtggagacatcgataatatggaggcacgggctgccgcctattattggtcgagtatattccctcacctcgatagttttcgcagagacagagacggcgatcctcccaacaatctactcaattatggttatgccattcttcgggctgttgtcgctcggtcgctcgttattagcggattgttacctactttgggcatacatcatcataaccgttataatgcatattgtttggccgatgatgtgatggagccttatcgcccctatgtcgatggcttggtctgtgaaatcatggaaagtggaaaggactattcgatgttaacgaccgaattgaaagcaaagttattgtctttaccggtggtagaggtaggtattcaagggcggcgtagtcctttgatggtcgctgtcgcccaaactaccgcctctttatacaaatgttttaacggggagttacgtaaaatcatctatccagaattataattaatatggatagattcagcgaatatcgtattatgtgggtattggtatttttcgatttgccaacagagacgaaacgagaacgtaaattgtatgccgacttccgtaagaaactgttgcaagatggatttactatgtttcaattttccatttatgtgcggcattgtcctagtagggagaatgccgatgtacatatccgccgggtgaagctttctttaccgccgtttggaaaagtaggtattctctgtgttactgataaacaattcggtatgatggaaatattttccgcccgcaaaacgattccgcccaacgccccgggacaacaactcgaacttttctaaaaacaaaaaaggactccgcactatacttggagtcctttttattcgaatactttttctattctaatcttcgattcaaattcctgaaatacagcatactgtatatatcctgctgtattcgatatgtcaaagatacaattttgaaagcaatttacaacttacttacgaatactttttgaggaaaaattgctgtattcgatatgtcaaagatacaattttgaaagcaatttacaacatctccacttataggattcttatcgccatagctgtattcgatatgtcaaagatacaattttgaaagcaatttacaacatttctctggggcatatagagaagtggattgctgtattcgatatgtcaaagatacaattttgaaagcaatttacaactataaacacgtttaaagatgttttcttaatgctgtattcgatatgtcaaagatacaattttgaaagcaatttacaacgtccattctatcaaatattgcaaagaccccgctgtattcgatatgtcaaagatacaattttgaaagcaatttacaacggtcgtaacgctaagaatggggcatttattgctgtattcgatatgtcaaagatacaattttgaaagcaatttacaacaaacaattctttgcaatgcacgccagtaagctgtattcgatatgtcaaagatacaattttgaaagcaatttacaactaacacaagatatttaagtataatgtttttgctgtattcgatatgtcaaagatacaattttgaaagcaatttacaaccacagcgtcataatcggtatatccaaaaagctgtattcgatatgtcaaagatacaattttgaaagcaatttacaacgacgataatagtaaggttgttgagaggtctgctgtattcgatatgtcaaagatacaattttgaaagcaatttacaactatcaattaaacaaatggaaaaggatctatgctgtattcgatatgtcaaagatacaattttgaaagcaatttacaacctacaaagtcaagtacaattagataatactgctgtattcgatatgtcaaagatacaattttgaaagcaatttacaacacgcggtagatgctacaagattacccatttgctgtattcgatatgtcaaagatacaattttgaaagcaatttacaactttgtaggggcgagtagtcccataatataagctgtattcgatatgtcaaagatacaattttgaaagcaatttacaacaatccatgtgattttgtacgctgaaatttgctgtattcgatatgtcaaagatacaattttgaaagcaatttacaacgtgcgtattgtggaacatattagtgtttctgctgtattcgatatgtcaaagatacaattttgaaagcaatttacaaccgaagattatcaacataccgaagtttgcaggctgtattcgatatgtcaaagatacaattttgaaagcaatttacaactgaactctattcgctcacgctcgaccaagagctgtattcgatatgtcaaagatacaatattagaagcaaattcacaacatgtgtacatgcatgtgtgtattttggaatgaaatataccgttttatttaaaaacaaatcgattttaaatttcatttttaactataatttaggcattcccaagaattcaattgtaaaagaagttttttcgacccaatcctttgagattatattctacaaattctgatttcaggcagaaaagccgatttcctacgtcaaaaaacacaagcaaaatatttttcatttccaagttatcctttcggacgataagttatatatttgcaagcaattcatagcagtattcaagccgctataaaaacggctattaccatataccaaatttcaaaaaacggacaaaatcatgaaaaccgtcaacaaaaatacatatacgtttcccgataggaaatataaaaacaggttcaaaaattatagcatcaacgggaaatctcttttgatacttttgtgttgcatattcagctcacaagtctgtttaggattgaccatccacgaccaaaccaaatactatacaatcaccgtcggacgcagtataaccctctactattacggcatcagtggggcggaatctttctcggcaacaccgtggggaatgggaaccgaatgtataaaggtaacttcggggaaaaacggacaaacaggttggtgcaccataaaagcggtggaaaaaacgacaaatattccggtcgtaaccgtgagttacgcctacaaaaatgcaaaaggagagataagagatatttacaacttctacaacaaaatcaaaatcgtcgaactcgaagccgtaagtattcccgagacactcacattgggaatcggagaaagttattctttttctcccaccttgacaccgagcgatgcaagcacgacctataaatgggactcgagcgacgaatccgtagccaaaatagaaaacggaacaatcaccgccctaaaagccggaaatacgatcatcacctgcacaacacacaacggaaaaacagcagaatgcaaaataacggtaaaaccgacattggcagaaaatataacgatagaacccagcgaactaaaaatggatcccggagaacggaaacaactcatcgccacgttctcgcctgaaaatgtctcatcgaagaaactgacgtgggaaagttccgatcgagatgttgccatcgtaaccaacgaaggtctggtcgttgctctttcgccaggct

SEQ ID NO: 2625 - DNA, 5521 bp, synthetic construct
  misc_feature 1..5521: note = Synthetic
  source 1..5521: mol_type = other DNA
tccatacctctgattttcggctcataaccctttgataatatataatatatagattaatatcttttttacactattaaaggaaatcgtttggagaagggtatgacagcagtgattataattttgcgaataggattttgggttggggacggagaaatattcttaaaaagcttttgataaaatagagatatataaaaaagaacgaggagtataaatactcccccttccaaatgttttcacaacggaataatccttattgtgatttgctttcaaatttatgttgacaaatatatatataattttttaatactattgtatttttcgataaatttttttatgtttacatattaaatataataataccataaaatatatagtaggcatgaaaaacatcttaggattagatttaggttcatcgagtataggttggtctgttataagagaaaattcagaagaacaggagttggtagctatgggtagccgagttgtatcgcttacagccgcagaactatcttcttttacacaaggaaatggggtgtctataaattcacagaggactcaaaaaaggactcaacgtaaaggatatgacaggtatcaattgcgtcgcacattgttaaggaataagttggatacattaggaatgttacctgatgactctttatctcatttgcctaaacttcaattgtggggattaagggcaaaggctgttacgcaacgaatcgagttgaacgagttggggagagttttgttacatttgaatcaaaaacgtggatataagtcaataaaaagtgatttttcgggtgataagaaaataaccgattatgtaaaaattgttaaaacccgttatgatgaattgaaagagaagagattgactattggggaattattttttcgaagactgacagaaaatgccttttttcgttgtaaagaacaagtatatccccgtcaggcttatgtcgaggagtttgattgtattatgaattgtcaaagaaaattttatcccgatatattgactgatgagacaatcagatgtattagagatgagattatatattaccaacgaccgttaaagtcgtgcaaatacttggtgtcgcgctgtgaatttgaaaagcgtttctatctgaatgcggccggtaaaaagaccgaagctggccctaaggtagcaccgcgcacttctccattgtttcaagtatgccgtttgtgggagagtatcaataatattgtagtcaaggaccgtcggaatgaaattgtttttatttcggcggagcaaagagccgctttgtttgattttttgaatactcacgagaaactcaaaggtagcgatctcttgaaactgttgggtttgtccaagacgtatggttaccggttgggtgagcagtttaagactggaatacaagggaacaaaacccgagtggaaatcgaacgagctttgggcaattatcctgataagaaaagattgttgcaatttaatcttcaagaggaatcttcgtcgatggttaatactgaaacgggtgagattattcccatgattagtctgtcgtttgagcaggaaccgctttatcggctgtggcatgtattgtattcgattgacgatcgggagcagttacagtcggtgttgcgacagaaattcggaattgatgatgacgaggttttagaacgactgagcgctatcgatttggtgaaagctggttttggaaataaatcgagcaaggctatacgtcgcatattgccatttttgcagttaggcatgaactatgcagaagcttgtgaggctgctgggtatacccatagcaataactatacaaaggctgaaaatgaggcgcacgctttgctggatagattaccggcgattaaaaagaacgagcttcggcaaccagtggttgagaagatcctcaatcaaatggttaatgtggtgaatgcgcttatggaaaaatatggacgattcgatgagatccgtgtggagttggctcgtgaattgaaacaaagtaaagaagaacgttctaatacatataaaagtataaataagaatcaaagggaaaatgagcaaattgctaaacgtatagttgaatatggtgtgccaactcgatctcgcatacagaaatataaaatgtgggaggaatcgaaacactgttgtatctatttaaatccggaaaaacgaaacgaaccttcttgcaaaaacgaagtggttcaaaacttgcaaaaacgaagcgttcaaaaatcgacaagcgcacagtacaaaaaaagcaccgaaaaaacatatttcttcggtgcttttttattgctctgtcttttggctatctcaccaaaaatcactaactttaaacaataaagaatatatcatatttggttttaacgctgttttaataccattaaaacgacgttatattataccgccggaatcgtgggcgcggcacgcttatatagcattatgtccgtatacgtggcgttgtagttcatgtgtgcgttaagctcggtttttatacagccttcgaaagggtcgctcagagtccgattcctacccatccattcacaaagctccacaatagacgacttgtttgacgtgaagtaaataaacgagtggccgttcaagaccgtcagcacgtcaaggtagtcggacagtctccaatacatcgtataggtacccacttcggtggagagataaggcgggtcaaccagaaacaccgcaccgggcgtatccttgtattcattgaaaatctcccgatagtcccgagaggtgatttccagtccttccaaataatcgggacattccggataatcgtttttgcggatattgttataaagggtctctttccgcatctttgaaacactcatcctgtatttcatggagaacataatggaggcagagagcgtgatgaaatctacgtatccggtttcgagttcctctcgctgaatgcggtcgaatacgcactctcgaatgtctccggtgatcgccttatgccgaggtacggtattgcccacgatttcccgaatatcggcaatcaatcgattggtatatggtatgttttcaagccgctttcggtagttgtcgaaatcgttgtacaccacagtggcattcggcttgcaccgcttggcgatgtgggagagcaggccggagcctccgaataggtcgacgaatgtggcgtcgtcgggaaactgtttcaaaacctttataaactcatgagcgaacatgcgtttttgtcctacgaatgggagaggggcagataaatacattttcttttttatcattcaggtcaaatttaatattgtcattgccggcaaaggtatcgtgcacatggacttgtttcatgccggggcgttctcattcctctgcaaggagattgcagtccgctttgaatcgtcggataaggtcatatacttttcgctcgcatacgccgtatttctcggccagcacagccacgatataggaggttttctcaccatcggccagcagccggttatagtcgttgaacaggtcgatatatcggacatcatcgagacgaatgcccgcatcgcgacagaatttcaatagttcccggtttaatttcagtatctcaattactttcattctccaaaaaaatagtacatttgcaatatctcacttactcaatgcgcctttgcgcatacaacaaaatataaagtccgaaaacagaatggtcgaagggcatttgcccccggcttccattccgggttcggactgtgttgttaaaagtaggtgagatgactattaacaggccgggggctttcttttttatccccgtcctcttgggtttttagcagatcttttacatgcctgtatcctttttctcgttgaactcccgttccagttctctcgcctccacctcgggaagttcctcccaatccgttaggacggttccgtccggagcggaaacagccggagtaaccgtgatatactcatctgttttatataccaataaatatccttctctcgcttttttccgtatcatttttcatacctccatatcattttcatactcctatcaccctccaatttttatcagtggctattttcacctcatcttctgtaatttctgtaactccaagacaaccggttatatctattactctttcggattctccattaaaatccggtaattggttaaaaatctccaatatagcttcatgagaaagagctgaatatctgacatataaatttgctccgttataagtataatcaaattgtgattccggtgaaaaggttagccccgtaagtccgcatgatggttgttgataagaaccggaccatgacaaacatcttatctttgtgttttttagatccaatctcatagtcttcggtacaccatccatattaagaatgagcccgtttccttttgaaccaaaatcgcttggcagttcaaaatcatatagttgataatcactttgaaacaatcctattgcatcctctacattcggcatcgatttgggtaataccaattttctcaatgagatgcaattataaaaacagttcctaacataagtaccggtaaatggttcttgaggcatgattatttcttcaaccgattgtgccatgccataaaagcaatgactccatgtgttagtcgatgataccttcattttagaaaggtctactttacctctggtttgatttagacagccccataagtattctccaatttctcctccttcaatctgaatgtcacttaaatcatcacagaatatatttctaaatttataacctattaaataggttaattttaaagtatccccggtatgtaatatatatcttaacctatttttcgaatacggaaaagttggtatgcagtctattgtatccgatagaaattttatggcttccaatggtaatgttgacaactcaaatgaacagtatttgagtttcctaatatttttcccaaatacaatatatttataaggagctatattatatatcttttgcgggtaatttacatatacataaccgtttggataaatataatggtcgtagtcaattgaatataattcatatgaaaccttcattatccaaaattccctgccattagtgtctattctgccagttcctttcaaatatttatggtttgttatattggtagtcgttggggcgatagcggtataagtttcactaccgtctccccaatctatcttataactttttacattaaaagaggagtactgcacaaaaatataatcttcaaatgtagtcggtttatcgtctgtcaccacaaaccaaatgtcattgcccgggcattcgtcaagatttccccatgacgggtcgggaataaatttaggtttttgaacaatagccggcacgctgaccgtttctttcaccgcaacggcctccggcacgacgatttgctcttttaccgcaacggcatccggtacaattatccgctctttcaccatcacgtaatcgcacttctccatacctcacacgattttaatgttcgtctcgtcctcaccaccatactcccagtatccgctcgcgaaatcggagtcggtacggcaataatgcctttctacggtaaggatt

SEQ ID NO: 2626 - DNA, 4266 bp, synthetic construct
  misc_feature 1..4266: note = Synthetic
  source 1..4266: mol_type = other DNA
cacatcgtttccatgattatccctctcccctgtaccggaatgctgaacaggagagaaggacaaacacgatatataagaaagtattaccctcctcctttaccgtgtcccgtaacacggcagaggagaaaggcgaatacagttatctcgtttgttaaaacgatgtaacaagggcgttaaaccacctcccctatattttgctacgcaaaacacaggggagctgtccaaaggacggaggggttgatacaagccaaagtttctaagacaaaaaatatcttggatttgcacagcggattaaaccccacccctcagaaactcccgtccctgagagctcgccccgtcgtccccgacgccgctccatacccctgattttcggctcataaccctttgataatatctaatatatagattaatatcctttttacactattaaaggaaatcgtttggagaaggatatgacagcagtgattataattttacgaatgggattttgggttggagacagagaaatattcttaaaaagtttttgataaaatagatatatataaaaaagaacgaggagtataaatactcccccttccaaatgttttcacaacggaataatccttattgtgatttgctttcaaatttgtgttgacaaatatacatataattttttaatactattgtatttttcgataaatttttttatatttacacattaaatataataataccataaaatatatagtaggcatgaaaaacatcttaggattagatttaggtttatcgagtataggttggtctgttataagagaaaattcagaagaacaggagttggtagctatgggtagccgagttgtatcgcttacagccgcagaactatcttcttttacacaaggaaatggggtgtctataaattcacagaggactcaaaaaaggactcaacgtaaaggatatgacagatatcaattgcgtcgcacattgttaaggaataagttggatacattaggaatgttacccgatgactctttatcttatttgcctaaactccaattatggggattaagagcaaaggctgttacgcaacgaatcgagttgaacgagttggggagagttttgttacatttgaatcaaaaacgtggatataagtcaataaaaagtgatttttcgggtgataagaaaataaccgattatgtaaaaactgttaaaacccgttatgatgaattgaaagagatgagattgactattggggaattattttttcgaagactgacagaaaatgctttttttcgttgtaaagaacaagtatatccccgtcaggcttatgtcgaggagtttgattgtattatgaattgtcaaagaaaattttatcccgatatattgactgatgagacaatcagatgtattagagatgagattatatattaccaacgaccgttaaagtcgtgcaaatacttggtgtcgcgctgtgaatttgaaaagcgtttctatctgaatgcggccggtaaaaagaccgaagctggtcctaaggtatcaccacgcacttctccattgtttcaagtatgccgtttgtgggagagtatcaataatattgtagtcaaggaccgtcggaatgaaattgtttttatttcggcggagcaaagagcagctttgtttgattttttgaatactcacgagaaactcaaaggtagcgatctcttgaaactgttgggtttgtccaagacgtatggttaccggttgggtgagcagtttaagactggaatacaggggaacaaaacccgagtggaaatcgaacgagctttgggcaattatcctgataagaaaagattgttgcaatttaatcttcaagaggaatcttcgtcgatggtcaatactgaaacgggtgagattattcccatgattagcctgtcgtttgagcaggaaccgctttatcggctgtggcatgtattgtattcgattgacgatcgggagcagttacagtcggtgttgcgacagaaattcggaattgatgatgacgaggttttagaacggctgagcgccatcgatttggtgaaagccggttttggaaataaatcgagcaaggctatacgtcgcatattgccatttttgcagttgggtatgaactatgcagaggcttgtgaggctgctgggtataaccatagcaataactatacaaaggctgaaaatgaggcgcgcgctttgctggatagattaccggcgattaaaaagaacgagcttcggcaaccagtggttgagaagatcctcaatcaaatggttaatgtggtgaatgcgcttatggaaaaatatggacgattcgatgagatccgtgtggagttggcgcgtgaattgaaacaaagtaaagaagaacgttctaatacatataaaagtataaataagaatcaaagggaaaatgagcaaattgctaaacgtatagttgaatatggtgtgccaactcgatctcgcatacagaaatataaaatgtgggaggaatcgaaacactgttgtatctattgcgggcaaccggtagatgtgggggattttttgcgaggatttgatgtcgaggtagaacatattattcctaaatcattgtatttcgacgatagttttgcaaataaagtttgttcttgtcgtagctgtaataaagagaaaaataatcgcactgcatatgattatatgaaatcaaaaggcgaaaaagctctgtccgactatgtcgaacgagttaacacaatgtacacaaataaccaaattagcaagaccaagtggcaaaacttattaaccccagtcgataaaatttctatcgataaatccggaaaaacgaaacgaaccttcttgcaaaaacgaaatggttcaaaacttgcaaaaacgaagcgttcaaaaatcgacaagcgcacagtacaaaaaagcaccgaaaaaaacatatttcttcggtgcttttttattgctcgtcttttggctatctcaccaaaaatcactaactttaaacaataaagaatatatcatatttggttttaacgctgttttaatatcattaaaacgacgttatattataccgccggaatcgtgggcgcggcacgcttatatagcattatatccgtatacgtggcgttgtagttcacatgggcattaaattcggtttttatacagtcttcgaaggggttgcccaaagtccgattcctgcccatccaatcgcagagctccaagatagacgacttgttggaggtgaagtagacgaacgaatggtcggcgagaaccgtcagcacatcgagatagtcggagagccgccagtacatcgtataggtccccacctcggtggagagatagggcgggtcgacgaggaacaccacgccggggacatccttatactgctcgaacacttcccggtagtcttggctggtgattacaagccccgccaaatagtcggagcagtccggataatcgtttttgcggatattgttatagagggtgtctttccgcatctctgagacgctcagcttatatttcatcgaaaacataatcgaggcagagagcgtgatgaaatccacgtacctgttttcgcgctcctcccgctgaatgcggtcgaatatgcgctcccgaatgtctccggtgattgccttgtgccgaggaacggtattgcccacgatttcccgaatatcggcgatcaatcgattggtatgcggtatgttttcgagtcgacggcggtagttgtcgaaatcgttgtataccacggtggcattcggcttgcaccgcttggcgatatgggagagcaggccggagcctccgaagaggtcgacgaatgtggcgtcgtcgggaaactgtttcagaacctttataaactcgcgcgcgaacatgcgcttctgccctacgaacgggagcggggccgatagatacattttctttttcatacgttcaggtcaaatttgatattttcgttgccggcgagcaaatcccgtgtacgggcgatgttattgtcgtagatgtgcacgttgccgaggttgagggtgacagattgcaggggcaaatcgatttgccgggacatcaggtacaggtggtatatgtcggccggaagtccgaggttggcatcggaactgcgctggtaggctgacagcaccagctcgccgccgtcgacttgaaattgcacgaggctgaggcacggggcttgattggtctccgcgccggtggatccgaggaacagcacatagtttttgctgctgcgcttctcccggttgattctgtcgatgagtggtggcagcttctcgaagtaggtggggtaactgttcaccagcgtat

SEQ ID NO: 2627 - DNA, 4118 bp, synthetic construct
  source 1..4118: mol_type = other DNA
  misc_feature 1..4118: note = Synthetic
cctgcaccgcagataacaagccccgggcttcagcccgggggtattcagtttacccccgccgcatttttatttacccaacctctttttcaaatccgctatcccctgccccacctcaggcgcgctatttcccgcgctaaaataaaaaagccctcattgagagggcaactcacgcttgctccgcagagcaaaaacgcttgcgctggcgaaagccaacttactggaacaagtagcaatcgccgctcaggtatactataatactaaaaacacggtaagcggagtcttgtcaagaaaattctgtccgaaaggagaaattttatggaggcgtctgataactacattctcggtcttgatattggaagtaattctatcggctgggcgataatcgcaacagaaaagaaaaagccggcgaaaatagttcagaccggcgtgcgcgtctttgaggcaggaatggaaggagacatcgaaaaaggcagggaagagtcccgcaacaaagcgcggcgggaagcgcgccacataagacgccaactctggcgccacgcaagaagattgaaaaaacttctccacattctccagcgtgaaaaacttctgcccgaaggttacgcggctaaagtatttgaggggaaagaggggcttgaccagaagttcttggagaattattcaaagaacctttctgaaaacgaaaaacataaactggcgcaagtcctgccgtattatttgcgcaaacgcgccttggacgagaaacttgaactctatgagttaggtcgcgctctgtatcatctcgcgcagcgtagaggattcaaaagtggcagaaaagcgccaaaagaaaaagaaggagaggaagagaaaagcaaagtcaaaaaagaaatctccgacctcgcgaaagagatggatgaaaaaggcgcacgcacactcggcgaatacttcacaaatcttgacccaacagacccgaataagcgccgcataagagaacgctggacaagcagaaaaatgtacgaggatgaatttgaaaaaatctggaaagcgcagaaaaaacaccatccaaatactcttacggatgaattgaaaaaagaggtttggaagaccatcttcttccagcgaccgctcaaaccggtgcaggatactatcggagactgccaatttgagaaagggaagaagcgcgcaccgtgggcgcttccctccgcccagcgcttcagatacctgcagaaattgaacgacctgagaatcatctctccgaagaaaacgaaagacgaggcaagagaaccacggctcacagatgaggaacgtaaaaatgttatctacgaactggagagaaacgaagaaatctcttttcaacgcattcgtgacattcttgggttgaagagaaactacaaattcaactttgtcaaagaggaaagcggagaaacggaggaagtagaaagtaagacgacatttcccggtaacgcaacttcggctcaactattgaatgtgtttggtgaagaaagatggtcgcaattgtccgaccctgaacgtgaccagattgttgaagaaattctgaaactccgagagaagattgcatcgcactactgggagcactccaacgaaaaggatgttattgaaacgatgccgaaaatagaagacgagttgaaacaactgtgtacaagatggaaatcggatgaggcaaaagcgcatgagttagccaaaattgaacttgaagatggctactgcaacctctcccgcgaagcgctcacaagagttctgccggaaatggagaagggcaagtcttacgccacggtggtgaaagacatttaccaaaaggacctcgctgaggaacaagaatctgctgtaagtatggctgaacttctggggaaattgcgtaaccctgtagttgctcgtgcactttcgcaattgcataaactggtcaaagccatcatcaaagaacacggcgtgcccgaaaagatccgcgttgaactcctgagagagatgaaaaagaaccgcattcagcgcgagaacgtttcgcacatcaatgaacttaaccggacacagcgagaaggtaaggggaagattctcaaagaaatgggtctcaagcccacaaaagataacattaacaaactgctgctggctgaagagtgcaaggaacggtgtccttattgcggcaagaaggttgagagcagaaaccatcttttcaatggcgcgtttgaaatagaccacatcattccttaccatcgctcctacgacgactcctttctcaacaagaccctcatctgtgaaaaatgcaacaacaagaaactggaccaaactccctatgagtggaaggggacaacacctgagtggggcgatattcttgaccgcgtagaacacttcaaatcaacaaccatatccttcacgagcagagtgaaaaatcgcgaaggcaaaaaggtagaggtgcgcttggctgctgtgagagaaaaactgaagcgctttaagttgcatgacgaggaactgaaaaagtttcttgagggcttttctaacgcccagttcaacaacagtgcgtgggcgtcccgtaaagcgagagaacttataacttgcagcatcggtaaagagagggagaaaaaaatagaatcgcttgcaggcggagtaactgctcaaatgcgcaatgagctgcaactgaattccatcttggctgatggcgtgaagaaagatgaggtaaaagaaaagaagcgcatagaccatagacaccacgcggttgacgctgttgccatcgcacttactgagccgaaaacggtcgaaatgctgagcaatgcctacaagcagtcaaaaaaggaaaagaagaagaagaagtggcaattctggcaagatttcgtcaaaaaagttgcttgggacaatttcctgcatcaagtgaaatgttctatttacgaaaccgtagcttcgcatcaggtttctcgcaaaattccaggtaagctgcatgaagaaacctattatgggaaggtaaacgagattgacgaaaaaaagaacattcgggaactattcagggtccgcagaaggctcggaacgggaagaggatgtttgaaaaagacagaggtacaagatattgcagataaaaatgtgaagcgggcagtaatcgaaaaaatgcatcaactgggcacggatgacccaggacaggcatttgctaacccccaaaatcatccttacctgaaagacaaaaggggaaatcccaaatctataattcacaaggtacgaatagatgtgaagaaaaagccagaaaagaaattgaaagcaggatgggtcaaaacagaagacaatcatcatgcggaagtctgggaaaaaggcgatggaacttacgacggcaacgtccttagcacctttgatgctatggatagaacgcgtcgcaaaaaacgcggagaaaatagctcccatatccagattccagccggaacaaagctcgttttctccattcacaagtacgatactgttgcaattaaagatacggatggacaacccggatactacgtggtaaagagcatcgctgctggacccgacattctcttagtgcacgtaaacgatgcacgcaagctgaccgaggttcaaaaaccgggggtgcgactatccttcaagatatggaaacgcttgagagagaaacgagagtcggtacctgtgcgcgcacccttccgcgtctggagagtcacaaactgggatttcctccggcagatgaattgccagaagttagacatactaccgctcggggatgagaagaggcgaaatgactgatagaatattagatttttcagacgagccggcagcgctcagttttcgtaactctcttcttgtcatcaaacgagaagggcaggatgagataactgtcccgttcgctgaaatcgctgttattgtcgtctcgcatcctcaggttcactatacccacgcggttctatgcggaatcgcaaacgctggcggtgagttcgtcgcctgcggagaaaaacaccttcctgtcgcgatgctccttccgcttgaaacccactttactcaggcagaacgcttcacaatgcaggcgcaggttccgctccctgtcaaaaagcggttgtggcagcagatagttcgcgcaaaaatccgcgctcaggcaaaactgctgaaagacctgcgcggtagtgattacggtttgccaggct

SEQ ID NO: 2628 - DNA, 23240 bp, synthetic construct
  source 1..23240: mol_type = other DNA
  misc_feature 1..23240: note = Synthetic
aacgaatattagttagaaaagatttttataaatccctgaatgaaacgccaagaagacgatttgtcgatgcagaaagcattaacttaacgatgtttaatgaagatgttaaaaactttattattggaacggagagtaagattaatgtttgtttgaatgctttcttttcagatttgaatgttaaaattaaaataaatagaaataaaagtactagatcaaaattggtattttataatgttgataatccacatgaagaatataaactggaaaatggagaaattgtagctactggttctgttgttaataatgatgtaattagttatgcgagaaataataagggtaaaatagaaaaagtatttctctattatgatacgatagttgcatcgtttgctcttatgagtgtaccaataaatgcaagagtagattaccgctatggattttttgaagatgcctatttttatttaaaagcagagaatggctttggaggagttcaaatatatcgagtggataaggaagttatcgataatgatactgtggattgttatcactttaatttagatgaattacaggaggttttcgataaaactattgtaccaggagattatgttcgagcatatgatacactgagaaattgtgtgaatgctaaagagcaaaaggtaagagatgagattagtgttgaacttaaaaaacaagaatcaaaaagaggaatagaagagaagttagaagataaatttattgaaatattagaactacaaaaggaactaaatgatatttttaatgaaaagagaagaataacaataagtagcaattatctttttgaagaaataaatggaacaaggagaataaagagaaagtggttaccatatttgccttatataaatttatctaaagtaaatttgacggaagtagatataagtggtgtcgatttttcctatacgaatttaagactaaatccgcaaattgtctataataaagatttgagacattgtaggtttgtaactagacaaaatgaaaataaaatatttgatccgacgacagattttactggttgcttgcttgagggaacttatatagcagatgccaacgtaaaaaagggaattgactataatgctaaaggattaaaaataattaatagaggtgaatatcataattgatattcattttttaatgattaaaaaagaagtaaaatgataataattcggtaatataaagggtgaagggttaaatcatgacaaaaaaataaagaattattaaaggcagtagtaggaccttgtttaaaaactaaaataaaaaatatcagtggcaaaaaaatcatagtacttgttctatcgatatagtaacactctatgatattagaaatcaaatatcaatgtatcgtaattttgcagacgcgtctgcaaaaattgaaaggaagttattttatggtagaaaaaaaattagaatttacatttaaagaaagtgttaaaagaattattgaaaaaatagaagcttctcaattagaaatattccaaaatgctaataaaagtatattagaattatatttctttattggaaaaatgattgaagataatgtcagttggggtaataaatttattgatgaattatcaattagtttaaagattaaatatccaaaggcaaaaggatattcacccagaaatcttcgtaatatgagaaaatattatttgtcagtaaaagataataaagaactcaaagaactttcttataaaataccttggtcacataatacagtcataatggatcgagtaaaagaagatgataaaaaaatctagaaagtgaaaaataaatagaaaaattttcatcaaaaaagaagtaaaatgacaattcatcggtaatataaagggtgaaaggagagaatagattgaacgaaaataaaaccataaaaataacatccataagagatagaatatttaaagagatttttcacgatgagagaaataaagaacttctaaaagttgttattgaaacttgcttaaaaataaatatcaagggagttagatatatccctactgaattacctcaaggtaactatcaaataaagggaaaaactatggatatcttgcttgatacagataaggggaaaataaatgttgaattaaatgctagaaagaatccctatactaattctagaaatttttcctatatttgtaatgtctatataagaaatactttagttggtcaagattatggagaaaatattgatgttattcagataaacttaagttttggattaggcgttaaagggaatgtgtatgaagaatatttagttatgaataagcggggaaaaagatacatcaaaaatctcaaaatatatgaattcaatatggacaaaataatggaattttggtattctaaaaatgcaagaatgattaaaaaatataaatatttaatcatgctaggtcttaattctttggaactagaagaattagcaagcgaagataagagggtggaggagtatatgaaaacattagattcggtaactgtatcaatcgggattaacgattggatagatgaagagactgatcaaagatttataagaaatacgatagaaagagaagctacgaggaaaggccttcagaagggcttaaaacaaggtttaaaagaggggcgtaaagaaatagcagaaaacctcataaaagaaggaatgtccatggacaaaatagcaagtatctgtaatataagtgaagcagaattagataagctcttgttggaaagaaaaaagaatgacttagaataaacgcaagtttattctttttttatagataaatggaggcattgatgatataatggaaaacatagtatgctagaaaagaaagtaaaggtagtaatttatgaataataaacaaacgggtaaatttataagggcgttaataaaagaaagaggattaacgcaatatgaattagcaaaaaaattaatgataaatagagcaacagttagtaaatgggaaagaggggagatgggatttacacaaaagaatttaattttattgagtgaattttttagtgtttcaactgatgagttgattgctggtgaaagagataagaaaggcctaagagataaagtagatgaaatagcattaaatatcttagataataatatcaagttacatagaataataaagtatatgttggcaataattatatttttaggaatttctttcttgttatattatttctatacattttataattcagttaagatatactcaatatatctaaatactgataaatatgcagttaattatgggcaattaactaagacaagcgataagatatatttttatttagatatagattatatgattgaagatgttgataaaattgagtcagtacaattattttatataaatggatcaaacttagttacactgggagagatgacggaattaaaaccgttcacatttacggcaaataaaggttatgacgaattcataagatttgatgattttgatattgcccttaaaaatatgtatatctatgttaatttcacagatggtgaatttgaaagaatagatctagaatttgatcgtgaatattcaaactcacgtgtggtaccagttaatttaaaaaatataaagggtgaaattactactaaatatgctaaaaaggaagatacaaaagtctatgataaatttctggaagttaaagaaataattgaaaaacatggtgaagatggaattatggatttcaaatttgaaggtaatacatataaattaagattgcttgatgatgaattaaatatagatttttatagagatgaagaaaaatattcgtttgtttatagttattttaataaggagttattctactttaatgaatatagttcaaataataaggtaaaattagtatattcatttgatatacaaatgggcaaatgtttagaaggtgattgtactaatcatatggataattatagagaaatgattagattacttcgcgagataatttatgaatattaagagagtatgaaaagttttactctctttttttctaattatgtgatatagtttaagaggaaagtgaggtaaaaagaatgaaattagtcaacaaaaagtttattatgattataacgttgttaatggtagcattcagtaataatgtatttgcatcagaagataaagatatttattatacaaatgaacattatgtaagttttactaaagaagaatatgattttgttagtgatttttattatgatggttatcaagaatatatgaatcaagaagattataattatatgattgatagtaacatgatgaatagtgagattcaaactgtagaatatactgataatgatggtttattgccattggcagatacttcttatgcaacaggaagcaaaagaataaaattatcatcggcatgcgaatcatctttttgtaatatggcaataacacttaattggttagtatctccgaatacaagaagttatgacttagttggtgcatattctccatcaagcaacagtttatcaattgttaactcaagaattcagtatgatggaacttcttctcaatacgttgagagaagggaagaaaaaaatggcatttcagcaacaatgaaattaccatcttctggtgaaagtattaggattattatgaattttacagccaataagggtacaagaatttatgctgcatatcaacatgctgctaaaactattagtctaactaatagtagaaaatactcttttaattctggcggttatggcggagtatttagatttgaagaatctgttaagtcttattatgattccatgggtggcgtaaagatggatatataatatgcatctaggttatgaacatatgaatgaaagagtcaatgattaaaaatcattggcttttttatttttttgtgatatattgtagaaaagtgagggagagatatgggtaaagtagattttatcaatttaattcaagaagaaaatgaaaaattaaatacgtggtataaagattatcaaaagtttagtaatttaaaagagtttaagaagaaagaagattttgataataagttacccgatttatttactatgggttttacgattaatttaaaagctattaagttatataaagagtataaattgcattatgaagagtgtagagaattaagtgataatttaggtaagttaataaaagaacaaaataaaactttatatgataagagaataaagaagtttaaatatatagcaccaacaattgaaggtagagaattagatgaacaacagttaaagacgattgtaagagatgataataatcaattggtactggctggtgctggaagtggtaagacgacgacgatagttggcaaagtaagatatctattggaggtcaaacatgttgatccggaaaagatattattattatcatttaccaatgtggcttccgatgatatgcgaaatcgcataagaaatgaaacaggagaaaaattagatgtatttacatttcataaattgggatatgatattataagttcttcatctaaggataatcctcaagtatttgttggatcattttatgacttaattaaagataaacttttaaagttattgggaaataaggaatatttaaaaaagtttattgagtatttagaaaaagaaagatttgccttaagagatgaattttcctttaagagtattgatgaatataatgactatttgatgattaatcaaccttgtactttaatgaatgaaagtgttttaagtcaaggagaattagagattgccaactttttctttaaaaatggcatcaattatgagatgaatgttagatatagagaacttacgacatatgatggaaagagagaatataaaccaaaattttatttaccagattatgatatctatattgaatattttgaaacagataaaaagtttagggtacccgtttatattgatggtaagatgggagaggactactccgaatatattaaatgggttgagaagttacataagaagaataatactactttagttaatacttattactatgaaaagaagagtgataagttacttggcaatttagaaaagaatttaaagaaattgggagtagtgtttaaagaaaaagatattaaaactttatgggaagaaattaaagatacgcagaatgagtttttacttatcattatgaaatctattgagacagttattagtttaattaagagcaatgattatacgattgaagaagtaagaaagatgtgtgcttcagaatttaagacagacaaaatagctttattggatattattgaacctctatatgattattataatgagtatttagtaaaaaataataaggttgattttaatgatatgatcaatcgagctagtaagttagttttaaagggaaagtttaaacacaagtatgattatgtattagttgatgagtatcaagatatttctagagcaagatatagattattaaaagctttaagagatagacataattataagttattttgtgtaggtgatgattggcagagtatttatcagtttagtggaagtgatgtatcttttattataaattttaaggattattggggagatacacatataagtaagattgaacatacttatagattgtcggaaaagatggcagagataagtggcaattttatcatgaagaataaaagacaagtaaagaagaatatgattggcttagaaaatgggagatttccattgggacttttaagcgctggatcaagaagtcatcttctcaatatattagctcttaagttagatgacttaccaagagatagtacagttttattcttgggaagatatgatcgagattttgaatttatctataatgatactaaacattttaatattaaatatgattataattataatgttcatcgtattacgtattataataaaccaaggttgagaataattgctttaacgattcataagtcaaagggattagaggcagattatgtatttgtcttaaataataaaaatactttaataggttttcctagtaagatatttgatttgccattagttaatctattgatggaaaagggagatagttatgcctttgctgaagagagaagattaatgtatgtagcacttacgagaagtaagaataagacatatctattagctatgaataagcagaagtccgtttttgtcaatgaattagaaagtgaatataagagtgaattagaaaaagagtattttgaatgtccatggtgtgatggcaagttgattaagaaaagaacagtagaaggcgatatacttggatgtacaaaatataagaaagatggtacaggatgtaattattctaggagaatacataagtattagtagataaagtgatggtaagatggtaatttctaattaatgattactaaaatgtgttataatatctataggttttaggatcctgtgtaatttaggagttgtataactccccgtttgtttcgcttgcatactttttgttttaggatcctgtgtaatttaggagttgtataactagacttgcttgtactttcttttcataagagttttaggatcctgtgtaatttaggagttgtataactaaatcattatatattatctcagttatcatgttttaggatcctgtgtaatttaggagttgtataacttttcttctatttcctgataatttttcaatgttttaggatcctgtgtaatttaggagttgtataacccatgatgtacttgtaaaaacttactaccagttttaggatcctgtgtaatttaggagttgtataacttataatctacagaaaatatactttctccgttttaggatcctgtgtaatttaggagttgtataacaatttctgataaagtgaaagatcatctccagttttaggatcctgtgtaatttaggagttgtataacataagttgatttgctattgtagcagaaactgctctctaagtgaaatcatattctgtcataaatctagttgatggaactgagattaatttaacatcatctaaaccgtgaactcttctatcaatattagtattaccactttcaatagttctagtgattccatatgccttctttaaaagatttaaaatcttagatgttcctttaatttctctacctttcattggtacacttgtatcatttatttcggacattctattatcgaacaaatcaagaatattatgaattgttaattctttagtactcttactgttgtttgaaaaaatttcttacatatttgtttcattagtatcattttcttcttccccactttcagcaaatttttgaatatttgtgtcataagaactttatgttccattttctcttcctttttaacggataaggtcatctgcactcagtttattcgatacgggcaaacgatatttttggtgtccttgcaggaatcgaacctactaattgtctttaggacatgaaaaaagtcgatatttctatcgacttagaactttttaaataaaaaaagaactgctaaagttcctaatatttcaaagtaaactcgttataattcttcttcattttttatatttccgacatataaatcatcaaaaggaatccctagtttaatacttctatttattttttttattatctcttcagtatttcccattccaaatgttgttatatctaaattaccaaatttctttttataattttcaaaggcaatatttaaacttttagtttcttcagatattggtatttctcttgattcttcaagccattctgttacatcgccatagatttctatataatcttctaaaaaatcatcataaaccttttttttcactcttatcaccttttaaaataatttttaaaatgctcaacagcattaggaaacatctgaattaaataatctacttcttccctatcttttctaataaatgcacttccaaaattcgcaaatgcttctctttctaatgcatactctttttcccaatagcttgctcgatggaaaactttgccatgacatttattttctgttattccactcacaatgtctgatacaggattatacgcatcactagaactcaattttttctctagatagaagaaaaaaatcttcttctgataaattatattttaccatatatgcatttttagctctattaaaatcttcaataataagttttttaaatattttatcttgtgaaggtctgcctaatatataatctatattgtgtgatatttcatgaaaaagattcttatattcttcatctttttccaaatttatctttatatcatttgttaaactattaaacctttctttttttaaagttttaatatttttaaaacgaaaattagtaatgttttcattaattacttttctgatagatctaggacttttacctattatatttgtaattgcctctttatgattattagggaaatcattaatagtaataggaactttataatcatttatcatctcaattaaattttctttgattattttaaacttatttttgctattccttgattctgacacgtttctctcatcaagactgcctctttctaatcactcgtacttttttatgattctattaatataatttgttttatattgaactttttgtgtatcattatgattttattttctttttcatcattatcatgcatttttagatatttattaatatcttcttccgacattcctgatttacgagttttttaatgtattattctctagtcatattattttctagattttttaatgtattctttttcaatgatattacctactttctaggcaattgtcctgcatttttggttatttatattttcactataacattcagctataaattctgcaatatttttatttgcatagtgagatacttttaaatgatagtaattctgaattcatatattaatttatctttttgaatgatgtatttatttttcaatctttttattgacttgtttaatttttaataatacaatgaaaaaaaagattacaagaaaaatgtacaaatgcatttatatgtaacatagttagtaaggagtgtttatatgaataaatatgttataggtttagatttaggaataaataacgttgggtggtctgttgttgatgcggaaaataatagtattttaaaaagcggagtacggctattttctgttgctaacactgctgtggatagaagaaattttagaagtgtaaaaagaagaaaaaaaagaagacataatcgagttagagatatattatctttattctctagtattggatttacaaatactaatacttgtgatagtgaacttttggaaaaaagagttttgggactgaataaaaaaattagtgaacaggatattgttaatatttgttgctttatagcaactcataggggatatattccttttggtgatgaagagagaaatttggttgatttgggggatttatatccatgtgaatatctatcacaattgaagataaatacaggaagatatagagcattagaggatgttgttattgataataaagatttaattaaggaagtggaaaaaattcttgatactcaagtgacattttatccgtctttaaaaaatatttctaaaatattaatagaaattatcaataggaaaagaaagttttatgaagggccaggaagtgagaactctcgtacagattatggaagattcaaaacagaagagtataaaaataggactggtaaaacggaagatttagaatacttatatgacgacttatctagtaagtgttcaatatgcgtcggcgaaaaggctgctccaatgggcaattattattatgaagtatttaatttgttaaatgattttattaatacttctattgttaaaacagataatttaatagatcagagtgctgtggaacttgataataaatcaggatattataaattaacttctgaatctttggaaaaaatcatcacttactgtaaagaaactaaaaatgtaaaatatgataaattgtataaagagttatttggactaaaaaaagaagatttaactggttatcgagtagaaaaagattataaacctctattttctactatgaactattatagaagtattagagatgcattcgagggatttcctaatgaatggctaaaagatgttgaacaatataatgagttaattagaatattaactgtttcaccgggaattgttgagacaaagaatatgcttgaaaaatcattggttataaataaagaattttcagaagaagaattggaaatattaaaaaatgtagcaaataaattaaaaagtaaaacagcttttagttatgggtctttaagtgaaaaggcattaaagagagcaatatcagatatgctttctacaagaatgaattttatgcaagtgagtcgtgagtttaactatgacgaagagatgacaaaagattttattgatagatataaggagactgatggaattcttcttatggatgatcaatttgttgatgagataattgcgtctccacaagtaaaaaagagtttaaggcagtctataaaagttattaattctattattttggaaaatggatgttatccagaagtgatagctgttgagtcaactcacgaaatgaatggatcaaagaaaagaaatcaaattgaaagagagcaaaagaaaaatgaagaattaagaaatgaagcagaacaattcttgattcgtgaatttggcaatgagtatgtatcagaaaaaaatataatgaaagtgatgttatttaatgaactagatggaagatgtccttattgtaatgaatcgcttaatggaataaatcaaataattaatggtggtctagaagtagaacacatacttcctctatcaaaaagttataacgattcttataataataaaacgctttcttgtgttgaatgtaatcagaagaaaataaataatactccttatatgtggatgggaccagaaagatttgaagaattttctgatagaattaaaaaaatgaaattctctgatgaaaaaaaattaaactttttagagactaaagatttggataaatataatacgagattttttaataggaatttacgtgatacagcttatgccacgtcagagttaattaatcagattaatatttttaacaaatacttggataataaactaaaggattttaacaagataaagacattatcaacaccaggtcagataacttcgaaaattcgtgacaatattggcttagacaagaatagggatattggcagatttcatcacgcggtagatgcttctattgttgcaagtattgctcttgatgataagttaggaaagattttgattgaatcgcaaaatgattcgagtttttggaagagaaagaaatatcttggtgaaagaattgattacatgatgttaaatttcaaggaatctgttttagatggtgaacttagaaaaataaaatctgatgatgatataaagatttctgaccaagttattaaagatccaaataagtcgattgcgaatgcaaatgtttacaagtatctaaaacttgatggcgaatattataaagttgatcaaataagtgatatttattctgaaaatattaaagatgagttgttgaaaaaattatttgatgattgtaatactggatttaatttgatgattaaagataataataaaaaaatgtatgagaaattaaaatctatctattttgaatataaagataggggttcttcaacaaatccttttgtaaattattgtttagaagtaaatgacattacaaaagaaaaattcaattatattgaacatggtataaaacaagaaaatggaccagttataaaaaaacttagatattatacaaatgtcaatgatcctaatttattggaaaaaagcaatttaaagatgaaatctaatacttatattggtttagattcagttggtcaggcatatacgaaagtatattgggataatgatgttaaaaaatttatattcttgccaatatacaccacatcagttgatttaaatacacataaattaaataagaaagataaaacatatcaattattctatgacaaatatttgcgcggaaaaaattatacttttgttgccgatttatataatggtaattatatagaggttgaaaaaaaagatggaattattaagggatttatatctggatatgataaagatggaaatcgtattactttaaagaagaaaaataataatcaaaaatctcctgatcgttttagtgcatctgataaatctcttaaagtttatgatgtggattatcttggaaataaaaagattaggttgacatggccttcaaaataagttaatatttatttagggatccaacagagatgttgtacaattcctaaattacacaggtttcctattataactctttatgaggaaatcatttggaagatgcttaaaaccagcgtcttccttttttgtttatggcttttagaactgtagtaattgagaaagcagtaaatgttaggctagatttaaataatattgttgtaaattatgagaatgataaattttggataaatgttgatgaaattagtgtgataattgtagatgatccaagatgtaatgtaagtttaaatgttctttcttatttatgcgaaaagggagttacagttatattttgtaattcatctcatatgccaattggaagcttgcaaacattatcattgcattcaagatcttctaaaagagtgaagcagcaaattgagtggaatgattcggcaaaagagtatttatggactcaaatagttaaagctaagatatttaatcaatataagactcttgaaaaaataaatacttgtgataaattacctattatatataatttattaaattcgataacaattggagatccacagaatagggaagggacagtcagtagaatttactttaaagaattatttggagatacttttagaagatttgatgaagatattatcaattatgctttaaattatatttatcaaattataagatcaaagatttcgcaagaaattgttgcttatggctatttaccttcatatgggattcatcataaaagtgaatttaatgcttataatttggcagatgattttatagaaccttttagacctatatgtgattattttgttcatgatatattatacaattccttagatgattatttgactccggaaataaaacataaacttgttgatattcttaatataaatgttagatataatggttcaaaatttaaactgcatatagtgatgcagttttatgttcaaaatcttttttcttttcttgaaactggtgaagttaataaaattatttttcctgaattatgaattatattaattattataaacaaatgcgaataattttagtttatgacttaccagttgttgaggatgaagatagaaagatttatcacaagtttaataatgatattaagaggatggggttcattatgcttcagttttcggtatatacaaaagtgattcaaaatgacacatcatataagcagaatttattgaaactgaataaaataattcccaaaaaggggagtataatagtacttaaagttacagaaaagcaatttcaagatatgaaatatttgactggagtaaaaaatagacaagaggctttagttgggggcagagaattggttatatttggaggtgactcttagtgattaatttagaattaaccgatttatcttcacaaagaacaattgatattaataaaataaattatttgttgattggagattatagtggttatttaaagttttatacatttttttacgaaagtttagtaagtaagaataaagattacaagataaagattgacaatagtgtgattgattcaaagaattctttattttttgattttacttcagtttataatatatttttagctcttgaatttaaaaagggaactttactatatgaacatatgatttcgagattgaattcgttggatgaaagttgggagaatagtattgataaggtgttttctaatttggttgattatttaaatgatgaagacagtgattattgttattctatgactgatgatatgaaaaagattataacacaaagtattcaaatatctcatagtagagataatttaaagtctactttttccaaattattagaggaatttttaaataataattttaataaacatattgttatttttgttgatacgatgattgtcgattttgatttttctaagtatgaaaatattttggtatttgatgtaaataattcgatttcattgaaaaagtataatttgttatctgtagatgaaattaaagaattagattttgaggttataaaaatggaaatacaaaatatttacccaattagtttagatgtaaaaaaagttaacaattgtattagtgcatattatagatatctattaacatctaagactattttggctcattcaagtgaagaactaatagtttatacattgttatctaagtataataaaattaatcaacagatagttccatctaatatgataataagcgacaatattaaatcttttttagccagcatttagatatatatgatataatatctataggttttaggatcctgtgtaatttaggagttgtataaccacagataagcaaagtacatttaagcactagttttaggatcctgtgtaatttaggagttgtataacatgacgttacctactgctttatcaatatagttttaggatcctgtgtaatttaggagttgtataacctcatctttaatacatttgccatcaagagcgttttaggatcctgtgtaatttaggagttgtataactgatcgtgatgtttttatatttggaggaaagttttaggatcctgtgtaatttaggaattttaattattaaaaaatctaagtctgtttgttgatttataattataacagaccgtagtgctacttataattactaaaaaaggaatgacatactcattcccaatttactacttataaaaaataaataggaggaaggactcgctgttccttcatctcttttgacccaaaaggtgtgtggacgcaagatttttccacctctcctaatagtattatactttatttttgttttttcttcaataattcttcccttttttcaaataatagtcaattctgttttgtttcattatttacatttgaataatcgtatttttatatttgaaatattttgaatcaagtgtatttaattttaatgtaatttttactttattgtcaaattttttaattaaccacaaggtatcttctgcatctgattgtttaaatgctctattgcgatttttaagtatgttattgatttcactaatatattttttgcaccttctatttcattaaaatcttcaattttatttttatataataatagttttagtgctatttaaaaattgttatggataaagtgatggtaagatggtataataagtccgtattgatgtattagaaatacttatgttgtggagtgatagacaatgagtaaaataaaagatggattattgggatttgctattggtgatgcgatgggagttcctattgaatatacggatagagaaatcttagttaaaaatccagttacaatgatgacaggatatgggacttataatcaacctgagggaacttggtcagatgatacttcgatgacgattgcaacaatggatgccatcgtgttaaaaaaagaaataaattataaagctattatgagtaatttcttatcttggtttgccgtaggtaaatatacagcaacaggttccatgtttgatgttggtgcaacttgttctgatgcattagctaaatattctagtggttcatatgaaccattggaatgtggtatggaagatataaaatgtaatggcaatgggtctttaatgcgtatgctaccaatcgccctttattgctattttaaaaaactaagtgatgatgaaataataaatttagttaatgatatgtcttcgttaacacatgctcatgagataagtaagatggcttgtttaatctatgtgagatatgtaatgtgtctattagatggtaaagataagatagatgcctatgaagagataaagcaagtagattattctagttatagagaagatacaattaaagagtttgatagaattttaaaaagtgatatatctgagtattctttagatgagataaatagcagtggatttgttgtagattcattggaagctagtttatgggtaatattaaatacagagaactttaaacaagcaataattggatcaattaaccttggagttgatacagatacgataggtgcaattacgggatctatggcaggaataatttatggatacgatagtattccagatatatggctagataaattaaaaaagaaaaattatttaattaaattagcaatgaaatatgaaaaattattaaatgaatagatgatatgaaataccacctaataggtggtatttatgatattaattttatatattttttagcagtaggtgatgtagtagatggataataaaagaataggtagttttataaaagagcttagagaaaaagaaggtttatcacaaggtgcacttgctaagaaggtatttgtagcaagttcggttgttagtagatgggaatctggtgtagcaggtgtttcagcaaataatttagttctattgagtgagatatttcatgtatctttagatgaattagttgctggtcatagatttacagaagataatcaggaagagaaagaagaagtattacttgaagttttaaatagtcatcagaaaaaatctagatatataaaaagattattacatattatcgtggtattgttaattttattcttgggatatttcttttataatttctataattcagttaaagtatattacaatccatacggacacagataaattaaatattacttatggtatgttaacaaagacaagagatagaatttattttcacttagatgttgattcaaatattaatgatgacgatattgaaaatgtatcaatttattatgagttggaagatgaaagaaaagatataattaagtgcaatacgttaacctcattcaattttatagattattatggatatgaggaatatattaattttaataactttgataagattataaataatatgtattttgagatagtttattataatagtgatgttgaaaagtataaattaacttttgatagaaattatgccaatatagatttctttctaaagaaggacaaaaaaatagaaaaatctgttagtgataataatacagaattatctaatagttctcttgatgaaaaaattcaaaaagtaaaagaaatattgagtaaaagcaatgatgaaaaaataataacttatgagaatgttgactatgatgttctgatattttcaaatcgtataaaaatcatatttaatgaaagtggttttaagaatcagtttatttataattttgataaggttaatttcttttcttttgaaaattatattaatgatgagtggaaaagtgtatatatgaaaagcattcatagtggcgaatgtattgaaggtgattgcaaaaactttaatgttcattatgaaaaattcaaaaaagttttagattatataattgaaaaaaacaattagaggaggtgtacataaaatgtattacctcctcttttattttgtgtgttatagtgtatttagaaatgaggaagtactatgactaaaaaaatgaaaagattaatatggggtgttttgctaatagttagtttctttagtttcagtgtaaaagcattggaaaatgaagaaatttattatgaaaatgataatggtgtaagatttactaaaagcgaatatgattttgttagtgaattttactatgatggttatcaaaaatttatgacagtagataattatcaaagattaaaagaagcgggtgttatgttagaaaaagtaaaaaaagttgtgtacaatgaaaataatggtattcaaactttaactgatgttacatatcagtcggcaagtaaaaaattactattatcttatgtttgtacaagtagatgttatgcgtcatttcaagcatcttggttaaccatagcaaatgtaagaagttatgatcttattggagtatattctcctactgcaaatgtacttgaagctgaaggatcaagtatggcatattctaatagtgcattttctccagtagaaaaaaataatactaagaatggaatatcatctacatttaagctacctactacagatgctaaatatgtctttactttagattttaatgtacctaaaggaactaaagtatatgcaagttatcaacatgctaagaaatctattagtttagctaatagtagaaaatatacttatgcttcgtctggttatggtggagtatttaagtttgattctagtgtgtctagttattatgatggtatgggaggagtgaatacaactttgtcttaaattagatgaagttgattttaagaggtgaattatggaacaggaatggttactattagatatgcatatgcattctcattgttcagcaataaccaaaaagggtgattctaaaaaagtgagaaagatgacggccaaagaatttataaatactatttcttgtaagggcgtaaaaatttttagtgttacagaccataattactattcgaaagattattatgattctttagataagtacatatctgataataatttatcgatgaaattaattaatggtgttgagtttgatgtttatgtggatttagaagaaaacaaggaaaattatattcatgtgtgtatttatttcgatgatgatgttgatagagaaaaattagaaacaacggttaaatcgttatatgttgattctgatggcaataatcttaaaccaagatttgacgagattttaggaagcctctatgaactaaaaactaagatgattataattcctcacggagataagagtcgtggattattggacactcatttgtttgataagatgtcgaaaagtaatattcctgaattttataaatatgctatgtataaaatatttaatgcttttgatgtaaaaatcaatttcacaaatagtagtaataatcattgggcaaagaacttttttttcaagacgaagcaatattctgaattattaaaagaaaaaactcaagaagaaattgaggacattgaaactaaaattttggaaaaaattaaagatacaaaaatagttttatcagatgaattgaacataatatatgattatattcttagatatggctcatttttttcttattttgttttttctgattggcataataatagtccttatgatccactgattaataattttatatttggtaatttagattatgctttttcggcttttgagatggcaactcttgatccagaatctagaattattaaatctactgaatctgtgattgaaattcccgataccattttgaaagaagttagttttaaaataggtgaatctcttaacacgatttctttttctcctggtttaaatgcaatagttggtaagagaaatagtggcaaatcgttgttgctatctgttttaaaaaatttatctgaaaaagatgcaaaagatggggctataaataaatattcttctttgaaaattagtgatatttgtgcaaaaaatcgtggaaatattgatatttctttgggaagtttaaattctgttgaatttttgacacaggctcagataacggagatatttgaagatccatctaaggcccaaaaatctatttctgcttattttttagatataaaaagtttagatttgactgttttaaataaaatagttaaaattggcgaaaatattaaaccctataatttggattataaaactttgacttctaatattttatctataaaaaagactagtaatttcaattataatactcataatcttcttaatgagataaaggctaaagcaaattttcaaaaaatattaggagaatatgatgacttaattgataatattagagatttaaaacttgatgtgtcactattaaaaaaacaacaaaaagaaattaatgataataaaatgtattatttagctttgatttctaaatacaatgatttattggaaaagcataattctagaattcaagagtttaattctggtttaactagtaatcaaattacttttaatcaaaatatgaaagatattcgtaatgcagtcaatttattaaaagaaaatttattaatacagctatatttagaaaaatttaaaaaattagtaaataattttagtattgataatcctcctgtagaaatagcaaaaaaaggtaaatatttatttgtaacttgttacgacattccgggtgatttaaaaaatcaaatagaagaaaaaatattgaaaaccatatatagaggttcttctatgtatgatttagataattatgttaagggagaatcaaacaaaaagttaaatggcagtttcaaaactgtagttgatgaattacgaaagtatcttgccggagatgcatttaaacctaaaaaggaattttatgagataaaaaatgatgctatagattataaaaatagcgttaaaacgttgcatgacttaaagaaacatgtagaaaacaagaatttagtaaatttgacaaattcttctccgggaacaatgagtgttgcatatttagatatgttatttgacttagaagaaaaaatattgattttagatcaaccagaagataatattgataatgattatataagcaattacttggttcctaatattaaagaaaaaaagcaaataaaacaattgatttttgttacacataatccgtcagtcgctgtttatggagacgcatttaattatatatatgtagaaaataatgatggcataaagtatactaattatttgatagaaaagtatgaagataaggaaaaattaataaatattttagaaggaggtcgtcctagtttttcaaatagaaacaaaaaatttggaaatgttataggatatgatgaatatggaactgattagaaaagaaaaaaatgttatattgatgagtgaaaaatcagaaattgaaagctattcttttgataaagaaataaattttagcggtttaataaactttttgttaaatcaaaatctttcaaaacaaattgagataaatgacactttaaatgataaaagcgaagctgaagagaatcttattaatataatatttgagctggtagatgattataattcaaaagttaaggaaatgaaagaattcgttgataatttatcaaataattaattctttgatgaggaataagtaatatgtacattagtaatttgaaaattagaaactatagaaatttttttaaaagttctattgatataaaaaaggacataactacaatcattggtgaaaatggtgttggtaagacaaatttgttttatgcgataaaacaattattagataagtatagtagacatagtttggatgaaaatgatttttcttatgaattgtccgattttaagggacattggataattattagcgcaacttttaatgacattcctaatacagatgatgtcccagaggctgttgctttaaatcctgatgtaaataattcagccacttattctttaatatttagaccaaataagataataagaaatactttatataatttgtcgtgtgattttattaattctcctaatgaggaaaaggatattaaaaggaagataatagaagaatttataaatgatattgacgtaaaaaatgattatgaggtaaaaaaaacagttggatctatttttgactttttaaatgatgataaatattatgaaatggttggcgatttttggaattgtattttcccttctcccgatgatattcaagaggatacagccttaattggagataaaggagattcagatttaactaaactaataaatgttacctttattcctgcaattagagatgtaaacttggaactcgtaaaagaaggtaacttttttgaaaaaatattatctaatgttgcagaagaaatagatgaattagaatggaaatcaataaaaacaaattttgatttgattaatgataaattgggaaaaatagataattttactcagttggctaatgatatttatttgatgatgaatagtacagtaggatcttctttttctggcaatatgcgtttggacgtttcgatacctgaggaaaaaagtaatattattaaatatttttctttaaaaggaattgaaaataatcattcaattgatttatataataaaagtttaggcgaaaataatgttttatattttgctttaaagatgcttcagaatacttatgctaaaggacacacaagaaaat

SEQ ID NO: 2629 - DNA, 10865 bp, synthetic construct
  source 1..10865: mol_type = other DNA
  misc_feature 1..10865: note = Synthetic
tggcccgatgccaacctgcgcatctctccccgcgtgggcttcacatgggatgtgttcggcgaccagaagctgcgcgtgcgcggcggcacgggtctcttcgcaggccgtctgcccctcgtgttcttcaccaacatgccgagcaactcgggtatggtgcagttcaacgcacagctcaacggcagttccgttgcacctgactattacaccggtccctataccaccgacgacaagggcaagaaacatatcgatatgagccagttcgcaggcggtctcgtgaccgatgccaacggccacgccaccatccaggccctgaaggacaagctcgagtcgctgggctatcccatgaccatctctgcagagaacggcaccaagcccggctccatcgcagccgttgacaagaacttcaagatgccgcaggcatggaagtcgtcactggccgttgactatcagctgcccgtcagcttccccttcaccgtgaccttggagggtatcttcaacaagaccatcaacgccgccaccatctccgactggagcatcatgcccgttgagggctttgcccgctggaacggtgccgacaaccgtcctatcttccccaccggcttccgtgccgaccgcaccaaggctttcgtgcttgagaacaccagccgcggttacggatggtcgttcgtggctcaggtcaacatgaagccgttcgactggatggacttcaccgccagctacacccatactgccaacaaggaggtaacgggtatgcccggttcaaacgccgagtcggccttcacctatgtgcctacgccctatggccccaacaacattaagctgcacaactcgcagtatgtggagcctgaccgcatcgctgccggcctcaacctgcacgacaagagcggcaaccatttctcattcttctatgaggcatggcgcggcggctacaactactcttacatgatagccaacgacatgaacggcgacggttatcagtatgacgccctctatatcccccgcgacaacgaggtgggcgtagccggtaccgccaagcagggcgagttccgcttcgctacggccgacgacatgacgcgcttcatggactatgtgcataagtccaactacctgaagaaccaccagggcgagtatgccgaggcctacagcgtgtacaacccgtgggtgcaccgcatcgacttcagctacaagcacgacttcaagctcaatctcggctcaaccacgcacaagctgcagctcggcttcgacgtgaagaacgtgctcaacctcttcaactcgaagtggggcgtgatgaaggggatgaactcctctctcaacgagggccgcatcctgcgctacgaccacaccgacgccgagggctaccccgtgttcaccacaccggctgccgtgaagagcggcgtgaagacctggctgcccaactatgccatcggccagtgctggtacgcctctatcggtcttaagtattacttcaactaatttaatcaaaacaacaagcaattatgaaactcaaacatatatttgctgccgcacttggtctgctaatgattaccgcctgcagcgatgacaacaccatcggcacgctgggcaacatcgagctcgacaagacctacgtctccattcccgagacgggcggcgatgccacggtgaccgtcaaggcagctggcaactgggcgtttgacaaaaccttccaggtaattaccaagaacgccgacggcaagaaagacactacttatcatgagactcctaaatggctcagcgtgagcaccacgtcaggctcggccggcgagaccaagattacccttcacgccgacgccaccaacggcggccgcgacacccagttgcaaatcacgtgcaatggccagcgccagtacctgcaggtgatgcagggcaatgaggtagctcagacggctacctgcgcccaagtgattgcaggtcccgacggcaagagcttccgcgtgaaaggtaccgtggagagcattgccaacaccacctatggcaactggtacctcaacgacggtaccggtcaggtgtatgtctatggcacgctcgacaagaacggcgctgagaagaacttctccagcctgaatatcgagaagggtgacgtggtgaccatcgaaggtcctaagactacctacggcaccacagtcgaattggtcaacgtgacggtcctcaagattgagaaagccatgatgaagttggttgacgtgccgacgactcctgttgcccatgacggtggcgacatggtggtgaaggttgccttcaagggcgctggcgttgagcctgtgatcccggccgacgctcagagctggctcggcgtaacgaagattgagaccatcgagggcgtgccttcgaagacggtgaagaatcctgccgacacggcgctcatcaccttccactgccagcccagcaacattgtcgaagcccgttcggctaaagtatctatcacctcgggcacgacgacgatgaacatcaccgtaaagcaggctggatatgagataaagacgtccacatgcgccgaggtcattgccggaaaagatggtgacacgttcactgtccaaggcaccgtggagagtatcaagaacacgacctacggcaactggaatctcaccgacaacacgggccagatttatatctatggtacgctcgacgccaatggcaaggcaaagaacttctccagcctgggcatcgaggaaggcgacgtcgtgaccgtccaaggtccgaagaagaccttcaacggcacggtggagcttgttgacgttaccgtcatcaagattacgaagaagtaaatcagaagcgaaagattaataagaagaatgtttaagggcgaccaatgtggtcgcccttatttgttgtgataaagccagttattactcgtggtgatacttctcgcccttgaggatggtgcaggcgcggtagagctgttcgacgaagatgaggcggaccatctgatgagagaacgtcatctgggagagcgagatctggtcgttggcgcgctgatagacggcgggcgaaaagccgtaggggccaccgatgatgaacacgagtcggcgggcggtttgctgcttcttgcgcagccattcggcaaattcgatgctgcggcgctcgcggccatgctcatcgagaaggacgacggtatcctgcggggtgagttccttgaggatgaggtcgccctcgcgctccttctgctgcgcctcgctcagggcgcgggtgttcttgagttcggggatgacgaggatgtcaaagggcatgtagtggccgatgcggtcggtatagtcggctatcgccgtctgatacagtttgtcagttgttttaccgacgagaataagaagtgatttcataataaagccccacccccttggctcgcatacgagccaagggccctcccccaaatggggagggtgagaaatgattgacatgcataaacaagaaagtcccaccctgtagcttcatgcagagtgggaccctatttttaatcaaattacctttattacaggctgcggtccagacggtcgtaaccgtactgagcgcaatcgccgagctcttcctcgatgcggatgagctggttgtacttagcgatacggtcggtgcggctcatagaaccggtcttgatctgaccgctgttggtagccacggcgatgtcggcaatcgtggtgtcctcggtctcgccagaacggtgagaggtcacggtgttgtagccatgacggtgagccatctcgatagcctcgagggtctcggtcagtgagccaatctggttcaccttaatcaggatagcgttggcagcacccatcttgatacccttctgcaggaacttggtgttggtcacgaacaggtcgtcgccgacgagctgtaccttgtcgccaagggccttggtgagcttcacccagccttcccagtcgttctcgtcgaggccgtcctcgatagaagcgataggatacttcttgcagagttcctcgaggtaagcaatctgctgctcgtcgtcgaactccttgccgttaggatccttaggcatgccgttgttgagctgcttgtagttgtagaaccacttaccgtcgcggttggtagcgaactcagaagcggcgcagtccatagcgatggtcacgtccttacccggctcgtagccagcgtccttgatggcctggcagatgctctcgagagcgtcgtcgataccgttgagtgcgggagcgtagccaccctcatcacctacagcggtagagaggccacgattcttcagcagcttgcccagtgcgtggaacacctcagcgccgcagcggatggcgtccttctccgactggatgcgctcgcccttacgcggctggatcatgaactcctggaaagcaataggagcagaagagtgggcaccgccgttgatgatgttcatcataggaacggggagcacataggtgttagtgccgccgatgtagcggtacagaggcatattcagagccttagcagccgtgtgagcggcagccagagacacacctaagattgcgttggcaccgagcttgctcttggtgggagtgccatcgagggcgagcatcttgtagtcgagcgcgcgctggttgaacacgtcgtcgccttcgagggcgggagcgataaccttgttgacattgtcaacagccttcagcacacccttgccaccgaaacggctcttgtcgccgtcgcgaagctcgagggcctcgttctcaccggtgctggcgccagaaggtacgctggcacggcccataacgccgttctcaagagtaatctcaacttccactgtaggattgccacgggaatccagaatctcacgggcatgaatcttttgaatcttcatcgtttaatgaatttatgaattaaaaaaatacttatcttacgataggatatgcgaggaaacggccacatattatgcaggaaaggcgcactgtcgcactgacagaaaagcatccccgtagccctcgcctatgcttttgcaaaagtaatgccaattcgccaacccacaaaatatttgagccgctttgtcaggcggttttagcttttttaaattttgagagaggacacaaacatccctcaccatctaaagacgcggcacataactcaacaagacaagcggggaaaagcgagccgaaaaagacagacaggaaaggcgcgaacagaaagcgcgatgccgccggaatcacagcgcaagagcaaaaaaataataattaggtgagaaagttttgacatataaaaaattattattaaatttgccatataaaaacgtcctcgcgctgacgcacgaggacaaaacttcggcttaaaagccttgttgtgaaaagtctttcaaactttcgccacaaaaatatgaaaataatctcaaactaacaaattctttcaagaaaaatgtcacaaaaaatacttggaatagatttaggcacaaattccattggcttatcacttcgcaatgttgacaatggcaaccaactgaaagaccagttggaatatttctcttcgtccatatttcagagtggtgtaggcaagaatgagaaggataaaaagaatccagaatattcttttgcagccgaacgcactacatatcgcatgactcgacggagactccggagtcgtcatcgccgcctttgggctacactgcaattgttaatagataatgattgctgtcctctttcaaaggagagtcttgaagaatggaaagaatataagaaaggtggtgaagggcataggtatcccatagacgacattcctttcaacaattggattaagctcgatttcgacgccgatggcaagcctgattacacgagcccttatcagctacgcaaatctcttgcggaagaacaattagacttcaaacagaaacaaaacagatataaacttggaagagcgctgtatcacatagcccaacgacgtggcttcaagagcagcaaaggggaatctctggacaacatagattctgaagacgactctattgacgtcatttcattaatgaaagagtctgaatcgaagaaatcctccaagctgtctgcatatatgaaagaacacggcctcgctacacctggacaggcatttgcaaaccttgaaagagaaggagtaagagtaagaggcagtgaatttcaagcagtacaaagccaattgaaagaagaaatcacttacatctttaaatttcaacatcaactttctacaaatagtgacttctatcaacatttggtaagtgagaaaaaaggagaaggtactattttctacagatgtccacttcgctcccaaaagagactggtaggcaagtgcactttggagccacggaagtatcgctgttccttaagccatcctgaatatgagacatttaaagcatggagcctcatcaacaatattaagataaggagaagccaaggagatgaccttgaacaacttgatctatccctacggcaagaaatatacaacaagcttttcatctccaaggtaagggattatttccctttcaaagaaattcgaacagagatacaaagtaagcttggtggtattaccctaaagtatgatcaggacaaaaaacagcaaactattaactacgcggatgattattctgtagatggttgtcctgtgacacgcaggcttatcattcttctcggagatgactggcgacatgcaactttgaaatctgacaaaatgcgcaaaggtcaccattcatcaatgcaccaagtattttactctgcttctgatttgtggaatgtctgcttgtcggcagatgaagagtctgaaataatagcttttgcaaaggaaaggctcggatggtgtgaagaagataagcaaaccaagaaacttgtttcgctatattcatcggtgtctaagcatagtcaatatggcatgcttagtcttaaggccataatgaacattaattctatgttagtcagaggcttaaagtactctgatgccgttatgatggccaaaatacctaatataatgcctgtaagcgagaaacagataggtgagctagcgtattattttgaacaccatttgtcgcctcaagtcaaatatcagcgcatggtcgcacgtttagccaacaaattaatagcagattataagtcactcaacgttgaataccgatttgccgatcacaatacagattatcaactacaagatagcgacatgaaagacatcgtgaacgttatcaaagactacatgggcacatatgaatatgacgcactcaatatggaagaacgcgatcgaataaagaatgacgttgctcgtctctatcaattcttcttccattcctcaaatagagactatataaaggtacctattgtcaaggaattgtgggccaaatatctgcatgagctgtacccaagcgttcctgaggaaagatggggcgagctgtatcatccttcacagattaactatttccaccaaaaagatggcaggctgggatctcccaatcttggtgccataaaaaatccagtcgcgttaagaacactgaatattcttcgttctaagataaacagtctgttagaagatggaataatttctcccgacgataccagaatagtagttgagacggcgagagagatgaacgacgccaacatgagatgggctataagaacgtggaacaaacaacgagaactcgaaaataaagagatagagaaactgctgtctgaattccacaaaagggcggacgacataaataaagacaaattgaggttcgcccttgaacagtctgactttgacaaatacgatgcaaaagataaagaatataagattaatgttgccaaatacaagttatggagagagcaggaatgtcgttgcatttatacgggcaaagttatcagtctgtccaaattatttgatggtcatagcttcaatatcgagcatactcttccccaaagtctatcccttgacaattctgattgtaatcgcaccatttgtgatgcctactacaatcagcatataaaagggactttgctgccttccgcccttcccaattatgagaagaatcaggttattgacgggaaagagtatagtgccatcaagccgagaattgagaagtgggaagaaaaattaaaacatcttgaggacagggtcaactattggcgctggagggcaaggcatgcacagacaaaggacaataaagatttctgcatcagacaaatgcacttatggaattttgacgcagaatattggaggaaaaaagttgaaacgttcaaggtcaccgaaatcaaggaaggattcaggcatagccaacttgtagatacccgcataataacccggtatgcagcactctatcttagaagtctcttttcgaatgttgacgttcaaaaaggagaggtaacaagcgttttcagaaagatattgggcattcaagatgagaatcagcaaaaagatcgttccaacaatgctcatcatgccatagatgccacaatgctgacattgatgcccgttcccgcaaaacgtgagcgtatgcttcaacttttttatcaaaaacaggagaaaaggaaagtcgggctcgacactcaatacgaggacaacgaactaaaagaggaaataaaagggcttaatataggcaaagatgctcataacattgctacgtatatcaagaaccatatccttgttgagcatcccaagcatcgggatgcgcttgctccttcttctcatattgtcatagagaaaaagaacggtaagaaatatcgtaaggtggctacagaaaaaaatgtcattcgcgaacaactgcatgaacagacttacctcggagtcatcacgcaatggaagaaaggcaaaaatggagctataataaaagattcccaagggaaacctttggttgatctcaacaataaattattagtgtatagaatgcccttgcgatttaagtccaacgcaaatgaaaaggggttcaaaaattgggatgacctttataataatattgtcaacaaggaccttatccctatgatgaggaagcagttcaaagaggggacattattcaaggaagcttgtgaaagaggtatctatatgctcaacaagaaaggcgagaaagtaaacagaataagaactgtcagaataaaccgtaaaatcagtttgaacggtgcacccatcataaagactcaaacttacaaatcggccaaagactataaaaactacttccgcgccagggtaggaaagctgtatgccggaagcgaatacagcaatggaaaagaaactgaatttcgagtatatagcctgatggatgttgccaataacaggcgtaagcatcaagaagatattcctaaatccattattggtaagcatggagatgtccttgagcttaagcgtgtcttaaaagttggagacactgttctcctctatcagaaaagtgccaatgaactgtggcgtcttggtaacaaagaactcggaaagagactttacgttattagtgcatttgagggcgacgacagaattcatttcaaaagaagttcttatgatggtaaaccgggcaaggggttggcgattaaagacttcaattaccttcaagatctcataaggacatcatatagcaaggtaaagtatttaatcgaaggctatgagttcaccctgaagaatggcaaaataaacttcaacaaagacgtatgattaaaatgaccctttattttggcaatcctgcttaccttagcttaagcctggggcagttggttataaaactgccggaagtggaaaattgtaatagtctgtctaattctttcaaagaaagaagcacaagacagatttcaatagaagacataggaatcgtaattcttgacaatagacagattactatcacccaaggggtattggatgcgctgttaagcaacaacagtgccgtaataagttgcgacaatagccacatgccatcaggcctctttctccccttggcttgtaatacacttcaaagcgaaagatttaaatgtcagatagacgcatcagccccactaaaaaagcaattgtggcagcaaactatcagtcagaagattagcaaccaagctaaatctctgtccatgatgacaaaagcagaaactcgttgcatggtaaaatgggcaaacgaggttaggagtggagacccattaaacattgaaggcagggccgcggcatattattggaagaactttttcgacgataagaattttgtgcgtgatagggacggaagctatcctaataaccttttgaactatggctatgccatcctgagggcagtcgtcgccaggtcgctaatagccagtggcctattgccaacccttggcattcaccatcacaacagatataacgcttattgtcttgctgatgacattatggaaccatataggccctttgtagatgttgaagttcataaaatatacaatgaaatgactgaagagcaagaactaaataaggatatgaaaatgaggcttctgtctatcccaacactcgatgtagaaatatcagggaaaagaagtcctttaatgatagcagtatcaactacaacagcatccttatataaatgttttgcaggtactagtaggaaaatactctatccaaactttctatgaacaggctgagtgaatacaggatcatgtgggtgttagtattttttgacttgccaactgcaactaaaaaagacaaacaagagtacatcctatttcgcaagaaattaatgatggacggcttttacatgtttcagttttccatctatgtccgtcattgcgccagtgcagaaaatgcttctgttcatgtaaaacgtgtgaaatcttttcttccctctaaagggcacgtttgcattatgcaaataactgacaaacagtttggtgccattgaactttttgaaggggaaaaagggcccaagggggattgtccgtggcaggcggatgccgctgcctaaccaaagaaattgatatgatagcgtgctaaaactattttttttgcttaccttt

SEQ ID NO: 2630 - DNA, 7632 bp, synthetic construct
  misc_feature 1..7632: note = Synthetic
  source 1..7632: mol_type = other DNA
gaaccctgaacttggaacctggaacttggaacctgaaacttgaatcctaatccttaactttgcgcctcaattcgatataaaagatggaaacctcctcaggcaaaaaattcaagcgtacaaccattacctcggctctgccttacgccaatggccctatccacatcggacacctggccggggtatatattcctgccgacatctatgcccgttatcttcgttcgcgcggtgaagaagttatatttattggcggcagcgacgaacatggagttcccattaccatcaaggcccgcaacgaaggcacttcaccccagcaggttgttgacaagtatcacgaaataattaaaaaatctttcgaggaattaggaatctccttcgatatttattcgagaacttccttacctattcaccatgagaccgcctcagcatttttccgtaaactttacgaggatgggaaattgatagaaaaagttacccagcagtattatgatgaaaaggcaggtcaatttttggctgaccgttatattgttggcacatgtcctcactgcgggttcgaaaaagcctatggcgaccagtgtgaaaaatgcggaacctcacttaatgccaccgatttaattgaaccccgttctgcccttagcggtagcaaacccgtgttgaaagataccaaacattggtttttacctctcgaccagtatgaagcttggcttcgcgaatggattttggaaggacacaaagacgactggaaaacaaacgtttatgggcagtgcaagtcgtggatagatctggggttacagccccgggccgtcacccgtgacctcgaatggggtgttaaagttccgattgaaggtgcagaaggcaaggtgctttatgtgtggtttgacgctcctatcggatacatctcggctactcgacactgggcccagctcaccggaggcgactgggaaaaatggtggaaatcgcccgatacccgtctgattcattttattgggaaagacaatattgtatttcactgtatcattttcccggcaatgcttaaagccgaaggaagctatattttgccggacaatgtgcctgcgaatgaatttctgaaccttgagggagataagatatctacctcgcgcaattgggctgtttggctccacgaatacctggaagactttccgggcaaacaggacgtattgaggtatgttttgtgtgccaacgcccctgagaccaaagacaacgattttacctggaaagattttcaggcacgaaacaataacgaactgctcgctatcttgggcaattttgtaaatcgtactgtggttctcacccataaatatttttcgggccaggtgcctccggcaacccacctcatgcccgatgacgaagcacttgtggctgaattggcttccttcccccagcgcatcgcatccagcatcgacaatttccgtttccgtgaagccctcaacgaaatgatgaacctggctcgtttggggaataaatatcttactgataatgagccctggaagaaatggccggccgaaactgaccgcgtagctaccgtgctcaatctctcccttcaaatatgtgccaacctcgccattctggccgaacctttcctgcctttcacctccgggcgacttttccggattctcaatctccaacccctccgctgggcttcagccggaaatgcctacctactttctgcaggtcatttattaaatcaacctgaatttttgttttctaaaatcgaagacgaacaaattcagaagcaactcgataagctggaagctgcgcgtaaggccaatttgatgaaagcccctgctgctccggcaaaacaggatatcgattatgaggcctttgcccgtatggatatccgtatcggtactatcctggaggctgaaaaagttcctaaaaccaaaaaattgcttcggttaaaagtagataccggtatcgatacccgaaccatcgttagcgggattgctgaatattataatccggaagagatagttggtcgtcaagtatgtgtattggttaatctggccccacgcaatatcaagggcatcgaaagccgcggaatgatactgatggctgaggaccgcgacggtaccctgcgttttgtttcaccagaggctcatatcaacaatggaagcgaagtgaaataagtttttttttcccttaatttttttcaggcctggctctgccgggcctttctgttttatgcatgaaaaaataaaaaagggcgagttgccccaccctcaatgttttcacaacggatcatggatccttattgtgaattgattacatttgtatggtgcaaatatattaaaaatttctacttttacaaaaaaacaacagctatggagaaaaaaattttaggtattgacctgggtgttgcttccattgggtgggctttggtcaagttagatactgaaaatcaggctaataatgaaattttaaagatgggagtgagaatcgttcctattgattctaatgatgttcagaaatatagcgaagggacgggagaaacccctgcgcataaaagaactatgaaaagaggcatgcgcagaatgtttgcccgctacgtgatgcgacgcaagaatctgacccaaaagcttcatcaactgggaatgttcgatgcttccctgttttcattggaaaaattatccctgtgggggcttcgatcgcgtgcggtgaatgaacagattagcctcaaggagcttggcagggtgctttaccatttgcttcaaaagcgggggtataaaagtaaccgcagggagagttcgaaagagaaaaaagatactgattacgttcagcaggtaaaaggaagatatcagcaaattaaagacttgcaactcactattggccaatatttctacagcgagttaacacagaatccttatttcagaatcaaggaaaaagtatttccccggggggcttatgaagaggagttttgggcgataatgagaaaacaacaaactttttatcccgaaatactcaccaatgaggttgttgatgatttttatcaaattatttattatcagcgacctttacgcagccagaaagggttggtgaaaatctgtgaatttgaagggaagtgggtagtaaaaaacgggcgcgaaatgttctttggtccaaaggttgcacctcgaagttctcccttgtttcaaatcgaaaaaatttgggaaagcattcataacatccgacttaaaaacagggatggagatctttataaactctctttagaggaaaagcataaaatctttcaatatctgaataataacgaaagactcactggccctaaacttcttgaattactggggaaaggtaaaaacgatggatggtactacaataaactgattgataaaggaatacagggaaatttgaccctggtaaaaataaaaaaggctttgggagattatcccgatgcagagaacttgctcaggtttaatttagaattcataacccaaggagaagaagctttactggttgatcaggaaaccggcgaaattttagaaagttatgtaaaaaaagaagtttccccaagtattgagaatgagcccctttatcagctttggcatgtcttgtattccatacatcaacctgaggaatgcgtgaaagtattgaaaagtaagttcagccttcctgaagaaatagcaataagactggctgagctggattttaccgccggaggatattccagtaagtcgcacaagatgatacgaaagatactgccttatttaatggagggttttgataatgctcaggcctgtaaaaaggcaggatacaaccattctaattctcttaccggagaagaaaatctggcgcgacaactaaaggataaaattgccttgctccccaaaaatagcctcagacaacctatcgtagaaaaggtgctgaaccaaatgattcaaatcgttaatgaaattattgatgaaagtaatgggctggtaacccgggaagaacgtctgaccaatcgcttcgagatcagaattgaattggcgcgtgaactgaaacaaaataagcaggatagagctgaaacgtttaaaagaattaaagccatagaaagggaaaatgaaaagtatacaaaggaactagagaactatggcatcaaggcctccaggaataatatagttaaaatgaggcttttcaatgaaacaagcgtagatgaagatggcaggataaatgcaatgtgcctgtattgtggtaagatgtttggcaaagaacaagccctcaaaggcgaagaggtggatgtggatcacattattccccgatcattgatttacgatgattcccaacaaaataaaattcttgtacacagaaaatgcaatgccaccaaaggcgacatgactgcctacgattttatggcttctaaaggcgaagaggctctaaatgagtataaagaacgggttaaaaggttatttgataaaaaattgataaccagaggaaaacgcgaaaggctgttaacggctcaatcaaaaattgatagtgaatttatcgagcgacaactcaacgaaacccgctatattggtaaaaaagcccgtgagattttaacggccgttagtttcaatgttcatgctacttcaggtatgcttactgctcgcctgcggcatttgtggggctgggataatgtattgttaaatctgcaacaagagcgatttgagtatctgtgtaaggaaaaactgagcgaggccaaagaggaggaaattccggaaataattgcaaggatgaaggaggagttttcgaaacgcatcgaccatcgccaccatgccatcgatgcccttaccattgcctgcaccaggcagggatttattcaacgcctcagcacccttcatgcccagcatacaagggatgaattgtaccgattgctcaataatgaatccggagaaagagaagatataaatccggaaattcaggaacgacttaacctggttgataaatattttatttcccaaaaaccttttgccacttaccaggtgcaggaaaaagccgccgaaatatttgtatcgttcaaaccaggtaagaaagtagctgttaagggcagaaatattgtgcatctacagggaggaaaaacttatgttcagaggggtgttatagtgccgcgaggaccgttgagtgaagaaagtgtgtatggaaaaataaggttccacgataaaccccaaccgttaaagtatctgctggaacatcccgatcttatcgtgaattctcgcattcgcgacctgatattaaaatttaaacaagaccatccggaggcctctcccaaagattaccctaagattctcaaaaaagagcccattttgcttccttccggagaaccacttacagaagcattgtgctacgccgaagattatgttattcgcaaaccgcttgatgtaaataattttaagaaaatagacgatttcaaatggattgtggataaggggataagggagcgaataataaaacatgtggaggaatatggaggaaatataaaagaggcactggcccatcctgtttattacgataaggaaaagacccggcctatacgttctgtccggatctttaccagcctgaatgctgttgtacccatcaaatataattccgacgggcaacccatggggtatgtaaaacccgggaataatcatcatgtggccatttatgaagatgcggagggtaatctgcatgaacacgtctgcactttctggcatgcagtggaaaggtacaaatacggcctaccggtgattattaaggatactactcaagtgtgggatgagatattgaagagttctaaagaatatccccagacattccttgggcaactgcccgaaacagggtggaagcttaagttgtctatgcaaatgaatgagtatttcctgatgtttctcgatccggaaaaagcaagggaggctgtggaaaataaggatttaaaaacaatagcttttcatctatttagagtataccagttatcgagtactgattataattttgtatatcaatattatgcgaaaaacccagggacagtttttgatagaattgaatttaaatcgttaagaattaaaagtattaaggctttaatgaatgcaataccacaaaagattaatattgatttattgggtaacctgcctattgctttcaatggaaaataattaatcttaatctcaaaatgatcaagagaattgtttatttcagtcaaccggtttggctgagttttgaaaataatttcatggttgcccggtttaaagcgattgagcaacagcctgaggtgaaaaaagcaatgggcgaagaagccgagaaacgttttcatctggatgacgtgggtttcgtggtgctcgatcacaggcaaatcacgctcacccatcccttgcttgcgcaactggccagccgcaatattgcattgctgtcctgcgacgatacccatcatcccatcgggctgcatctgcctttgtattctaataccctgcaaaccgaaaggtacaaggctcaaatcgaggcctctgaacctttacgcaaacaactttgggcccaattgatacgccaaaagatcaagaatcagtcggccgttttgctccatgccggcttgatttccgaagccaaccaccttaaagccctgagcaatgaagtaaaaagcggagatagtggcaatttggaagcaacggcttcgtattactattggcaacatatttttcaaggaatcgaagattttaaaagaaagcgtgaaggtgaaccgcccaacaacatgctcaattatggttatgccatactcagggccatcgtaggccgggcactggtggccagtgggttgttgccaactctggggcttcatcatcacaatcgctacaatcctttttgcctggctgacgatatgatggagccctaccgaccctttgtagatcgattggtgtatcagataataaagaaaaatgggctgaaagaagaactcgacagggaaaccaaggctgaattgctttccattccttttatcgatgtagagattgccgatgaaatcagtccattgatgaatgcggtacaatactcctgccaatctttggtgaaatgcttcgagggaagtaaacgcaacctggtattgcccgaaatgaattaagccgtatggccgagactgaacgattgaatgcataccgaaatatgtggctgatggttttatacgatttacctaccgaaaccaaggcccagcggaaagcttttgcaaccttccgtaaaaatttgcagggtttaggcttcagtatgtttcaattctcggcctatcttaggcatgtggccagtcgcgagtcggcagatgtttacaagaagagaattaaagctatagtgccggaagagggtgcggtatgcgtgttagagattaccgataagcagtttgaaaaaatggaactgtatctgggtaaaaagcgaaagccgccacccaaccagccccggcaactcgagttgttttaaaaaaaacggggcggggaaggttattttggccctctccgcctcattttttttgttctgaaaagccccgaaaaggtttgataaatctacattttagggcatttgtgctgtaaagccaggcataaaaatacaaaatgtaatcaattcacaacgaaagcaggtagttttggtttcgacgtcgcgctgtaaagccaggcataaaaatacaaaatgtaatcaattcacaac

SEQ ID NO: 2631 - DNA, 7267 bp, synthetic construct
  misc_feature 1..7267: note = Synthetic
  source 1..7267: mol_type = other DNA
gacaagtatcacgaaataattaaaaaatctttcgaggaattaggaatctccttcgatatttattcgagaacttccttacctattcaccatgagaccgcctcagcatttttccgtaaactttacgaggatgggaaatttatcgaaaaagttacccagcagtattatgatgaagaggcaggtcagtttttggctgaccgttatattgttggaacttgtcctcactgtgggttcgaaaaagcctatggcgaccagtgtgaaaaatgcggaacctcactcaatgccaccgatttaattgaaccccgttctgcccttagcggtagcaaacccgtgttgaaagataccaaacattggtttttacccctcgaccagtatgaaggttggcttcgcgaatggattctggaaggacacaaagacgactggaaaaccaacgtttatgggcagtgcaagtcgtggattgatctggggttacaacctcgggccgtcacccgtgacctcgattggggtgttaaagttccgattgaaggtgcagaaggtaaggtgctttatgtgtggtttgacgctcctatcggatacatctcggctacccgacactgggcccagctcaccggaggcgactgggaaaaatggtggaaatcgcccgatacccgtctgattcattttattgggaaagacaatattgtatttcactgcatcattttcccggctatgcttaaagccgaaggaagctatattttgccggacaatgtgcctgcaaatgaattcctgaaccttgaaggagataagatatctacttcgcgcaattgggctgtttggctccacgaatacctggaagactttccgggcaaacaggacgtattgaggtatgttttgtgtgccaacgcccctgagaccaaagacaacgattttacctggaaagattttcaggcacgaaacaataacgaactgctcgctatcttgggcaattttgtgaatcgtactgtggttctcacccataaatatttttcgggccaggtgcccccggcaacccacctcatgcccgatgacgaagcccttgtggctgaactggcctcatttcccgagcgcatcgcatccagcatcgacaatttccgtttccgtgaagccctcaacgatatgatgaacctggctcgtttggggaataaatatcttactgataatgagccctggaagaaatggccggccgaaactgaccgcgtagctaccgtgctcaatctctcccttcaaatatgtgccaacctcgccattctggccgaacccttcctgcccttcaccgcagcgcgtcttttcaatattctcaacctgcaaccccttcgctgggacaatgctggcaatgccgccttgctccccgccggtcatcctctgaaccagcccgaatttctctttgcccgcatcgaagacgaacaaattcaaaagcagcttaataaactcgaagctgcacgcaaggccaatatactcaatttacctgcagctccggccaaggctgatatcgactacgaaactttcgcccggatggatattcgcataggaaccatccttgaagctgagaaagtacccaaaaccaaaaagctgttgaagctcaaagtagatactggtatagatacccgcaccattgtaagtggtattgccgaatactaccatcccgaagagattataggccgtcaggtatgtgtgctggtaaatctggctccgcgtaatataaagggcattgaaagtcgtggaatgatactcatggccgaagaccgcgacgggaccctgcgtttcgtctcgcccgaagcccacatcaaaaatggcagcgaagtaaagtaaacaggtatggaattttgattttcgaatgaaaagcccggtattgccgggcttttcttatgtcattgattatgagatataataaatagggcgagtttccccgccctcaatgttttcacaacggaccatgggtccttattgtgaattgattacatttgtgctgcaaagataagtatttttactacaaaattctgcagctatggtaaaaaaaattttaggtattgacctcggtgtggcatccattggttgggccttgataaaagaggacgaagaaaattgccaaaataatgaaattctggcgatgggcgtaagaattgtgcctattgattctactgatgttcaggattacagtaaaggaaccggagaaacaccctcccacaaacgtaccgtaaagcgaggcatgcgaagaatgtatgcccgatatgtaatgcggcgtaaaaacctaacgcgaaaactcattcagcttgaaatgtttgacagttctttgtttgaactcgataaaatgagtctttggcaacttagagctaaagcagtaaatgaacagattggtctcaaagaaatcggaagggtgctttatcatctggtgcaaaagcggggttataagagcaaccgccgccagagctcaaaagaaagagaagactcaaattaccttcaggaagttaagggcaggcatcagcatatcagggatttgggtctgaccattggacagtatttttttcatgagctttcacaaaatccttttttcaggattaaagaaaaagtgtttcccagagaagcctatgaggaggagttttgggcaataataaaccgtcaaaaagtttattatcctcaggttcttaacgagcaggtaattcaggatttatatcagattatttattaccagcggcctctgcgtagccagaaaggattggttaaaatttgtgagttcgagggaaaatggatagtgagaaatggaagagaattgtttataggcccaaaagtggcccccaggagctcgccattgtttcagatcgaaaaaatatgggaaagcattcacaacattcgtctgaaaaacaaatacggcgaggaataccagttaacgcaaacagataagcaaaagatttttgaatacctcaatgtcaatgataagctaacaggacctaaactactcgaattattagggttaagcaaaaatgatggctggtactataataaatcggttgaaaaaggaatacaagggaaccttacacttacccgtatcaaaaaagccttaacgggctaccccatgaccgatgatctcttaaaatttgaacttgtaattgaagataaagaaaatgaaggtttactggttgacagtgatacaggagaaattcttcaaacggtaagaaagaaagaaattagcccggccatagaaaaagaaccactataccaactatggcacctgctctattctattcacgaacacgaagaatgtgtaaatgctttgatcaaaaagtttaacctccccgaagatgttgccaatcgtttggctgatttggatatgacagctggtggttattccagtaaatcgaataaaatgatgcgtcgtatcctgccttatctgatggaaggttacgattttgcccatgcatgccagatagcaggttacaatcattcaaattctttgaccgtagatgaaaatcttgcccggcgcttaaaagacaaaattactcttcttcccaaaaatagtttgcggcaacccattgttgaaaaagtacttaatcagctgatttctatcgtaaatgaaattattgacgagcataatggcttagtgaccagagaagaaagaataaccaatcgatttgaaataagaatagagttggcccgggaacttaaacaaaacaggcaggacagggctgacacctggaaaagacagaatagaatagagcaggaaaataagagatatattgaggaactcgacggccttggaattaaattttccagaagtaatatcataaaaatgagactcttcaatgaaaccagcgtagatgaaaatggcagagtaaatgcttattgcctctactgcgggaaaatgtttggaaaacaccaggcacttgcaggtaatgaggtagacgttgaccatattatcccacgttcgctggtttacgatgattctcaacagaataaaattttagtacataggtcatgcaacgcatcaaaaggagatatgacagcatatgattttatggcttcgaaaggagaagatgctctggaagaatatatcgctagggtggacttattatataaaaataaggctattactaaagggaaaagggatagattgcttttaggccaatcaaaaataacaggtgactttatacaacgccagctcaacgagacccgctatgttgcccgcaaagcacgcgaaatattgtattcagtatgctacaatgtaagacctactcctggtattcttacttcccggctgcgtcatctatggggatgggataaagtcttacttgatttgcaaattgaaagatttaagtatctggttgataataaattaagcgaagcttcagaagaaaattattcacaaattttagaagaaattgaaaaggaatattctaagagagtagatcaccgtcatcatgccattgatgctcttactattgcatgcacacgtcagggatttgttcagagacttagcactcttcatgcacaggttacccgcgatgagctgtttcgtattattaaccaagatgaaacttcaagcattgaagacctcaatattgaaatttctgaaaggttgaatttacttgacaagtattttgttgcttcaaggccttttactaccaaacaggttaaagaaaaggcggctggcattctggtttcatacaagccaggtaaaaaagttgcggtgaaagggcgcaacattgtgcatttgcccgatggaaagatatatgtacaaaaaggaataattgtaccacgcggtgcactgagtgaagaaagtgtttatggtaaaattaagtttcatgattcccccaagcctttaaaatatttgctggaacatcctgaccttatcgttaatccgattattcgagaacgggttgttcaatttattgaaaaacataaagatgtacccgtaaaagagtatcccaaaattcttaagaaagagcccattttgttaccatctggccaacctctgcaggaggctctgtgctatgctgaagattttgttattcgtaaaccccttgatgccaataatttcaaagaacttaaagactttgacattattgttgacaaagcccttatagagttaataaaaagacgagtagctgagaagggtaatatcaaggaagccctggctcaaggcatttacatggatgaagagaaacttcgtcccattcgatcggtacgtgtttttactggcctcaatgcagtagtacccgtaaagtatgattcagaagggcggccagttggttatgttaaaccaggcaataaccatcatgtggccatttatcaggattctgagggtaaccttgttgaacatgtttgtactttctggcatgccgtagaacgatataaatatggccttcccgttatcattgatgatactagtcaactgtgggacagcattttaacgagctcacaagtctacccacagacttttttggaccaattgcctgaaagtggtttgagacttaagatgtctatgcaaatcaacgaatattttttgatgtttctcgagcctgaaaaagccaaagaggctattcaaaacgatgattatccattactatccaaacatttatacagagttttttcattatcaagtcatgattataattttagttaccaatacaatacttttatccctcgtaataagtttgacaggataaattttaaatcaataagaatccaaagtataaaatcactttttgatgcattgccgataaaaataacggttgacttattagggagattgaaacaggtataatttaaattgccgttgctattatgattaagcgagtagtttatttcagccagcctgtttggttgaattatgagaacaatcaactggtggccaggtttaaagtgattgagcaacagccagaggtgaaaaaagccttgggcgaagatgctgaaaagcacttttcgctggatgatgttggatttgttgtcctcgaccaccgtcagattacaataacacatcctctactggcgcaattagcagcgaggaatattgccttattgagctgcgatgatactcatcatcctataggtttgcacctgcctctctattccaataccttacaaactgagcgttatcgcgatcagatagaggcttcagagcctctgcgcaagcaattgtgggcgcaactgataaaacagaaaattcggaatcaggcttctgtaattgaggctgtaggcttaatcaatgaagccaatcacctgagggcgttgagcaatgaggtaaaaagtggtgacagtgggaatgttgaggcaacagcatcttattactactggcagagaatattcggtaacatagccgggtttcagcgtaagcgcgaagggccgccacccaataatatgctcaattatggatatgccattctaagggctattaccgccagatccctggtggccagtggtttgctgcctactttgggccttcatcatcacaatcgatacaatcctttttgccttgccgacgatatgatggaaccctacagaccttttattgatttgttagtataccaactggtaaaaagcaaaggccttaaggaagaacttgatagagaaaccaaagccgagctgctttctgtaccttttttagatgtgattttggaagaagagaagagccctctgatgaatgcagtacactacacttgtcagtcgctggttaagtgctttgagggaagtaagcgaggtctgcaattacctgctatgaagtaataagatggctgaaacagaaagactcaatgcgtatcgaaacatgtggcttatggtgttatatgatttacctacagaaacccaagcccagcgcaaggcatttgctacgtttaggaagaatttgcagggacttgggtttagcatgtttcagttttcagcctatgtaagacatgtggccagtcgtgagtctgccgatgtttataaacgacgagtgaaggctattgtccctgaagaaggcgccgtgtgtgtgcttgagattaccgataaacaatttgaaaagatggaactttacctgggccgcaaacgcaagcccccacccaaccaaccgcgacaactggagttgttctaaaaaaatgaggtaagaaggctcaaaaagggtcttcttatctcattttttgtgttctgatttgcatctaaaccccttacaagagcgttgtttggtgggttttcggctgtaaagccgggcataaaaatacaaaatgtaatcaattcacaacgacatccacgctactattgccggcatgtcagctgtaaagcc

SEQ ID NO: 2632 - DNA, 16133 bp, synthetic construct
  source 1..16133: mol_type = other DNA
  misc_feature 1..16133: note = Synthetic
gtattcgttttccaaaacttgtggctattgaccgtgaaatgcaaaacttccatatgaaaacatatgaaaatggctttaccttagcggaattaacggatgattttagatgttttgcagcaagccaattgaaactttattatgatgaaacaatactaagaccattctttgctggacttgcttgtggtaaattaattattttacaaggtatttctggtacaggtaaaacctctctagcgtatgcttggggaaaatttgtaagtaatgattcatgtgttgcagcggttgaaccttcttggcgtgataaatctgactttttaggatactttaacgaatttactaaaaaatttaatgaaacaaaagctttaggagaaatatatcgagcatcgtttgatgacgatgttcatacaatcattttagatgaaatgaacttagctcgtgtcgaatattattttgccgatttcttatctactctagaaatgccaaatcgtgaggaatggattattgatttagtaccaagttcatggcctaatgatccaaagaaaattgtaaatggtcgaattaagattccaggaaatatttggtatataggaacaattaacaatgatgactcaacattcatggtaacggataaagtttatgaccgtgcaatgcctttagacattaatactaaagtagagccattcaaatgtcgtagtcaagaagctattcatatcaatgctagttacctagataaattatttgccgatgctttaaaacaacatccgatatctgatgaaggcttaaatggcgtgaaagaaatggataactatgtaatcgcacattttagaatcgcctttggtaatcgtattatgaaacaattaaatacctttgttgccgtttatgttgcatgtggtggaaccgaagtggctgccatcgactactttattgccaagaaaatattaagaaaatttgatcaattaagtgtcgcatttattcgtgatgaaatagaaccatttatctcatatttaaacaaaaaatatggtaaaggggtaatggtagaatgtatatcttatctagaaaacttgaaaaagagtatttagtaaggggtgaaaaacatggctcgttcattaaaagtaaataaagaaattaaagatactcgaaccgactttttaaaaaatttagattcagaaatggattatcgttctttatttcaaagcgatctccttgtttttgactgggttgatgaaatggaatttgcctgtccctatattgatataatcgttcgtaatccaaaattaactttaattcaagaaaaaaatgttgtaaaagtggaaagagcaaaaagaattaatgtggatagtgtaaaaaatcttgctaaaaatactcaatacattaataaagttaaagaagatcgctctgttgaacccaaaaagattttagaggttcgtaatgaagaaacatttaatatttatgaaaatcgatttctttatacacttattgatgacatgtctagatttatacgagataaagagcaaattttaaatcattttgaattaattgaaaacaaaagaatggagtatgctgcaaccactacagctgcaggtgaaaaaattcacatcgagctagccatttcttcagaatctctaccaaatcaaaaaatagataaaaaattagccgaagaaataaaaaaagtaaaaaagcgtttaaaaagaatcaaagattatatttctagttggtatcatagtcctatgatgaagcaattagaaagagaacacgtaaaacccattaagccacctttaaagaaaacaaatattacattaaaaaatccaaattttagaattgccgcacgtttatgggactttataagggcatatgatcttgaagaaaaagaaaacaatcaaaacaatgccaacttaaacgatagcattgaacttttaaaaggttttctagatcatagcttttttattgattatagtgtattaaattctatgaataccaagaaaagagttcaaaagaaaactatgaccgaatatgccttagtaattttaactgaagaagttcatagaattatatctcttcttttaagtagtgaagtaaaaattacagatgatgaattactagcacttattgccaaagagataaaagcggaaaaaaaagaacggctagtaggttcagatgacgttaagaaaaaatttcaatctgccatggatgaatacttagaaaggatgcaaaaaaacttgtagtatgaaaaaggaaacaataaaaaaaatattaaaaattattaaaaaagtattaaatatagttattggaatatttattgtcttatttttattagttgtttgtttacagcgattcacagataataatctctcactttttggctttcgaatgtttaccgttttaacaggaagtatggagccaaagtataacgtaggagatgtattattctcaaagtccattgatccaaatgacataaaagttggtgatgcgatcagttacttaggagaaacgggggatgtaaaagacaaagttgtaactcatgaagttatagaaattgaaacgaatgaaaatggcgagaagatatttcatacaaaaggaattgcaaacatcattgaagatccaataattcatgctgatcaaatatatggtaaggtaattcacaaatccacaatactatcttttatttcaaaaactattagaactccagtaggattaattgttttaatcatcattccagtcttttatattattggttcagaaatgttgacgggactattgtctcatgaagagaagagaagaaatagagagtaggggatacaaatgaaacgcaaacataaggtgtatttaaaattgaatttactatctttgttttgcattggtgtttcattcatatcgataacattagcttggtttgcttatagcggattaagtacagtcacaactgaagtagatgttaaagcatggaatattgaatttatgaaagattctgaagtagttactaatgaaatagtgattgatgtgaatgaagtttatccaggaatggagcctattgttgaaaaagtaagcattcataatcgaggcgattcaaacgctatgctaagctatcaagtagtgtcagcaagggtactaaatacagatttagaaaatcaagaaaatggctatttagtagacgtattatcacatgaattaccatttcatattaatattaatttagaagaccgctatatagaagctcaagatggagtaagcaacttttctgtatccatttcgtggccattagattctttaaatgacgaaaaggatagcaaatggggaaatgaagcatacaaattccaacaagaagaacaagctaaacaagcccaagacccaagttacactcctaaaaaatcgttaaaaattgtaataagtgttaaagcagaacaatttatagatacggaagaagctccagatattaactacaatgttggagacttaattttgtatgatgtagtgaataatcaaaaatgtgaaactttaagtagcacatgtttaaaaaattatgttttggatacaaataataccattggagattcaacagtaacattactaccagatttatatgaaacgtatccgagcggaaactacagtaattataatactcttttaaatgaaacggcaactacatggaaaggcacaactcgtgctctgacattagaagatattttaaaagtgatttcaactgataatcaatattcctatttaaaaagagataatttatctgatgtaattattggcaatctagaatacaaaaatcggatttcaacaatagttgagaaaagtaaagaatataatggattattttcattttctagtgaaaaattcccttatctatcttccaataagtgctattgggtaaatacagaatatagtgcggataaggcttatgcatttcaaaaacaagataatataacagcaacgatttatggaaacgataaaaatacgccttgcagtattgtccctgtaataattgttgataaagcaaatttaatggaataaaaaacaagtccaaaataacaaaatgggcttgtttttgttagtaaaaattatggtaaagattgtaagtctttaattatacatgtaagtttttgactttggagatccatcaatatcacatctttagaagaatacataattttagttaaagaatggatagaatttaaggtaagaaaaataaatatcctaaaaataacaattaagacaagctttatttgtaagagtattataattatacaataaaaatcaaggggcgaacgaaatgagttcatcttgacctttgatttttaaaatgtgtttttttagatctctaccgattagggttcacattaaatttaatctgtttttaaatattttctgtatcatctaattgttgctcaaattgaatagttgcttgaatttgtaaagtggtgttatttatagctgcatcttttccaatttcactatcagcagcatcgtccatagtatcatctacaccatcataccattcaaaataaattcgaatagtaaaaggttcaaaagaataatcttctatatcattttgaaaaactaaagagtcacttaattgattgttttctaatgtattggcagtaatttcatcaccttcattataatcgctatttaaaatagcatattttgtgatcattaaatcaggtatatttttatttaaaacttcaatatttacttgataagaaaaagatacatctacatttgttggatcaatattaatatcaaaatatccctgagtagatggagcaactttgtttgtcgcgatatcttcattttccactagaactggagtaatttgaatagaagaagaagacccgtctaaaatatctttttcattaacaagaatttgccaatttgcaaacaacatatctaagtttccagtagtgcttgcaacatacctggagtaagtattgctcattaaacttaaggttaaagctaatgaaattatgataaataaaattttacatttctttttcatactcactcctcctagttttacactattattgtataattatttacaaatataagcaacataaatatgacaacgactaacacaaaagtgtaaagaagtgtaaaaataaaaacacatatatatgttcgcactaaagcttgcattataaaaaaaagttcgatataataaactgcagaaacaaaaggaggcttatatgatagaggaaattaaacaaaaaatattatcagcagtagcaccaagagattatcaaaaaggcatgaattatgaggaaagctatgtagattatatcaattgcacacattttgataattccaaaagatttcaatttcttgtagaatcagaaagtagttatcaaaaatacatggttcaaattgaaatggtcggacaagacatcaaaaaaactttatgtacttgtttgcaatttcagcaataccatagttgtaaacacgttgcagcttgtttaattatctattcaaataaaatgtttgctttacctaaagaaacaataaccaaaaaatcagttgccttcctaacaaaattaaaaagacaatttaaccaagaaaatataaaaaaagaagaagtatttttagatccttatttatgttttgaatcgtcttattatcatgattacttagtcttaaaagtaaaaattggtcaagaaaaaaaatattctttattaggaaaattatcttcctttttaaatgaaataggtatgaatcgtccatatacttttggagcaaattttacatttgatcccaaaaagcattatttcagtaaagaaagcactgaatttataaatctattagatatgatgcgtaagtactatcgcatagcaggaaattccatatatcttgatgatacattatttaagcaaatcatcaaaatctttcctaataaaattcatatggaaaatccggaacgaatcatccctgtaaaaaaagaatttccattgacaacaaaattatctaaaatagctgataaatatcgaataaccatggaagaaatagaacttgtaaaacctttaacagaagattatgaatatgtttattttaaaaattgtatctatcacttaacaaaagatcaaagtttttttctaaaagagtcccttcacacaaatttagaggaattattactacccgaaagtgaatttaccagcttacaaaaaaatgtaattcggctagtaaaagaccacatcttgttagatgattctgtaagtgatctagtaatcataaataatccagatgtaaaattttatatagatattaatgaagaagatatcttgtgcactccaaaatttatttatcaagaggaagaaatttcttattttgacaaaagtgcaaccattctaagagatattgactacgaaaatgaagtggtaagagtattagataaatatgcctttcaaagtggaaaagattgcttttatttagaagatttatcagatatttgtgcatttttagaagaaggattagacgaattagctaatgagtatcctgtatttacttcagaaaaagtaaaaaatactaaaattttgaaaaaaagtaatgttagctctacctttagcataggaaaagataatattttacgttatgagtttgatttaggaaacattccaaatgatgaattagacaaggttatggcttccttaaaacaaaaaaagaaatactatcgacttaaaaacggggatattctttccttagaagaccaggctttacaagaattaagcgctttaacagaagaactagaattatctaaaaaagatatggataatgctacaggagaaattccaaaatatcgtgcgttgtatttagactctataaaaaattcaaaatacaaaattatcaaaaccgattctttatttcgagaatttattcatcaatttaaagaatttcaaaatgtagaagtaaaatttaccaaagaagagcaaaaaatccttagagattatcaacttctaggagtaaaatggttatatatgattcataagtgtggctttggaggaatcttagcagatgaaatgggcttaggaaaatccttacaaactatttattttatgcgtaaaattttacaagaagataaagatgcaaaattactaattgtttgtcccacatctttagtttataactgggaaagtgagtttttaaaatttgctcccgagatttcttatcatgtttttgctgaacaaaaagaaagaagacatgagactttacaaaactttgaaggcaatgtttatatcacaagctatggtcttttacgagaagatttagaattgtatcaagaaaagaaatttaaaatctttgttattgatgaagctcaaaatattaaaaatccaacaaccggacttaccaaagcagtaaaaagtatcaaagcagaaaccaaactggctttgacaggtactccaattgaaaactcaattgtcgagttatggagcatttttgattttatcatgccaggatttttatccaatttaatgaaatttcaaaaaaaatataaagtaaaagattttgatgaagaaaccaatcaacttttagaaaatttacggatgcaagttaaaccgtttattttacgaagaaagaaaaatgaagtcattaaagatttgccaccaaaaattgaaaacaatatttatattgatttaaatgaagaacaaaagaaaatctatgctgctgaagtaaaatatgcaaatgatgaaatgactaaattagttcaaagtgggggatttacgaagaacaaaatgatgatcttaagtttacttaccaaactaagacaaatatgtattagccccgaaataactttaaaagattatcaaggcggaagtagtaaaattgaaaacttattaaaaatcatcaaagaacaagtaatgaatggtcataaaatccttttgttcaccagttttaaaacagctttggaactggtcaaaaaatctttagatgaagaaaatatttcaaattatacaattgctggagatgtaagtgctcaaaaaagaaaaatgttagtagatgcctttaataaagataataccaatgtatttctaatcatgttaaaaagtgggggaacaggattaaacttaactagtgcggatgtagtcattcatctagatttatggtggaatcctcaagcggaaaatcaagcaacagatagaacccaccgtatcggtcaaacaaaaactgttgaagtaatcaaattaatatgcaaaggaactattgaagaaaaaatcttgaatttacaacaaaagaaaaaactgttaagcgataaaatgattgaagaggggatgagtgactccgattacttaaaaggcttaacagaaaaagatattcgcaatttacttgcttatgaaaataaagaataaaaaaggaattttaatttaaaagaaaaattccaatagttaaatacataacaaagactaaccaaaacaaataaggaatcagcaaataagcggattctttttttatattccaaaactttttgattaaatagaaaacaagaagaataatcgcgagaatcccaaaaatagctaaaaagcgcattttaaaaacaaagaaaataaaagtccatgtaagatttaaaaataattgaagatagtagacggtaatgaaagttttattatcatccacttttcgatataaataataactaatacccataagcaaataaagaattgtccaagcaataggaaaaacaataccgggtggagcaagtggtggttgatttaaagaagaataatccataaaatctttaatcacaaaaccaacaatgcttcctaaaattaagggaccaaatatttgcaaaaaatgaaatattttttctttcataaaaatcactcctagtattaatatagatttctttaagctttttatgctaaaataaagagggagaagatatgaaaagagaagaaatagaagaatgtgtaagtgaagttttagaagcaaatacttatgaaaaagtaaatgaaaatctttatttaacaaaatatcaaaaacaagtattagaagaatatcatattccatttcaagaatgtcaaaattccaaagagcttttatttttgctttcagatataattgatgatgaagaatatgatgaattagaaaatgtcgctagagaaattgctgaatatgattattataattcataaaatatagtagtaggtgtgtagtatatgagtaataaagaaatgagaaatatagttgaagcgttagcttcgtttaaaatggattattttgaagtttcaccagaatatgtgaaaaaaataattaaaagtaaatatagtacaaaaaagcattcgataagattacaaaggagaatgaattatggaaaaaaatcaaagtgatataaactgggaatcatacttttgggataattctgatgtattaaaaaataaattatttatacatgacaaaaataaattaaaagaaaaagaaatagaactttctttctacagacaagtagaattaatggagcaacctattgtaggaaaatttgatacagaacacttaaaaaatattcattattatttatttcaagatatatacgaatttgccggaaaatttcgaaatgtagatattgaaaaaaatgcgtgcacctttgttcattggcaagaaattcctgaaaagttacagatggaattagaattaatggaaaaagatttgagaaatataaattcaatatatgattttgcagaacatttatcaaaatacttttctgaaattatatacattcatccatttcgtgaagtaaacggacgaagtactagagaatttattcgtgagtatgcttgtgaaaaatctaaactttttccatttggaccacttgattttttgtggagtaaagttgatgtagaaacgattaaccatacaattcatttttcaatggtatttcgttcagccataacattagaatttttaaaagctttagttcccttagaacaagaaagaaagagataataaaacaatttaatatttcttgttctttgttgctttatgtgatataagtaaagtgatagatggaggaagtatgaaagaaaagaaatatattattggtcttgatcttggaatcaataatgtaggttattcagtaattgatgaagaatcaaaaaagattttaaaaaaaggagttcgcttgtttaatacagctgataaagctgaagaaagaagaattgctagaaataccagaagaagattaaaaagaagatcaaatcgtgtcgatgaaacattaaaactttttaaaagtattcattttccagatgaaataactattgaacctgatttgcttcaaaaaagagtaaaaggacttcatgaaaaattagaatcgcaagaaatcgtgaatattatttgctattttatgatgcaccgaggttatattccttttggagatgaagaaagaacgttagtagaattaaatgagctttttccttgtgaatattacctaaaaaagtggcgagaaataggcaaatatcgagctttagaagaagtagtaaatcaccaagatttaaaaagagaaatgatagctctcttagaaaatcaaatgaaatactatccagaattatctcaaattgttgggaatgaagaaaaaggtttactttggatttttagtcgcaaaagaaagttttgggaaggaccgggaagtacaagatctttctcagaatatggtcgcttcaaaaatgaggaagatgttttaaaatatcaagaattaaaaaaagaaggcaaagaaaaatacttatttgaagatctaattggccattgcaaaatttatgtaaacgaaaaatgtgcacctaaagcaaattactatgctgaagaatttaatctaattaatgactttttaaatattcgggtaatcaacagggaaaatattttaaaagaaagttatgtacatcaagatacaagcaaagcttatcatcttactacagatgcaattgaagcaattattgagtattgtaaaaattttacaggtaaaatcctttcttataataaagttttaaaagatgttttgggcttaacaaaagaagacatagcaggataccggattgataaagatgggaaaccattattctctttattaaatgcctatcgctctattaaaaaaaattatgaagaaaagaatctagatagttcttggttaataaatgatttagaaaattataaccgtctaattaatattttagctgttgcaccaggaaaagttgaaattgcgaaaatgctagaaaatattcataaattcactcaagaagaattagatgtaattggaaaaatacaagaaaaattaaaaaaagatcgtttcttagattaccatgctttaagtgagaaagccttaacaagagctatccaagatatgaaagctacatgtttaaactttatgcaagtatcaaagaaattcgattacgaaaaagaagcatgtgaatactatttgaaaaactatggcactggggaaggaactcttttaatgacttcaaaattcatagatgaaattgtcgcatctcctcaagtgaaaaaaacgcttcgtcaagctattcgtatgatcaatgctattattgaagaacagggaaactacccatcagtaatcgctattgaatcggctaaggaaatgaatggcgaagaaaaaataaaagaaatagaacgtgttcaaaaaattcaagaaaaactacgtaaagatgcgaaaactattttagaaaacacagtaagtgatgataaagtcacagataacatgattgaaagagtcatactttttgaagaaattgatggccattgtccttactgtggtaaagcaatcaatatcaatgatgtaataagtaataccgcagaagtagaacacattattccaataagtcaaagtgcagatgactccttggaaaataaaacgattgcttgtcgtgattgtaatagtaaaaagaaaaataaaataccatttagttatatgtcttcaacagaatttgaagaatttacaaagcgagttttacaactaaatatttccgaaaaaaagagacaaaatcttttaactacggatgatccaaataaatatcaaacaagattttttaatcgaaatttacgagacacagcttatgcaactaaagagttagtcacccaagttcgtttatttaatgaatatttaaaggccaatttaaaaggtgaaaaaattgaaataaaaaccttatctactcctggacaattaacccataaagtaagaagatggtgggatttagataagaaccgagatattggaaaatttcatcatgcagtagatgcatctattgtcgcgggaattgctacaactccaattggaaaaagaatagtagaagctcaaaacaatagtcaattttggattaaagaaaaagacaaagtaaaatcaattcctaaattactagaaaaatttactatgtatgatatgaaagaagaaatctctaaaattcaaagtgatgaagatatttttatttcaatgcaagtaaataaagaagcaaatagaagcatagcaaattcaaatatttattcttatataaaaaaggaagaggaatattataaaattgatcaaatttcagatatttatgctcctgatttatttaaaaagaatgaatctcttttaaatgaattatttgatgaaacaaaaacaacaaaaattcttttgtgtcaagaaaaagatccgaaattatttcgatatttaagagaaatctactataaatatcaagacggaaaaaccaatccttttagaaactactgtgaagaattaatggaagataaatcaaaaaaatttaacgaaagaacagatggaatattcacaccttcaaaaaatggaataggtgtactagtaaaaaaactccgttatatgcaacgagcaactgatccttttgttttaaacaaaaaaacgattaataaaaaagaaaatacttatatagggctagacaatgtagctatttattgtacaaagctttactgggataaagatgagaaaaaaatacttttctttccaatttatttacctgtattaaaatttgataaaaagaaaggaaatgatcaacatcctaaaataaatgatcaacatcctttatatcaattgtattacaacaaacttttaaaaggaaaaagagtcgaacatattgtagatttatataatggcaattttattaaaatagagaaaaataaaaaagctcctacgtttgaatatgtgtctacttttgataaaaattctggaaatgtaagatgtaaattattaaatggtaaaaacggctcaagaatttcttcaaaagataaattcactttatatgatgtagatattcttggaaataaaaaaaagcgtttgacatggcctaaagagtaagatataatgtagatggatcttgaaagcaatagttttcaacttcctaaattacacagggtttcctattataacttattttaggtaaccatttgagatgcttgaagcctagcatctctttttttataataaaatggcttttagaaccgtatatatagaaaaggctgttcgtgttcgattagatttaaataacattgttgtcaattttgaaaatgataattattatataaacttagatgaaattagtacaattatatttgatgatccaaggtgtaatatttctttaaaattattagcaacattatgtgaagaaggaataaatgtcatttttaatgattcttcacatatgccaataggttctttacaaactttatacaatcatgctcgtgctccaaaaaaaataaaaaatcaaatagaatgggataaaaatagccaaatttatttatggactgaaattattaaatgtaaaattcaaaatcaaatacttactttaaaaaaagcaaataaattcgaaaaaatatctttattagaaaatatgatatctgatgtagttttaggggatttaaccaataaagaaggaatagctagtcgcgtttattttaaagaattgtttggaaatacatttaaaagatttgatgaaacaataataaattatgcattaaattatatttatcaagttattcgttctaaaatagctcaagaaattgttgcctgtggatatataccagctttaggaatctgtcataaaagtgaattcaatttatataatctagctgatgattttattgaagtatttagaccgatctgtgattactatatttatgaaattttaaccaatacaatagatgaatacttaactccaaatattaaaagagatattattgatattttaaacaacaaagtaaaatttcaaaatggagaatataaaattcatattgttatccaattttttgttcaaacattatttaaatatctagaaactggtgatatctcttatatacattttcctaaactatgcaatatataaatttatataaacaaatgcgtttaattttaatttatgatttaccagtttatgatgaagagaatagaaaaatatatagtaaatttcatagaaacattattcgtttaggattttatatgcttcaatattctgtgtattccaaagttattcagaatgatacatcaatgaaacaatacctatttaaattagaaagaataattccaaaagtaggaaatattgtcgttctgaaaataacagaaaaacaatatcaagatatgatttatttaagaggagataaaaacaaatttgacatgttagttggtggtaaagaactagtgatttttggaggtgattattgtgataactatgaaaatgaaaacaagtgaagaagaattacaattagatataagtaaaaaaaattctatattaattttaaataaattaacttttttaaaattttataataatttctatcaattatttgaaaataaaaataaagatatagaaatttttttagaaaataaacttcttgattctaaaaatgcttttttattaactttaacagatcaaacagaaatattagaaaatatgaattttaaaaaaggaacgctattttatgaatatattgtaactcaaattaattcaaatgaaacattagataacgatatcattttttatgatttaataaatattttaaaaaacgttcaaagaagtttaaaaatgaatatagagtatgaaataaatgaagatttagaaaaacttatattatctcaagtagaatttaatttgaaagtaaattttgaaaacataaatgaaataataaatcttctattaaaaaattatttagaaaaaaacataagtaaaatcggaataattttttatgattcaagcataatttctatagatataaatttgtatgaatcttgctatttttttgatatcaattctaaaaaaagaatagaagagtacaatggtattgttgataaagaagtaaaagaatttgatttagactttataataagcaaattagagagtatttggcctgtagattttaatagggatgaaaccatgctttatgtagaactttattggaaaagtaagttaataaatctaagtttagaagttttaaatgaaacgagtttattaacatataaattattagataaaatgtataacaaagaatcaaaaataatgataaaaaattttgaaattcgtgacaatgttaaatcttttttagaacaaatttaaaaaatatgctataatttctataggttttgttttaggatcctgtgtaatttaggtagttgaaaaccgagggaacaggaactgaaggtggttatacgttttaggatcctgtgtaatttaggtagttgaaaacttaaacttcagttactgtagttgttcccggcgtagtgttttaggatcctgtgtaatttaggtagttgaaaactttcacgcaatgataataatagctccgctggttttaggatcctgtgtaatttaggtagttgaaaactatatctggattaggaaatgtatctggtctgttttaggatcctgtgtaatttaggtagttgaaaactgattacttctttttggtcttttactattgttttaggatcctgtgtaatttaggtagttgaaaacatcggtatcgtcatttgtcccatttccatagttttaggatcctgtgtaatttaggtagttgaaaacttcaaaataaaaatattcataaccactatagttttaggatcctgtgtaatttaggtagttgaaaacagcatttgctaatcctgatgtagtattatggttttaggatcctgtgtaatttaggtagttgaa

SEQ ID NO: 2633 - DNA, 23300 bp, synthetic construct
  misc_feature 1..23300: note = Synthetic
  source 1..23300: mol_type = other DNA
  variation 5832..5947: note = n is a, c, g, or t
accaactcgtcggcacgctgaccgtcgcggacggcgccgcccgattctccgccggccgggccatccaccagacgtccttcctcaaggtcaagaccctcgcgccggtcgaccgggaaatccgcctgcggctcgtgggccgcctcgaagccctgcagcccgtgcccgacgaaaacggcgtccccacgctggatgccgacggccgctggcggttcacccagtacaacctggagcaggaaagccaggaaatcgtcatccccgccggcaccccggcccgctgggagaccttgatcgagcagccgttcacccatctcgaccgggtcgacgtgatcggccaacccgccgggaccgccaagatcggcgtctatcagccggagaacgtcgtcagcctgttcgcccgctacggccgcaacgtcgtgcccgtcggcgtgctcggccgcatcaccagcgacccgtgggtctattcgttcaagaccgtcctgtccgtcacgcccgactacatccagtaccagcccaacggcccgtacctgcccgtcgaccggcagaacatccgcctcacgctcgatccggccacgcccggctacgccgatttcgcgcggtcggacgcctacggctacgacgtcgccctgaccggcgaactgctggccgccgcccacgccgccaaccaaggcgcgttcgaccaggccaactacctgcggaactacaacatcggcggccaaatgcgcctgcgcgtgcccctgaacggccccgcccccatccacgtcgttcgcccgcagggcgcggacgaaccgcgccaaggcaacgccctcgtcgagttttccctctatctgcgcgacgaaatggtgcgcgtgatcaagcagaccacgccccagcccaacgccgccttccacggcgcgctcaccctcggcctccgctacggcatgcagaacaccgtgtccgtcgcgtccggcagccacgacggcaccgtcgtgccgccgctggtggccctcggcaaggacaccgacgtcctgatcgccgaggaattccgcgcctcgggcatcaaccacgtgctggccgtgtccggcctgcacgtcacgatcatcaccatcatgttcatcggcatcttcgtcatgctgaaagtctccaagaaggtctacgtcccgttcatcatcttcgcgctggtcgtgttcgccatcatcacgggcgcgcggccctcgaccctgcgcgcggtgatcatgaactcgctgttcctgctcacctggggctacatgggcgaaggcgtgcgggcctccgcgctgctcggcgtgcccatcgccgccttcatgatcctgctgcagaaccccgccatggcggtggatccgtccttcacgctgtccttcggcgcgatcctgtcgctggccatcctgacccagcccttcttcgacatcttcaagaaattcaagggcaacgatttcatcgccctgatcgtcatgatcgcggtgctgacctacgcctacgccgcgcattggctcctgaccgtcaccctccgcttctggctgggctatttcctgctggccgcggtcgtcttcggcctggcgcgcctcctgacccgccgcggcttcacgcccatccgcgactacggcttcgccaacctcaaccccggcgtcgccggcttcatcgccgcgcagttcggcatgcagatcggcatgatgatccccctcagcgcctactacttcttccgctggcccgtcgccggcgcctacgccaacctgatcgccatcccgctcgtcggcgtcgtcctgcagctctccatgctcgccggcctgctcggcctcatccccggcatcggcatctatctcgccctgctgctcagcgccgccaactgggtcttctcgacgctgttcctcctcatcggccactacttctcccagtggttcctctatcccttcgtcccccgacccaccgtccgcgacctgttcgtctactacgccgccgtgtgcgccttcgcctggtggcggcccctctggtaccgcgtggtccggcccgcctggcggcgcgcctccgtttccctgcgcatcgtcggctgcgccgccgtcgccctcgtcctcgccggcgtcgccgtctccggcgtccaggagcggaacgccatccgcaccgccggcaaactccacgtctccgtcatcgccgtcggctacggctccgccatcctcgtcgacacccccgacaaccaggccatcctgatcgacaccgctttcatccagaccgaccgcggccgccgcaacgacgccgaacgcaccgtcctgccccagatcttcgccaagaagatcaagcggctcgacgccctcgtcctcacctcgcccgcccgccagcgcagcgacggcctcttcaccgtgctccagcacgtcgacgtcgaccgcttctacctgccgaagtccgccgccggcgtcctcgcgcaagaaccgcttgcgtccttgctggccaagcgctcgcccaagcgcctggcgcagatcgccggcggcaccgccgtcgcccccgaattcgtcgccgccggcgacgtcctctaccgcgccgaatgcaacggccagcccttcgtcgtcgaagccctcggccccgccgccggcgacgaccaggcgcccctgtccctccggatttcctacggagatttcgccatgctcgtgccttccgacctcacgctcgcgcagcaaaaggatttcctcgccgccgttccgcccgaaaaactcaaggcccaggtcgtcgtcgcgccccaccacggcaccgccggcctcgaaggcatcgccgtcggcatccccgacgacctcgaccgcaagctcgccgaaaccaccggcgccatcctgaaggccgccggcgccgacgccgtcgtcttcgagttcggcaacccccgccccgtcgtcgaactgaagtacaaggaagccgtcaagatccacggcgccgccaagcgcgccgccgaagacgccctgcccggcgccctcgtcgccgccaccgacgtcgatggcgccgtcgtggtcacctccgacggcaccgaccaccacgtctatacccagctcggcgccaccggcaccaacgtcgacgagccctccctcctcgaaatcggctggtaaggccttccgctccagccccccgcgggcttgccccgcgggtgaatccgttcgggcggcccccgcgcggccgccccgaacggtcggctgttttcgttcccgacctcgccatccaatgtccaatcatgaagtgcccccctgccttcacttggaaattgaagattggatattgattattggatattccgttccccgattcccgctcaccgtcgccaagcttgctttccccgtccctcggcgttaaattgccgccaaaggtcaggagattgcccatgaaaaccatcgcgtcggcgctcgcttccctgctgcttctctccgtcgcggctttcgccgccgacgtcgaaatgacgcccgtcgaatcctccctcctcaacaaagtcggctacgacccggaaacccagaccctcgtcgtccagatgaacaacagctccgaccgctacgtctactcggacgtgccccagtccgtttacgacggcctgatggacgcctcctccaagggctccttctacgtgaagaaaatcaagggccagtatccctcccagcgcaaatagcgccagcctgctttcggcttcagccccccctcggacttgccccggtttcggttttagacccctgcgggcttgtcccgtgggtgaatcaggccctccggccgcccgttcgggcggccagcttttcttcagatctcaatcttcaatattcaatgtccaatctccaatcatcaaatgaacagccccccctcgcaaacgggcgcatccccgtttcactgacttgatttggagtgcggcggcatgacgccgctttggggccgcgacatgtcgcggcccgagaaagcgcggtcatgcccgcgcactccaaaagggccggccaacggaaccaacggcgtttcatttccgggcggtcaatgaaacgtggattcaccccctgcaaacccagtcttcacttgaacattgatgattgaacgttgaatattggatattgagttccccgttttcccccgcgaatcggcttgccccgcgccgccgcccccgctagtctcgccggccatgaaggcggattagccgcccgacgtccccaccccgaggtttttcacatggccaaatacattttcgtgaccggcggcgtggtttcctcgctcggcaagggcatcaccgccgcctccatcgggcgcctgctcatcgcccgcggcctgcgcctccgcatgctcaagatggatccctacctcaacgtcgatcccggcaccatgagcccctaccagcacggcgaggtctacgtcaccgacgacggcgccgaaaccgatctcgacctcggccactacgagcgcttcaccggccagcccacctcccgcgcctcctccgtctcctccggccgcatctattgggacgtcctccagaaggaacgccgcggcgactacctcggccacaccatccagatgatcccccacatcaccgacgaaatcaaaagccgcgtccgcgccctcgccgcgcccgacgtcgacgtcgtcgtggtcgagatcggcggcaccgtcggcgacatcgaaggcctgacgttcctcgaagccatccgccagatcgggctcgaggaaggccgcgacaacgtcatgtacgtccacatgacctacctgcccttcatccgcgccgccggcgaactcaagaccaagcccagccagcagtccgtcgccaagctgcgcgaaatcggcatcatccccgacgccctcgtctgccgctccgaaacgcccatcggcgaggagctccgccgcaagctctcgctcttctgcaacgtgcccgtccacgccgtcatcgaggagctcgacgtccgccacaccatctacgaagtgcccctcgtcctcgccgaacagggcctcgacgaaatcatcctcgtccacttccgcctcgcccgccccggcaccaagctcgcgccgtggaaagccatggtcgaagccctcgtccggcccgcaggcaccgtcaagatcggcgtcgtcggcaagtattccgaactcccggacgcctataaatccctgcacgaagccctccgccacggcggcgccgcccaccgccaggccgtcgagatcgtccggatctcggccgaagacatcgaagccgggaaaatccccgacgaattgaagcaggtcgacggcatcctcgtgcccggcggcttcggccagcgcggcaccgaaggcaagatcgccgcgatccgctacgcccgcgaaaacggcattccgtttttcggcatctgccttggcctccagtgcgccgtcatcgaatacgcccgccacgtcggcggcctcgccggcgcccactccaccgagatcgagcccgccacgccccaccccgtcgtctgcctcatggaagagcaggaaaaagtcgtcgatctcggcggcagcatgcgcctcggcgcctggccctgcgcgctgaaacccggcagcctcgccgcccggatctacggcgcggaaaatatttccgaacgccaccgccaccgctacgaagtcaacaaccgctaccgcgcgcagctcgaagccgccggcctcgtcctttccggcctctcccccgacggccacctcgtcgaaatggtcgaagtgcccacccacccctggttcgtcgccgtccagttccatcccgaactcaaatcccagcccctcgcgccccatcccctcttccgcgatttcatcgccgccgccctgaaacgcaaagccggataaacacgaattttgcgaatcacacgaaaatttcccccgcttatcttcacttgaagattggatattgannnnnnnnnnnnnnnnnnnnnnnnnnnnnnnnnnnnnnnnnnnnnnnnnnnnnnnnnnnnnnnnnnnnnnnnnnnnnnnnnnnnnnnnnnnnnnnnnnnnnnnnnnnnnnnnnnnnccgccgccctgaaacgccaagccggatgagcgcggaaatgtttttacgttctacgtaaaagtccgccgaactttttacgttccacgtaaaacccgctccgcctaaaaccgataggccacggacatttccagctgggtgcgttcgccgaacccggcctccgcgccgatctgccagttggccgtgatcgcatagctggccccgaccagcgcgttccacggttcttgttcctcgagttcgagatcgtaggcgatgctccccagccccggcagcgcgatggcgccttcgtgctcttcctgcgcccgctggtacatcgcgcccgcccacagcgccagcgcgccgacgcgcacgcccaccagcggccgcacgacgtacgcttccaccgacgtctcttcgtcgagatcggtccaggtcgccacgccgttcaccgccgcgaacgccggccccgccccccacgtgagcgtgcatccgatcccgtacacgaacccggaatactccacgtccagtccgcggtccagcgcgcccagcaccggcgccgcctccggcggcagcgccccgaagctcacctccgtctcgccgtcgatccgccccgccagcgcgaacacgttcaggaacggaaacagccagacgtccgccttcaggccgatctgcgtcacctcgttgtccacgtcgatcgtcgcgggatccagctgctgcaccatcggaccgatccgcggatccagcgccgaggaggcggacagccggttgatgtcgtagccgtggtcctgcccgtaacagaggacggtcaggccgaacggcagcggcaattcccgttcccccgcccattcggacagcagcggcaagcgggccggttctcccgcgcaggccgcacagccccaaacaaccaacgccaacccgccgacgatcccggatgcctttttcatcgcgcgcctccttgtcggcccggttttcccgctgcgcttcagccaggtggccccggacttcaccccgagtatggccccgctttcgtatttcgcgcaatcccggatgcggcgattcaccgttttttaacccaaatcgaacgcaaagctctgcggcgccgaagcgccgcggagcgtgcgtcgcgcgatgccgcgcggatcagaacgccaagctcaaggtcacgccgccgtagacgctgtccttctcgccgtacgccgcttccgccgcgtcttccagatcggaatccggcagcatcatgtagctgaccgacggcgtcaggctcaggttttccgtcaccgcgatcggcaacgcggcgctcagcaccagatcgttcagcgccgcgtcgtccagcccgaaatagcccgcgttgtagtccgcatcgccgaagcccagcgaagccttcaggtccagccccaccttgtccatcagcgcaaaggagtgcccgaccgacgccaccgcgtagaggccttcgatctcgtccacgtcgtagtacaccgccaaagccggcgccaaaagcacgtccacgcccacggacgcaaacacttccaccgtgcccggataatcttccacggtcgtcgttccgtcgtcggcctcggtttcgatcgtcgaattcgggaacgtgtactgcacgacgccgacgcccaactcgaacttgcccacggtcttcgaatacgaaaccgtccagtccatttcgtcgaactcgccggagctgttcggattgtccgtcaggtccatgctcgaccaggcgttcaccgcgaatccgccgatggtgccggtcaaccccggctgcgccaccgcctcgtcgttcagcacctgcccgcgccacacgtaggccgataccaccggcacgtccaccgccacgcccgtttcgatttccgccgcggccgccgcggccagggccagcattcccacccatccaagtcccagactcttcttcatcgcttcctctccttttcgtttccgccccgcgagtagtgcgcggcgatctttcgatttgggaatgaagtagcaagccccatgccaagacccccgacaagccgcctgtttccggcgcatctctttgcgccggatggaaaaaatttaccccttcttccgcgatgtttccggatcccgccggcggattgccgacgttattggatgaagttacgactttcgcttcgaaaatgaattcattgtggcccaacgtgattttcgtcgtgccaagcctcgcggatcggcctatttagacaatacgatatattgacacatatgtttagtacgagtattgtatttacatgaactcctactctccaaaggccacggtggaactgttccatctgctgctgctcgacctgctcggccggaaagccgaccggaagctctacgccctcaaaggcggctgcaacctgcggtttttcctgaaaagcatccgctattcggaagatatggacatcgacgtcggtcccggcctgcccaaggacaagctggccgacctcgtagagcgcatgctcgcctcgaaaacgctcgcggatctgctcgccgtgcgccggctccgcatcgtcgaacgctcggcgcccaagcagacggataccacccagcgctggaaattcgggctcgaacgggaaggttcctccgtcttgctgcgcacgaaaatcgaattctcccgccgcggcatggacgcggaaaccgccttcggccccgtcgatccccagctcgtccgcacctacgagctcgcgccggtcctcgcgaaccattacgcgccccaggccgcgctggagcagaaaatccgcgccctggccacgcgccgcgaggtccaagcccgggacgtgttcgatctggacctcctgctgaactccggcattgcgccgaaatcgaccgacgccgaattgcggcgcaaggcccgggacaacgccctttcggtcgggttcgacacgttcaaggcccaggtcgtgtcgttcctagatcccgaccatcagaaccaatacgactcgcccgacctatgggatgaactcgtgctgcgggtggtcgcggccctggagaatccggcgtgacgctggccggggcattggaaaagctgcaagcgttcggcctgccggtgctgcgcacggcggacgtcgccgcgcatcttgccgtcggcccggcgaacgcttcccagattatggcgcgcttggcccgtcacggatacgtgcggcgcatcaagcgcggactctgggccttggccggcaccgaattgccggccgtcgtcccctacttgacggccccgtttcccgcctacgtttcgctgcagtccgcgctttaccatcacgggatgatctcccagatcccggacgtcctgtatggcgtctccttggcgcgcacccggcgctatcggactcccctgggcacggtctccgtgcaccacatccccgatcgcctgtttttcgggtacgaaatgtgcggcaacggcgccttcggcatggcaacgcccgaaaaagccctggtagattttttctatctgggctccgcgaaatcccgactgtttgcggccttgccagaactggaattcccacccggcttcagccccaaacgcctgcaatcgatgatcgcccgaatcccagaccccaggcgccgatcccacgtccagacccgggccgaacaacttttacgtactacgtaaaaatccggcaaagtttttacgttctacgtaatttcgcccgaaacttttgacgttctgcggaaaacccatgtccacctcgggttccatcccgcccatgatcttttgtaggccagggcgccgacctggcagatggaaatcgaggctcataaacccgccggctcaacgcgccggcctacagcaaaaccccaaaaccaaaacggaccggaaagccaatgaatccagcccccccctgccacaaattgcggcctgccggtttttacgtgccgtggaaaatccgcctgcacgcacaccccatcaatgcgagtgacattaaatcatgggattggccccttttcattctcatagggccctttttcaaagccacgggtcaaccgaatattggcaattgccgacgccaccattttcgatactattaaacccatgacaggtaccttatctggccctgcacagcaaggacacacatgaattcaacggaaactgtttttgcgtttgattgcggcctggcctctctcggggaagcggtaagacaggggcagagtttccctttggtggaatcgtggcttatccctgataaattcgcggaaaccaaatctgcagcgatgcgcaggcgcatgatgaccacccgcgacgcccataaagaacgggagttgtggctcctgaaaaccttcgaggatttgggaattgaagttctgcgcgggaaggaagtttccaaaacgcctgccgggtggaccgtgacaagaaaggcagacccccgcttgacccgggaattccccaaacccggagacgacacttgctacacgtcctgtctcctgcggatcaaactccttcgcggtgaaaaactggcaccttggcaaatctataaggccatccgctccgcaatccaaaaacgcggctacgatcccgacatcccctggaaaaaccgcgaagaaaaacaacaaaagaaggaagaagaagaagaagcggcggccgtgctgttcgacgagaaattgctccggaagaccgtgggcgacaatccggattggctctacccctgctatctcgacgctttccgaatgggcctttggaacccagcccaccccacccaacttggaatgcgtatcgaccacaaggcccaaagcacccgcaagacaattatgctgcgcgcgctggtggaaaaggaattacgcgatttgctgcatcaagcggcccagcaactcccggcgctggccggcaaagaggaattcgtcctgtatggacccaacggcaaatatacctcctcctcggtgcgcgcaggcgccttggcccaaaaagtgccccgattcgacaaccgcatcatcgacaaatgcgctctgattccgcgcctgaatgtgtgtaaaatccgcatggaaggaacgcagccccacccggcgtcccaaatcattttcgaaatcaccttcctgcagaaactcaagaacatgcgcgtccagggttccgcaggcatccggggcctcacccccgccgaaatcgccttggccgccttctcgcaaaaaaactcccttccgcccaaggcatgggctgctttttgtgaggaatgcggtttgcaccccgtccccgccttcaagaagctggtgttcaaagacatttcccccgtccttgcccccgaggtcttccgctccgccttacttgagaaactggccagcgtcagcgtcctggattccggaaaacgcgtgcggaatttgaccgacgacgaacgcgccgccttgctcgccctgatgcaaaagcctcgcgactcattttctattacggcctccaagtgggcggatttttgcggggaccttggggtttcccccttgcccggccacgaagaagtcaagccgcccaaggccgccggccgcgctcgcttctgccgacccgccgcccagatcctaaaacgactgattctttccggccaggctcccgccgccttccacgccgccgagatcctcaacctcggaggtaacgccgatccccgcaagggtctcgtcgcggccgatctggatttcttgctgcacatgggcgactcttgggatgccatccgcatacccgacggcaaactggacgccatcgccgaccagtacacggacgccgatgaagccatccgcaaactgatcggcagccagaacaaccccgtcgtgcgccaccgcctgggcgttttcgcccagcgcctgcgggagttgaagcggcgttttggcgtgcccgaccaggtcgtgctggagttcgtccgcgaagatttcatgggcgacaaagcccgcatggaactcaagaaattccagaacgaccgcgccaaagcccgagccgaagcgcgagcgcgggtggccgaactgggcatctccgagaagaactccctgcgctacgagttgtggaaggcccagggcgggcggtgcctgtacacggacgatcctctggccgcaaccgaactggacaactaccatgtcgaccacatcgtgccccgcgcgaaaggcggacccgattcccgcctcaactatgtcctgacgctcaatcaaaccaacgacgacaaagccgaccgcaccccctacgaatggttgtccggcaatcccgcccgatggctggcctatgtgaaccgcgtggagtcccggctcaaggccgccgacggcatctcccgcaagaccgcccagttgctcaccttgcccaatgccgtcgaacttgccgaaagatacaccgccctggccgagaccgcctggatttcaaggctcgcgcagaaaatcgccgatctgtcctttggatggcgaaacggcatcgatgcggccggacaaaagcgcaccgtcgtcgtttccggcgggctcaccgcccgcatccggcgcaaatacggcctcaaccggatcttgaatcccggcgcggcgtccgaagaggaagcggaaaagaaaaaccgctccgacaaacgccaccacgcgctcgacgcgatgacgatcagtttcatcccgcaatgggcgcgggaccccgacaagaccggcttcttccgcttccccaaggccatccgcgacaatccgctgccgtttttccaggcccggatcgatgccgtcgtgccccggcaactctgctacgaaaaggcgccgttggccgaaaccatctacggcctacgcaaaacgccagagggcaaccaggttgtaaagcgcaccgacctgcgcgatttggcctaccaaaccgtcaacatgaagacggttttcaatatcgactatgccgtcaaaaacggcatcccgaaaatcctggacgagcgcatccaatccgccttgctcgaattcgcccggtcgaaacccaccgaagaggaatggaaccgctttgccgcggacttcgccccctttggttctcgcgttcgccgcgtgcggctcgtcgaaaccgccctcccgccagacaccatgggcgaattcaaaaacatgtccaaagatggcaccgccatgttgcgcaagccgctcaaagccaacaaaggccagtatgtcttcacggaacccgatggcaaaatcaaggtctgccccgtgcattccttcgaaagccccttccagatccggaccctcctcttggccaaagaacctgggcgcgtcatccaaggcttctatcaaacgggatgcctggtcgcacttgaaagggacatggaagccggaaagcataaaatcccaaagggcgtttatcgcttaagcaccattcgcgcggatgcatttgtgggtattttcaacacccacggaaacttgctgggtccagtcggcatccaacatttgttgcgggctgggttcaagcgcatcgacggctgatgtaccacgtcctgcacgtcttgcggcacggatcgaccctgaccaaacgcgaagggttcatcgtctgtaagggcgcggatggcgtcgaacaatctcttccgtacgcggacgtccgggccgtggtcatcgccgcgcgcggagtgaccatctcgtcgaattttttaagtgcaattctcgaaggcgatggcatcgtcctccactgcaacgagcgctaccaaccctgcggcctgagcgcaccgctggggaggatcgtggaccggaacgcctgcctggcccaagccgctcggcccgaaaaactaaacgcccgcatttggaatgccctgctgcggcgaaaaacggaaaaccagattcgggtcttgcgggggctggacatttcctcgccccggctggaactcgcgctggccagcggcccccttcacgagggggactgcgccaaaacctattggcgtctatatttcccccggctggggtccaatgccttccgcgcccgttcggccgagacaaactgcggcatcaaccaccgcctcaactacggctatgccgtcctctccgccctatgccatcgttcgctgctgatccatgggctctcgcctctcttcggcgtccagcacaccacccgctaccgcacccacccgctggtctatgatgtcatggagccctttcgccagttcgtcgaccgcatgctggccgaattccagcccccgcccgacgaggatgccatgaaggcatggtgcaagcatgtcggcacggcgctccgcgaatgccgcgtccaccacccccgctataccatcaagctgatggatgccatcgacgcgacatgcaagtccctttccgatgcctatgccgcccgctctgtcacacccctttggctgcccgccatggcatgaaaaaaagcgcattccgcatgggttggattctggccatgttcgatctccccgtcctgaccaagccccagcgcatcgtcgcttcgcgctttcgcactcgactccgcaaggaaggctacctgatgatccaatattccgtttatgcccgcccctgcgtcaccgtcgaacaaatggaaacccatgccggccgcgttaaaaaattcgcgcccgccaatggaaatgtgcggctcctgttcatgaccgaccagcaatgggccaccagccaaaccatcatcggcgagtattatccgcagataaatcgcgaaaccgcccccgctatgccccgccaaatcgaattctgggaataaaaatccgacatctcggcgtgccaggcagaggccgaaatgtcggatcatcagttaagacttcacccctgaaatcttgtcgcaactctcatctctctagcccgttccgtcaaggctaatctaacagaaccgtttggggggtgaagtcaaaacacgtccgtgccgcacgccatgaaaagctgcaatctaacagaaccgtttggggggtgaagtcaaaaccatgtaatgtccttccggtttgttttttctaatctaacagaaccgtttggggggtgaagtcaaaactcgccccggcgcttcccgcgcgtcgtcggcaatctaacagaaccgtttggggggtgaagtcaaaacgcctctccgcggcctcactcggcccctacgaatctaacagaaccgtttggggggtgaagtcaaaacctgtcgcgaatcttcatgggctccactttgaatctaacagaaccgtttggggggtgaagtcaaaacgaggctggacgcttcaatgaggccgggcacaatctaacagaaccgtttggggggtgaagtcaaaacgactggtgcgccgttctactacaacatctaaatctaacagaaccgtttggggggtgaagtcaaaacagccgcttttccagatcccagggcggcagcaatctaacagaaccgtttggggggtgaagtcaaaacttccgagacgatgcggactatgcgcccgtaaatctaacagaaccgtttggggggtgaagtcaaaactagaggcccgcaatgagtccgagcgatccgaatctaacagaaccgtttggggggtgaagtcaaaaccgggcgctggtggaggaatactcggcggcaaatctaacagaaccgtttggggggtgaagtcaaaactcatcggtcatggcatcccatttgcgtttgaatctaacagaaccgtttggggggtgaagtcaaaacgtatccggtcaatacgtccgcggcgcggtcaatctaacagaaccgtttggggggtgaagtcaaaacccgccgatcccgtcatttacgaggccaccgaatctaacagaaccgtttggggggtgaagtcaaaacagccatcgtttacaagtgtatgcaaactataatctaacagaaccgtttggggggtgaagtcaaaaccgcgcctgctacgtctccgccgacgcctccaatctaacagaaccgtttggggggtgaagtcaaaacattgcatcggccatcccgatggccatttcgaatctaacagaaccgtttggggggtgaagtcaaaacctcgacagctcgtttacctctcgggccgtcaatctaacagaaccgtttggggggtgaagtcaaaacctttgggccgggatgccgacactcaaaggcaatctaacagaaccgtttggggggtgaagtcaaaaccaggcggtcggcggaggaagcgcccgtcgcaatctaacagaaccgtttggggggtgaagtcaaaacacgatggacgcgtctgcgacttccgccgccaatctaacagaaccgtttggggggtgaagtcaaaaccggggaagacgtcgatatgggaaccacgccaatctaacagaaccgtttggggggtgaagtcaaaactaatctccgctggccgccgttcgcccaaacgagacctgttttcctgcttggatcaggattccattcgcgctattcgcgccattcgtagttggctcggaggtctcaggccttgaccggcgcgcgcagggccgccgcgatttggcgggcggcgtcgtggccgcgggcggcggcccagacgaccagcgacggacccgtcacctgatcgccggccgtccatacgtttttcaagccttccgcggcaggcgagcctttttccggcccggtgaagcccatcgccagcagcacgagatccgctttctggaaaaattccgtccccggcttggccacctgcgtccggccctgtcactcgacctgcacgcaacggatgccgtagacccggcccgactcgtcgccctcgaacgccagcgtgttcgtggcgaagatccgctcgcagccttcgtggtggctgctggacgaacgcaaaatgcgcggccagtccggccacggattgtcgcccgcgcgcgttggcgacggctttgcgaacgccttttcgaggcttagccgcgacgcaaccgggcgatgctctctgcggaccagcggagcgtttctccggcaagggcgacggctttttgccaatcccgacgggacacgggcaggccctgaccggggtagcggtattggacggcgaatttgttcaacgtcggcagcgttaggatggccagcgggaaaacggttccttccggaagattgtccatcaagtatgccaaatcgtgggtccggggaacgtcttggcccagcgccgcaaaaagggctttcaaggatttttctgcggcctgctgggcatggaagcacagatgggcgtagcggatggccgcagttttgggcacgttcgccagagccagatcgccccgggcgtcgcgaagccattcgccggggacgttagcgggcgtagatttcacggccttcttccagggcggaggcaaacacggaatcgcgccggcggcgatgccgggccagcatggaaggggttgcaaccaggaaatcgcacggcatgggcttgtggcggatgcccagattgaggcgatccgccacggcgccgggacgttcgcgctccgggacgatgaccagaaaatccaaatcgcgcaccggggcgttctttccgcggacggccgatccaaacaacacgacgcgcaacggtgcggcatgggcaacgatgcccggcagcacggcttgaacggcattctggatttggcggctggtcatgtccggaatctaccggcatctcgacggcaaagcaacgccgttcgctaaaagggcgcatctgcgattcggtgcaaggatccagcctgaaggctggactacgaacgggtctggtatgtagtccacgcttgagcgtgtggctgtccttttcggcctgaaacgcgggtggatgcaccgaatcgcagatgcgccccgctaaaacgggacctgttttcctgcttgaatcaggattccattcgcgctattcgcgccattcgtagttgaatcggcttttcagaccttgaccggcgcgcgcagggccgccgcgatttggcgggcggcggcgtggccgcgcgccgccgcccacacgaccagcgacggacccgtggccatgtcgcccgcggtccagacgtttttcagaccttccgcggacggcgcgcccttttccggacccgtgaagcccatcgccagcagcacgagatccgctttctggaaaaattccgtgcctggcttggccaccggttggcggcctttccactcgacctgcacgcagcggatgccgtagacccggcccgactcgtcgccctcgaacgccagcgtgttcgtggcgaaaatccgctcgcagccttcgtggtggctgctcgacgcgcgcaagatgcgcggccagtccggccacggattgtcgcccgcgcgcgtcgccggcggctttggcaaaatctcgatctgcgtcacgctcttcgcgccgtggcgcaccgaggtgcccacgcagtcgctgcccgtgtcgccgccgccgatcacgaccacgtcgcgccccttggccgaccattcgccgcccacgtcggtcaattcgccgccgagcacctggttctggcgcgtcaggaaatcgagcgcgaaatggatgcccttgagctcgcgccccggcaccttcaggtcgcgcggttcgcgcgcgccgcacgccagcagcacgccgtcgaatttccgccgcaggtagtccatggacacgtcggctcccacctgcacgccgcactcgaagcgcacgccttcctgccggaacaggtcgatccgccgctccaccatccacttctcgagcttgaagtccggaatgccgtagcgcaacagcccgccggcgtatttcgcgctttcgtagaccgtcacgtcgaagccccacaggttcaggtccgtcgccgcggccaaacccgtcggcccgctgcccaccacggccaccttcagcccgttgcgcggcaacgccggccgcggcagcatccgcccttcggcgaacgcgcggtcggcgatctcgcgctcgatctggcggatcgccaccgcgtcgctgtctttcgcgttgcagcacgaaccctcgcacagcgccgggcagatccgtcccgtgatctccggatacggacacgtcgtcaacaccagttgcaacgcgtcttcccagcggttttcgagcaccgccaggttcatgtcggggatcgggttcttgatcgggcagcccgcgccgaagcagaacggaatgccgcaatccatgcagcgcgccgcctgccgcgccagttcgtccggcgcgagatgcttttccacctcgttccagtcgcggacgcgttccttcaccggccggtagccgggatcgacgcgcggcagatcgaaaaacgaacggtaatgggggatgggattcatgcgcctactccttcgccttttcttcgcgctgcgtctttgcgtcgtcgcggctcatctggccgagcaccagccggtattccatcggcagcaccttgatgaacgagtccttccaccgcgcccaatcggccaggatttccttggcccgcgggctgccggtccactgcgcgtggcgctcgatcatgcctttcagttcgcgctcgtcgtcgggcccgagcatttccaaatcgaccatctcgaggttgcacttggcgtcgaacaggcccgtctcgtccaggacgtaggcgatgccgccgctcatgccggccgcgaagttcacgcccgtgggcccgaggatcgccacgcgcccgccggtcatgtattcgcagccgtggtcgcccacgccttcgacgacggcccaggcgccgctgttgcgcaccgcgaagcgctcgcccgcgcggccgttgagatagacttcgccgcaggtcgcgccgtagagcagcacgttgcccgcaatggtgttctgcgccgggtcgaagtccgcgtccggcgccggcgtcacgacgatgcgcccgccgctgagccccttgccgagatagtcgttggcctcgccgcgcagcgtcagcgtcaggccctgcgccgcgaacgcgccgaagctctggcccgccgagccttcgaattccagcgcgatctgcccgtcgggcaggcccgcgtggccatgttgccgcgcgatgcggctcgaaatcaccgtgcccaccgcgcggtccacgttgcggatgccgcgctgcagcgccgccggctttttcccggccagcgcgccttccagttgcggcagcagttcgtagtccagcgcgccggaaatcggcggcggctgcggcgccgtgaaccggcattcgtccggtttggcatccacccggtggaaaatcgcgctgaaatccagccccttggccttccagaacgtgaccgccttgttggtgtccagcaagtcggaacgcccgaccatgtcgtcgaacttccggaagcccagctgcgccatgagctcgcgcgtttcgcgcgcgatgaagcggaagaactggatcacgtattccggcttgcccgcgtaccgcttgcgcaggtcgggatcctgggtcgccacgccgaacggacagccgttcgtgtggcacttgcgcatcatcatgcagccgcagaccaccagcggcgccgtcgcgaacccgaattcttccgcgcccagcagcgcgccgatcacgacgtcgcgcccggtcttgatctggccgtcggtctgcacccggatgcggtcgcgcaacttgttcagcaccagcgtctgctgcgtttccgcaaggcccagctcccacggcgcgccggcgtgcttgatgctggagagcggcgaggcgcccgtgccgccgtcgtagccgctgatcagcacgcggtccgcccgcgccttcgccacgcccgcggccaccgtgcccacgccgatctcggacaccagcttcacgctgatttccgcccggtcgttcgcgcaacgcagatcgtagatcagctgcgcgatgtcttcgatggaatagatgtcgtggtgcggcggcggcgaaatcagcgtcacacccggcgtggaatgccgcacgcgcgcgatgtcggccgtcactttgtggccgggcagctggccgccctcgccgggcttcgcgccctgcgcgatcttgatctgcagctcctgcgcgtggttgaggtattcggccgtgacgccgaagcgcccgctggcgatctgcttgatcgcgctgcagcggttggcgccgtcgggcccgacgacgtagcgcgccggatcctcgccgccttcgccgctgttgctgcgcccgccgatgcggttcatggcgatcgccagcgtctcgtgcacttcctggcccagcgagccgaagctcatcgcgcccgtcatgaagcggcgcaggatcgcctcttccggctcgacctcgtccagcggcactgccggcccggcggaccggatcgcgaatagcccgcgcagcgtgctctgcttctcggcctggtcgttgatctgcgccgcgtatttcttgtacagctcccagtcgcccgtgcgcgtgctctgctgcagcgcgctgatgctctgcgccgtccacaggtgccgctcgccgtccgcccgccaggcgtactgcccgcccgccggcaggggcgccggcgccggcgcttcccgcgcgtccgccgcccgcgccaaggcctcccgcgcgatctcgtcgagcccgatgccccccacccgcgacgtcgtgcccgtgaaatagcggtccagcacggactgcgccaggcccacggcctcgaacacctgcccgttgcgatagctgcgcaacgtcgaaatgcccatcttggacatgatcttcatcaggcccttgttcagcgccttaatgtagttctgcagcgccttcggcgcgttcgtccgcacgctcagcgcgtccgtccgcaccagctcggccaccgtcgcgaaggccaggtagggattgatcgccgccgcgccgaagcccagcagcagcgccatgtgcatcgtttcgcgcgcttcgccggtctcgatcagcagccccgtgccggtccggaaccccgtttcgcgcaaggcctggttcaccgccgccgtcgccagcagcgccgggatcggcgcgcggccttcggccaggtcgcggtcgctcagcacgatcaggttcacgtccgcccgcaccagcttgagcacctgctcgcacaattccgtcagcccgcgctccagcgccgcgcccggcgcggccgcgcccgcgtcgaaatccatcttcacggtcgccgactggaagcccgcgcggttgaggttcttgatccgcgccagatcggcgttcgacaggatcggatgctgcagcttcaccagctgcgcgtgcgccgggctctcgctcaggatgtcggggctgtgccccaggaacgtcatcagcgacatcaccagctcctcgcggatcgaatcgatcggcgggttggtgatctgcgcgaagagctgcttgaagtaccagtagaagagctgcggcttctccgacagcaccgccagcggctggtcgctgcccatcgagccaaccggctccgcgcctttcgtcgccatcgcgtcgaggatgaggcgcacgtcttcgcgggtgtagccgaacaggcggtgcttcggggccagcgccccgaccggttcttcgcgcgcgtccaccgcgccgtagaagccgtggatggaaatatggttttcctcgacccagcggcggtacggccgccgccgcgccaggtgcatcttgatctcggcatccttcatcaggcgccccgtcgccagatccgccagcagcatcgtgcccggccgcagcgagcccttctcggccacctggtccgccggcaggtccagcacgccggcctcggacgccagcaccatgaacccgtccttcgccaccgcgtagcgcaccggccgcagcccgttgcggtccagcgacgcccccaccagccgcccgtcggtgaacgccaccgccgccggcccgtcccacggctccatcagccccgcgtggtactcgaagaacccgcgcaggtctggccccatcggatatttcggcccccacgcctgcgggatcagcatcagcatcgcgtggtggatctcgcgcccgcccagcgtcagcagctcgagcacgttgtcgaggttcgcgctgtcgctgccgaaatcctcgaggatcggcagcagcttctcgacgtcgcgcccgaacgcctcggatttcagcttgggctcgcgcgcggccatcgcgttgcggttgccgcgcagcgtgttgatttcgccgttgtgcgccagcatgcggaacggctgcgccagcggccacgacggaaacgtgttggtcgaatagcgctggtgcaccaccgccacggcgctgatcatgcgcgcgtccgtcaaatccggatagaacttcggcacctgcggggcgatcatcatgcccttgtagaccagcgtgcggcacgaaaagctcgccgcgtaggcgttcggggagttgtccgccggcttgcgcccgagctcgtgctcggcgcgcttgcgcgccaccagcagcttgcgctccagggcgtcgccggccagccggcccttcggttccgctgcgaacacctgccagaacgacggcatggacgcgcgcgccgtcggccccaccgcctgcggatccgtcggcacctcgcgccagcccagcgcgcacaagccttcttcgagcaggatccgctgcacccccgccttcacgtcggccagttccttgccgcccggcggcaggaacaggaagcctacgccgtattggc

SEQ ID NO: 2634 - DNA, 5466 bp, synthetic construct
  misc_feature 1..5466: note = Synthetic
  source 1..5466: mol_type = other DNA
gagctaggggcttttacgtcatccaaattagctggattgcttcttccgattagtgattttgtgtcaggtactggattgctgggagaaagaacttttaaaatccaatcgctagctaaatttgcaggcaacttgcaataactatcgtttcttgagttatcgattcgcctccgacaggtataggaacaatttgtcaggcccaactttagccattcctttaaaaatttggatgctaaaacaccaaaaaataaaaaagggcgccccactgggaggcgcccgggactccgttatcggagtagcccttcgcgacaaaagtcacttattggaataagcaaggcaatcgccgttacgctacgaaacttattatagcacccccaaataagaattcaaacctatgctattgcattgatagtgctaacatgactgactctcacggactgatgaatcacaggagagcaacctagtccggtttcgaattggttccacaacacaatcaacggtccaaaaggtatcaaatgtgcctgagaaaagaccccttccccaattatttagccgatgagatcctctctagatttaagtcaaaacagtaatcttgtcgtacccaaacaatatgattggatcaaaattagggcagatttccgtcgaaagttgtaatctgtcgatagaagataaaaaggagaagtcatgtcacatgaaatgacgagtcagccacctgttccacctgaaacggaagttcattacgtgttaggtatcgacctgggaaccaactcagtcgggtgggcggcagtccaactgaccaagactggtaagccaaatggaatccttagagttgggtctcgaatattttctgccggaaccgaaggtgacattactagtgggcgggataaatctcggaacttagaacgccgcgaagctcgccagtctcgtcggatgattgaacgtagaaaacgacgaaaactgaagatatttaatatgctccaaaatgcagatttgttgccgcaagggccagaaattcacgaagttctcacaggtctggatcgcacgattcgtgaacaatactcggcggaacttggtcaaaacggtcctgatataaaccatagacttccttacctacttcgaacctgggcacttgaccgccaactatcaccccatgagaccggacgcgccctttaccatttggcacagcgacgaggctttcaaagcaatagaaaggcaactccaaaaaaggatgaagaaataggcaaggtaaaacttggcattttggaattggagcaaaaaatggaagaaactggttcacgcacgttaggcgagtattttgcttctatcgatccagtggaagagcgaataagacaacgctggacatcacgcgcaatgtacaaggtagagtttgatgccatctggtccgtccaatccaaatatcgacccgacattttcacagaagattttcgattgggcattagtaacgcaatcttttatcagagaccattaaaatcccaaagtggacttattggacaatgcgagcttgaaaagggtcgcaagcgcgctccccgagccctattggagtcgcaaaagtttcgaattgtccagactgtaaacaacattcgggtacgcgtggtggaatctgatggttcttacgagacgaggcggctaactgacgatgagagggcattgttaattcaagcactcgactctggcagtggcactcttgataaaaaagggatggtgggaccatcgggaattaagaagatcctaaagttgccaaccaattcaaaaatcaaccttggagacgatgatgctaaaatccacggaaacatcaccgcatttcgacttagatccatttttgaaaacaagtgggatgagctctcgcaagctgagaaatgtcatgtagtcgaagatgtcctcacaattgagaattccgaggcactcgtacgccgggctgaacgagtatggaaattaagcaaaagccaagctgagcaactggcagaatgcactcttgagcctggctatattagcctgtcacgccaagcattgagtaaagtaatgccacatttagaagagggactcacttacgctgaggccagatatcaagctttcccagacattggcaaaagcgtcgattcacttgactttcttcctccgctggataagtcaactttgcaatcccttgcaaccatccgaaaccctgtagttactcggagtctcactgaactaagaaaggtcgtgaattcagtaattcgcgagtatggaaagcctgacttcatacgtattgagctagcccgcgacctaaaaaatagtcgaaaatctcgtgaagaaatcactaagaagaatgcgtccaatgaaaagctgagaattgctgccaaagagcggattctcaaagaggctgggataatggagccatcaagaagtgatgtggaaagagttttacttgctgaagaatgtggttggcaatgcccttatactggccgggtgatttcgatgacaggtctccttgggggagagtttgaaatcgaacatattattccatactcagtatcttttgatgattcttttgctaacaaaactctttgttatggtcaagagaatcggcgtaaaaataatcggtctcctttcgattcctacagtcatacggccgaatggcccaacattttggctcgagctgaaaaatttcaggtgaaaacgggtcgagttggagagagaaaggcccgaagattccaatggacaccaacccaagtcgaagaacgctacaaagattttagtgagagacagctaaacgatacgcgctacgcatctcgtttagccgctgattacctcggcttactttatggtgggcgggttgattcagccgagaagaccggaatgaaacgtaaaatccaggtgggccaagggcaggtgactgcccgcttacgggatgcttgggatctcaatggaatacttaatgatggaggagtcaaaactcgagaagataatcgacatcatagtgtcgacgcaattgtcattgcgttaacctctccagggattctgaaagagttttcccagcaagcacagcgtgccgagtatgtaaaaaacggaaggttagctgtcacgatccctcccccatggcaaagcttcactcagcaagctagagacgctataggggaagtcacagtctcacatgcagtatcagcaagagttcgcggagggcttcacgagggcacaaactacagtccggttattggcgaaattggaccagacggcttgctccgagggactaggcacgttcggaagaaagtcttcgagttatcgtggggtcaagtagaaagtattgttgatccaaaaattcgtgaaatagtaaaggagaagattgaagaaataggtggaaaatcacagattaaaaaactggacggaaacttccctattttgagagcacacaatggagtccctattccagttaagagagttcgaatatcaatcccagggaccaaagtcatagccgtcggtgcggggccaagagagcgacacgtcgaacccggatctaatcatcatattgagatcttcgaagttcagaagccagccggggaaatactctgggaagcaagggttgtcacgctgctggaggcgattcagcgacgccggcttcagcagccaattgttgatcgagaatgggacggtcaacaccgatttctgttttcgctgacacaaggagataccattcgctacaacaacgatttgtggattgttaaaacgtggatgggagacccctctaaacctcagtttaagctagctcttatccaggacgccaggctagctggtgaaattcctctatctggtcgtcagccctcactctccaacctccagaaagacggctgcaaaaaactgaaaatcactcccattggcaacgtattggccgctaatgactgagaaccgcattctcgatatttcagaatcaggggcacaccttcatctgctcaattcaaatcttgttgtagaccgcactgacaatgaaccagttcttattccaataacagatctcgcctcggtatgtatatcacatccaagtatcactatttctaaatcagtgatgtccgctttggcagaggaaggaattgctctagtaatttgcgatgacaaattcatgccgtccggaatgcttttaccgatacattctcactacttacagagcagacgtttcgccgaccaggcagcggctgcgcttccaaccaagaagcgactctggcaacaagtagtccgagcgaagattcgtgcgcaggcgaaaattcttttggaagttagaggaagtgatgaagatttgacttcgttagtcaagcaagttcggtccggagacgttactaatgttgaagcaactgctgcacgaagatactggtccgcattgttcagcgggaccagtttcagaagggatcgatttgggaactggccaaacccagctcttaattatggatacgctattctaagagcaattgttgcgagatcgatttgtacctcgggtcttcatccgtcgctggggcttcaccatagcaaccagtacaaccccttctgcttggctgacgacttaatggagccttatcgaccgactgttgatctagtcattgcgacaaaatttaagcaagaaagagaagataactctcttcaacgagaagacagggcagtcctaattagcgcactttatggtcgctttaattttggcaatgagtcacggtcattgtttgatgtgctttcacgaatgacttcgtctctcgctgcagtatttgaaggctcaggcacaaatctagcgattgctacaccgggttgaaaaagaatccagcgaatcccccttcttggtatcaagcggtgtggctctttgcaatgttcgatctccctgttgacagtgccgaagcgcgaaagtcttatacacggtttcggaaggcactgatcaaggaggggttttcgatgcttcagtactctgtctatgctcgctattgttcaagcgaagagctagccactgcccaccgaagccaaatccgaatggtcgtgccggcaagaggccaagtgcgatttctgaatgtaactgatcaccaatttggaaaaatggaaatacactatgaaaaatccgtgctcccacccgaaaataagccgtcccagatgctacttttttaaatgttcacatcttcaagcaaaataaaagagccctggttaatggacccttttattttaagttaatgccattcattgtagcgtaacggcgattctttgcaaactccaaccggctagcgaatctgtgtctacccagtagaattgtagcgtaacggcgattctttgcaaactccaactcccggctacaccgtcaacgtctctctagtattgtagcgtaacggcgattctttgcaaactccaactaactcctccacgtctttacctaggagactgctgatttattcaccgtaaatactcgcgattttctgttggttatgggaagatggattgtggcaataggaa

SEQ ID NO: 2635 - DNA, 24419 bp, synthetic construct
  source 1..24419: mol_type = other DNA
  misc_feature 1..24419: note = Synthetic
aggatttcccaagtgatttctgttccaaatataccatggcgtacctgcaccatctcgtccggtgcaatgaaattctcggtatgaccctcgcatcactgcagaacctgactttttatttatggctgatggaggaagtcagacgaaatcttgctgagggaaccttcgcggattggtaccttcctatgatagaaaaggtaaagacccggctttagggcatggctctgatatcaccatttgaagcagcggcaagcaggaatactcacgctgacttttctggagcagccgccccccgttcctgcaaataggctgtaaagtgcttgcgcggacctgacaaatatttgaaaaggatttcgacatctttccagatagagtaagtctgcaggtagtgcagctcttgccgctgtttttcatcatcgcggaacaaacggtcctcattcagctgccgctgaccggtcagccccggcttgtaatacacaaaactgccctgccggctgggaattatcggcgccccgacaaggctgaattcaccggtaaatacttttcgcataaaagttatggtattgagcagcctatgggaactgtagggcgtaaaaaacgcaatattctgagacgttgaggaatcaataaacaggttgaccgtctcccgtttagtttttttgatggatgcattcagctttaaaaatatccagggcagaaacatcacaaacaaaaagaagccggaaagtgagaagtcaaaagcacgtttcagcaaccggttccatgctgtcagcgatggaatttcgagatccacaacgggcacatcatcgaaatactccacattggattttccgataatgtaatccagagatccgggcactaccttgcataccacctgcgtgtcccgtaactgactgagggaagaaaggacgtccacatgggagatcttttcaagcatgaaaatcacctgatccgcacgataatttttaaccatctccggaagctgtgacacatgaccaagcactgggatatcctctatggtttgcagcggttcatcctgccgctgtgtgacaagcccgataatatcgtaattccaatcaacctctcccctgattttgcggattgccggctgcgtatgatccccaatacccgcaacaagcagccgtacaggctgaatcctgcccttggctgatgatccctgataaaagaaacgcgctgttacaagacgaatagcaggcagcagcagcagcaatacaagcgtagttgccaaaagaataagcctggagaaagcaatatccctaaagaagaaagtgatgcttgccactgtaaccagtgaaaaaagcaaggctttaactacatgactccagctgtgcaggtttttattatagagcccgtagtatttcgcaaaaatcagataggccgctgaatgcaaaaagtttacggataagaaaatcggctgataggcctgaaaaatatctgcaggagcaatactgtaacggtataaaaagaaaccgaccaaaacaagattcagcagcagtaagtcggaaaccggccgcagtgaacggttaaacagagagaacacataagacgccgctgattttgtgacgacgcccagcagaataaaatatttgaagaagatgctgtagccataactgtaatgcttttcaaagaactgatacagcactttgttgaaagttatgatatagcgcaggttttctttcttggtgctttctcctttataatgtatgatgcttgtatcaggaacatagcggatccggtacccggctttgagcgtacgatagcaaaggtcgatgtcttctccatacataaaaaagcgctcgtcaaagccattgagctcttgcagtaaaccggtacggtaaaacataaaggagccggacaaaacttcaatgtctgaagcctcgtcctcattctgaccgccaacatagtatgaggcaaagcggggatggttggggaaaagctttgtcaggcccagcaccttatacatggcattcataggcgttggtacagacctgcgtgattcaggtgcgaatgtaccgtcaggatttaaaatcttacaaccgcttgcaccaacatcaggatgagcttccatgaaattaaataataccccaagcgtatcctccccaatcagcacatcgggattaacaagcagcgtatattttccggtagcctgaataatagcctgattgttcgctttaccgaaccctttgttttcgaaattttcgatataaataacttcaggaaaccgctctttcagaaaagcaacagaaccgtcgctactaaaattatcgacaacaaaaatctcaagccgcaaatcctgagccgctttataaactgaatgaagtaaattcgcgagatactctttcacattgtagtttacaatgacaatagagatatcgtgttcaaatttggtttcgggcgaatcagccagctcagtcatgtaactgttttggagattttataatggatgtggcaaaaactcagaataataatgaagaagatacaacgaagcagtcagatttaaggcgtaatattctggatagaaatgagctgtttatcagacgtatagaatgagaatggtacggtgttatgttttttttggagagtacttctcacaaaaaaagctctgttatatgcattaacagagcttttagtgtaatgtgttggggtaaagaaaaagtgatgaggcagcgacctactcttccgcgttggcagtaccattggcgctggggagcttaacggccgtgttcgggatgggaacgggtgtggcctccccgctgcagccacctcatcgaaggggtgtgtgacgtgggtgtatgggtttgttggaaagaagggagctgtgtatttgctgctggctgttgacctttggcttttagcctttaactgttgcctttagcggttagcttgtggcttagcgtgtaaatgtaagtatgagtgtcagcgagtaagtgtgttacctgatgatcggatttggtggcagcgggtggatgggttatgtgttggaggggatgtggtgtgatgcgtggtttgtgcagcgctgcggcttgcgcatgctgctcgtgccgtgtcatcaaattgtacagaagtcttaagagcgattagtacggcttggctgaacacgttaccgtgcgtacacctgccgcctatctacctggtcatctgccagggctcttgggggaatatttatcttggagtgggcttcgcgcttagatgctttcagcggcttatcccgtccgaacatagctaccctgcgatgcagctggcgccacaacaggtacactagcggttcgtccaccccggtcctctcgtactagaggcagctctccgcaatattccaacgcccgcagtagatagagaccgaactgtctcacgacgttctgaacccagctcgcgtaccgctttaaatggcgaacagccatacccttgggaccttctccagccccaggatgcgatgagccgacatcgaggtgccaaacctccccgtcgatatgaactcttgggggagatcagcctgttatccccggagtaccttttatcctttgagcgacggcccttccattcggaaccgccggatcactaagaccgactttcgtccctgctcggcctgtatgccttgcagtcaagctaccttatgcctttacacacactgcacgattgccgaccgtgctgaggtaacctttgtgagcctccgttacattttgggaggcgaccgccccagtcaaactacccaccatacactgtctccccataagggggttagaacccagcagcaacaagggtggtatttcaccggtgactccacgaccactggcgtggccgattcactgtctcccacctatgctacacatgcagcaaccgaattcaatgtaaagctatagtaaaggttcacggggtcttttcgtcccactgcgggtagccggcgtcatcaccggcaccacaatttcaccgagctcatggccgagacagtgtccagatcgttacaccattcgtgcaggtcggaacttacccgacaaggaatttcgctaccttaggaccgttatagttacggccgccgtttaccggggcttcagtcaagagcttcgccgaagctaacccccttccttaaccttccggcaccgggcaggtgtcagtccctatacttcctgttgccagttggcagagacatgtgtttttgctaaacagtcgcctggaccttttcactgcgcccgctatcgctagcggggatccttctcccgaagttacggatcgaatttgccgagttccttagccatgaatcactcgagcacctgaggatactctcctcacctacctgtgtcggtttacggtacggtcggctgctactaactacgacgcttttcttggcagctggattaccctgactatccctttggccgaagcctccgggtactgtcgaagttcagccttaatgcagggcggatttgcctgccctgcggcctaactccttcaacgtcgtattccgtcacgacgcgcaggtttcacttctgcgtcacgccttagcttagcgtagcaggccggtacgggaatatttaacccgtttcccatcggctgcccccgctatcacggggttggccttaggggccgactaaccctgatccgatgagcgttgatcaggaacccttaggtttacggtggaggggattttcacccctcttatcgttactcatgcctacagtttcgctactatacgctccagcagacctcgccggtctgccttcagcgcctatagtatgctcccctaccgatcatttagttaaactaaacaatcgcacagcttcggcagcgggcttgatgcccgatcattttcgacgccgggtcgctcgactagtgagctattacgcactctttaaaggaatggctgcttctaagccaacctcctagttgtctgtgcaacccaacctcctttgatcaacttagcccgcatttgggggccttagctggtgctctgggttgtttccctctcgcagcaggacgttatcaccctgccgctgactgcctgccaccaccacaccggcattcggagtttgtcaaggtttggtacccggtgaagggccctagcctaatcagtgctctacctccggcgggcttggtcagacgctatacctaaatatatttcggggagtacgagctatctccaagtttgattagcctttcacccctatccacagctcatccgatagcttttcaacgctaaacggttcggacctccacgaggtcttaccctcgcttcatcctggccatggatagatcacttggtttcgcgtctgctgccatatactgcgcgccctgttcagactcgctttcgctgcggctgccccgctgagcgggttagccttgcacatgacagcaactcgtaggctcattatgcaaaaggcacgccgtcacatcaatataaatcaatgctccgactggttgtaagcacacggtttcaggtactgtttcactcgccttcccggcgttcttttcacctttccctcacggtactggttcactatcggtcatgggggagtatttagccttaccggatggtgccggcagattcacgcaaggtttcaccggcctcgcgctactcaggattccgctacgcccgactcagcttcacctacagggctttcaccttctgtggccggccgttccaggccgttcgattcaccttatcggtacgatattgcggtcctactaccccgtcagggccgtaaccccaacggtttgggctggtccccgttcgctcgccactacttggggaatcactgttgttttcttctcctaaccctacttagatgtttcagttcgggtcgttcgcctccgtcataaatgacggatccagggggttgtcccattcggaaatccgcggatcagcgcttttatgcagctccccgcggcttatcgcagctttacacgtccttcatcgcctccccatgcctaggcatccaccgtgtgcccttgattccttctgtagaatttgctgtccgcttccactgtctccagctttcacccgctacaaccccggcgcttcgcaccaaaatcgcagcttccggcccgcggccaccaaatccgtcatcaaggtgtgatcagtccctaatgggctgacccacacacttcgtcacgcgtccacttccctgcacaaccgccaaggcgatcctgcagcgcatacacgcgcaacgtgcttgtacttacttactttacttctttctttcaaacctcaatacgtcaaagaacagtgcctgcagctgcacccggcacgcatccagaaagataccaccgcagccagcctgccggctgtgtttccgccccgggaatcgaacccggactcgcgtccaacgcggaatctgttaatcaaacaatcagacttttcctcggtaattgcacccgacagcaaacatcagctattgactattggctttggcggttggctattggctttaaaccggtagagaacccgaacaaaccaaaaaaaacctcaaacttcaaagcacaaaccacaaacttcaaacctcaaaacgctgaactcgatatcgtggagctaaccggagtcgaaccggtgacctcctgcttgcaaggcaggcgctctagccagctgagctatagcccctttaggattttgcacctgccggtgttgctttgcacctgccggcgctggtggtagtgggcttgggaggagttgaacctccgacctcacgcttatcaggcgtgcgctctaaccacctgagctacaagcccgctgcgctttaagccccgtcacccttgccggcctgcggcccgcacggggttggttcaggcaattactcagaagatcgcacagctacctcaaaagccgggcaaacatgctccttaaaaaggaggtgatccagccgcaccttccggtacggctaccttgttacgacttagcgccagttatgaggcttaccctggacaccggcctccccgaagggttagcgcggcggcgtcaggtactccccacttccatcgcttgacgggcggtgtgtacaaggcccgggaacgtattcaccgcgtcgttgctgatacgcgattactagcgattccaacttcatggagtcgggttgcagactccaatccgaactgggattggctttaaggattggctgcccctcgcggggtcgctaccctctgtaccaaccattgtagcacgtgtgcagccctggacgtaagggccatgatgacttgacgtcgtccccaccttcctcactacttgcgtaggcagtctggccagagtccccacctttacgtgctggtaactaaccataggggttgcgctcgttgcgggacttaacccaacacctcacggcacgagctgacgacagccatgcagcaccttctgtggcgccggcaagccggtcggtcacctttcggatccctaaccacaaatttagcccaggtaaggttcttcgcgttgcatcgaattaagccacatgctccaccgcttgtgcgggcccccgtcaattcctttgagtttcatcgttgccgacgtactccccaggtggtatacttaatgcgttagctgcagcactgatcctaaaaggaccaacacctagtatacatcgtttacggcgtggactaccagggtatctaatcctgttcgctacccacgctctcgtgcctgagcgtcagttgtgacccggttggccgcctacgccactggtgttcttcgtaatatctgtgcatttcaccgctacactacgaattccgccaacctctgtcacactcaagacttccagtatccagggccattttaccgttaagcggcaagatttcaccccagacttaaaagcccgcctgcgcaccctttacacccaatgattccggacaacgcttgcaccctccgtattaccgcggctgctggcacggagttagccggtgcttattcaccaggtaccgtcagggccggtcgaaaccagccggttcttccctggtaaaagccgtttacaatccaaaggaccttcttccggcacgcggcgtggctgcgtcaggctttcgcccattgcgcaatattcctcactgctgcctcccgtaggagtctggaccgtgtctcagttccagtgtgggggaccatcctctcagaacccctatgcatcacaggcttggtgagccgttacctcaccaactacctaatgcaccgcaagctcatctacaggcaccccgaagggctttaacaactgtggccatgcggccccgctgcattatgcggtattagcccggctttcgccgggttatccccctcctgtaggcagattgcttacgtgttacgcacccgtgcgccagtctcatcagggggcaagccccctgaatcccctgcgacttgcatgtgttaagcccgccgccagcgttcgtcctgagccaggatcaaactctccgttgtaaattgttatgcaattaagcatcctaactaaaaacaacgcattgtttgcctttgcttcctatcatatatctttagagcggacatccggtaaaaccgaacatcctaactccggaatcgacttctaaggcttcgctatgcgatcttctgtctaattgttcactaagaaaaagaacggtgcaacctgaaaacggtggtggcagcgagctgccgaacttcgtttttgttgcagattccaatgatacggaatcttgtagcccgtgtcaacacttaattttgaaagggccaaaatttgtggccgctgtcaaaacccgtgagcgctgggcggccttaaatatacaacccaatatcaacccaacgcaatagcttttttgaaccaatgagacagggataagttctggacagcggacggcggacggcggacggcagacaggcagacaggcagacaggcagaccgaagaccgaagaccgaagacggcgaaccgaagacagagggcaaaggacagacagcgcgtttggagctttggacaagggcgggcagaatgggcagcgcggttcaggtactgtaaacgtaatttgagatactagcacgcttcaatttagaagttgacgcgtgtaggggctgcagcatagctatgacgggttacagctatcattgggcattggggttattcaattgcaacatgcttccccattgagccaacaaagccgttataagttttaactattgtgcggactgatgtatgtggcccaattgtttagggattcacattctcaaaaaacctatcagccccgtgctgattactttatatcaatccaaaaggagaacgtagcatgaacaaacttgaaggaaagcgtatcctgatttttatcggcgatatttatgaagaacttgagctttggtatcccaagcttcggctggaggaagaaggtgctgaggtcgtgctcgccggacccgaggccaatacgcggtacagcggcaaaaacggatatgatggcaaatcagatgtctcgtatcacaatgtttcggctgatgattttgacgggcttgtcgtacccggcggatatatgccggataagctacggcgcgatcagaaagtgctggatatcaccgctgattttcacaagcagggtaaaatgatcgccttcatttgtcatggcggctggattccgatctctgcaaaagtcgtgaagggtttcaaactcacctccgtaaacgccatcaaagatgatctcaccaatgccggagcagagtgggtggatgaacccgtagttgttgaccgtaatatcattacatccagaacccctgttgatctgggtcattttgccaaagcgatgattgcttttctaagcaagtaatcgccggctgagtattacatatatataccaaagccccgtttctttttaggagcggggctttttttgtgcagttacggggtgctgtgaaacacaaacggtataaaataaaaaaagcccggccgaaaccaggcttagggtaaatcccttcggcattatagccttgctgtgataagaactgattgggattagttcttcggatgaaatatattgctaattgctgttacagtcaattataatattatttaattcatcatgggtaaaaaaattcttggtcttgatatgggcaccaactctttgggttgggctatcgtggagcaacataacaggcgtttcgaacttgttgataaaggcgtcaaaatattccctttgggagtgaacagagataaatcgggtgaatcatccaaagcaagcgaacgcacgcagaagcgtagcagccgaaggctaaaggcaagaaaaaggtaccgtaaatacttcaccctcaaagcccttattgaacatgatccgcccctctgcccgcttagccctgacgaacttacagcctggaaaaaaagcggctataaagcttatccgatggaagaagctttcctaagctggcagcgtaccgatgcgcttcaacaagaacacccttatgcgtaccgcgatcttttttcccgggaaacgcaagactggcggaacaagccggagcttgcctttaaacttgggcgcgcgttttatcacctcgcacagcggcgcggttttgcaagtaaccgaaaagacgccggagctgatgagcctcttgaggccgctaagctgcagtatgaagagcttctgagagatcccctggttgctgaagacgcccttctgctgaaagacaagctaagagacctggctgacattcaccttgaaagcgatgacaaaacggtaaaagcatttgcaagaaaaatcaggaaagttgccggcggtaatgaaacagatgccgatgcggtgattgcagtaacggaaagcctgctgaccgacaaagaaaatatggggcttgtgaagaaaagcataaccgagttgtctgaagccatagaagcagccgattgtgaaacgctcgggcagtactttcaccagctgatgcagcaagaccgcagcttgtatgaaaaccgcatccgaggccgctataccgagcgggaaagtcattacgaagccgaattcaacctgattgctgataaacagcagctccccgatgaattacggaagcagctgcaccgcgccatcttttttcagcgtccgctaaagtcccaaaaaggcagtgtcggcaaatgcccgtttgagccgtcaaaatcacgctgccccatcacacatccgttgtttgaggaatacagaatgcgcagttttttgaataatattgctgttcagaccgctgacgatcttcacatgcggccgctttcggaagccgaaaaatccgaagttgagcctttattttaccgggttagcaaaccgagttttcccgtttcggatatttttgaccggctttttggaaaagatacctactgttacaggaaggatcaccgtgctgcggaatattctgttaaagtaaattacaatccggcaactacggtaagcgggtgtccctttacgggccggttaatgcaggttttcaaaaacagcccggacgagcacctgcattggaaaacattaatcgtaaaccgatggaccggaaaatcgctttccgaaaatgacatcattacccgctattggcaggccctgtattttgccgataccgccggagaccgcagcagcttcaccgatgtaacccgcgaaagcgcgctgcgccgttttgccgataccttcacctcccttaccgcgcaggaaaccgcccggtttacaaaaatcccgcccttccggaatgattacgccaaccttagcctcaaagccatcaagcttattctgccctggctgcgggaagggctgatatacagtcacgccgtgtttctggccaagcttcctgaaatcatcaaacccgaaatatgggaaaatgcagcaaatcaggctgagatcacagagcaactgatttccattattgacggacacgacgagctgcagcagctttactttgccgttaatgaaattgtgcgaaatgtacgggacggaaaaatgaccgaacccgaaaatccgcattgggtaagggcagaactcgagcataaactcagctttaaattcggaaagaaaacctggcaggagcatccccatcagcaaagcctgattagtcaggccgtatctattttcaatgcagccatgaaaaccgaccgggatgagcccgtctttcagagaactgcgcgtttggaagatcgcattgaaaaggcccttaagggtaagaaaattggcgaagtagctgtggttgcgtctcccaaaatgctcaaaaaactttatcacccttccgcaattgagcgctttgtgccggaagtgatacttcgaaaaggggaaccgctgatgaaggatggtaaaccgctgtacggactgccgaatcccctgaaatcatccctgaaaaatccggtcgtgatgcgctccttacagcagctccggcaactgattaaccatttgctggccgaagagctgattgatgaaaaaacaagcattcatattgagctggcgcgtgaactcaacgacgccaacaagcggaaagcgatagaaaactatcaaagaaaacggcaaaatgagcggagcgagtaccgcgatgaaattattcggttgtacaaagaacaaaagaaccaaaccatcgaacctacagagaccgacatccaaaagtatcagctttggaaggagcaaaacggcatctgcctgtacacaggagacaaaattggcctgtccgattttatcggtgatgaccccaaatatgacattgagcacaccctgccccggagccgcacgctcgataattccatgatgaacaaaaccctatccgagcgcacatttaaccgggatgttaagcgtaaccggatgccctcagagctggagaactatgacgattatgttcagcgcatccgccattgggtggagaaggctgatgcgctcgaagacagaatcaaccggctgtcgcggcgtaccaaagctgcaacgaccaaagaccaaaaagacaagctcatcatgcagcgacatgagcttagtatggaacgggattactggcgcggtaaagtaaaaaggtttacggcaacggaaatacctgagggctttaaaatcagtcagaaggttgataccggcattattacccggtatgcgaaagactttctgggaagcctgttcaaaaaccggcggggaaatccgaatgtttttcccattaacggggaaatggtagcacatttcagaaaagcctggggattgcaggacttttttaatgatgaaaccggcctgtgggaaatggcgcctaaaaaccgtagcaaccatgcccatcatgccatcgatgccgtaaccattgcctgcattacccgcgacagccataaccggctctcacatgcctggcgcctgcaggaagaaggtcagctcgctgccatgcgggaagtcctgcgggaaaccaaaccatgggataccttcacgaccgatatgcagcaactgcatgaagatttaattgtggtgcacaccgataccgacaagcccaaaaagcaggtccggaaaattctccgaaaacggggtgtgaagcagcgcaaacatcacaaaccggaggagtttatctatcagcagggggatacggcgaggggtgcactgcatgaagaaaccttctatggcagaatcatgaatccgcatgagccggagaaaagtaaagatatgtttgtggtgaggaagtccattgacggcatggatgtgaaagacgcaacaaaaattatagaccccaatatccgtgaaattgtacttcgcgatataccgcggcaaaaagcgcttaatgaccgtttaaaagcccttcaaaaggaagctaaagatgcggaggctgcatcaaaagctacgctcgaagctgagatcaaatcggttgaaaatgaaatcagccgcttattccacatcccgccgaagaaaggtaagaccgtttggacccctattcgcaaagtgcgcataaaggcgaaactgaccgagccgctgcccggatttaaacagcaccgcgatcagtccaagcatgcttataagcagcagctgtatgtgaataacaaggaaaactatgcgatggccatttaccgcgatgacaaaggccgccatgactatgccctgattaacctgatggaagcgacgcagcacctcaaggcaagtcagcgggactttcgcagagagcaggacctggtagcgccggaaatgaatggcaaaagcttttttggcctgatccggaaaaataccctcgtatgcttttacctcgaaagccctgatgaactgacggagctttcagaaaaagagctgacggataggctctacaaagctgtaaatcttgaaaaagacggaaggatgaagtttcagtattttcaagaatcacgtggtaaaattcaattcaaatcagactttgaaaatgcaaacggtaagtcacccgaaaaactaatgataagtggatactcgaagtacaaagcttcaattgaaccattaccatactatcatattggttcaaaaaactatcaatttctcatccaagattatcatttcacgattgatgaaaaaggaggcatcacttttatctgaaacatgctcaaaaaaatcctccatatcacaagcccgatgcatctgagcgttcgcatgtcacagcttgtgctgtacaacaagcaaaacaaagaggagcacagcagacctttttcggatctcgggtttatcattctggatcatgcccaaacgacttttacgcaggcggttgtgcagcatgcctgcacgcacaatacggcggttgttttttgcggcaccaaccatcatccggaggccatgctgttccggcttgaagggcacagtacgcaaacccgtacctatcgggcgcagatcgcggcaacggtaccgctgatgaagcagctttggaaacaaacggtaaaagccaagatcagcaatcaggccgcgctgctaaaagtgcagggaaagaacgatgcaccgctgcgctacgcagcccgcaaggtcaaaagcggcgatccggagaacaaggaagcgcaggctgcccgcatctattggccgtccctttttggggacggctttctgcgtcgtcgggacggggcaccgccgaacaacctgctcaattttgggtatgccatcctgcgggccgctaccgcccgggccatttccggctcgggcctgctgcccggcattggcatccatcatcacaaccaatacaatgcctacggcctggctgatgatctcatggagccctaccggccgtttgtagattttgcggtactcgaatatctggaggccaacagcccgccggataccctcggtaaagcagaaaaagccatgctgttacaaatactgtacagcgatgtgtgtatcgggaacaaaatcaggccactgatgctcggcctttcggaaacaacagcttcgcttgcgcgctgctttctgaaggaagacacccgtctgagctatcccgagctttaacgtaaatcccaaaaaccctaattcacccatgagttattcacgattaaacgcttatgaaaccatgtggctctttgtaacctttgaccttcccgtaacaaccgataagtacatgaaagccgcgaacaaattccggcagaacctgaaacacgatggctttcagcgctttcagctctcggtctatgcccggcactgcggcagccgcgaaagcgcagaatcccatattgaaaccgtaaaagacctggtgccaaaagaaggctttgtgagcatcattacccttaccgataagcaatacggacagattgtcaacatttggggtgcaaaggaagagcgccttccgccccccccgcagcagctcgaatttttctaaaaaagaagacgcacatgcacattcaggaaagatgatagctatttttttaaaccaaaaaacgccccaacgcaatggtacataagccattacgaaggggcgtaatatctgaaatcccaatctcagttcaaatcacagcggtaaaatcaaaccccattttatgcgctgcaatatctgaaatcccaatctcagttcaaatcacagcattgtattgtgtggtgaacatttttaaccgaatatctgaaatcccaatctcagttcaaatcacagcttttttcagctttgattcatcaatcaatttaatatctgaaatcccaatctcagttcaaatcacagcgccctccccagcatgtgcggggatgtcgaaaatatctgaaatcccaatctcagttcaaatcacagcgtccaaacctgtgaatcccgattccagtataatatctgaaatcccaatctcagttcaaatcacagcatagcccaattcctgctgttcgccaaaaataatatctgaaatcccaatctcagttcaaatcacagcgcatcttcgacctgatcgaatatgcggttgaatatctgaaatcccaatctcagttcaaatcacagctttgcgcgggcttgctcctcgctgataattaatatctgaaatcccaatctcagttcaaatcacagctcagcccggggactggtgccctcagcccataatatctgaaatcccaatctcagttcaaatcacagcgaggatgtctgcgtccacaacaccaccttcaatatctgaaatcccaatctcagttcaaatcacagctaaaacatctgcgggctttatcaatcccttaatatctgaaatcccaatctcagttcaaatcacagctagtgcagcctgttcattagcgcattgttgaatatctgaaatcccaatctcagttcaaatcacagcgctgaatcgaattgcttactttgaccgtaaaatatctgaaatcccaatctcagttcaaatcacagcgaccaatgccatgtcaacgccgttcatgctaatatctgaaatcccaatctcagttcaaatcacagcgtggcccgaacgcttcaacgctgagtggtaaatatctgaaatcccaatctcagttcaaatcacagctatttgaagcgcgttaaggcttaatagttaaatatctgaaatcccaatctcagttcaaatcacagccgaaagaaagcgcgcccgtcctcgagaataaatatctgaaatcccaatctcagttcaaatcacagcaaagagccatcgttgcaccggctgacgttgaatatctgaaatcccaatctcagttcaaatcacagcttacaagatttccctgcttctcccatgctcaatatctgaaatcccaatctcagttcaaatcacagctgcgcataacctacacgacggtcatacgttaatatctgaaatcccaatctcagttcaaatcacagcctaacagtgatatacatatactaagaagtaatatctgaaatcccaatctcagttcaaatcacagcctgaagtatgagcaggaagacaagccgcttaatatctgaaatcccaatctcagttcaaatcacagcaaataatccccttacccttctcgaccaaataatatctgaaatcccaatctcagttcaaatcacagcagtcctgcgcttattagcctttcccggtgcaatatctgaaatcccaatctcagttcaaatcacagctggcggcaataggcatctaccagatagaaaaatatctgaaatcccaatctcagttcaaatcacagcgtccatcagtcgtgaacgcatattcatcggaatatctgaaatcccaatctcagttcaaatcacagcaggtcatcaatttgcttctcaatcttagaaaatatctgaaatcccaatctcagttcaaatcacagccgctattcctgcacatgccggggagggcgaaatatctgaaatcccaatctcagttcaaatcacagccatatcacgatattaaataacgggcagggtaatatctgaaatcccaatctcagttcaaatcacagcgcctggcgtgattacaagatttccctgcttaatatctgaaatcccaatctcagttcaaatcacagctttcgttattttcgtgttataaacgtgttaaatatctgaaatcccaatctcagttcaaatcacagccaagcccaccattttgcgtctgagtttgtgaatatctgaaatcccaatctcagttcaaatcacagcaacgtcacaaatatgagtgatatgttcgctaatatctgaaatcccaatctcagttcaaatcacagccgagagccaaataaccaaagcaggccaaacaatatctgaaatcccaatctcagttcaaatcacagcgttaaagtatttgcgcaatgccatgtcaacaatatctgaaatcccaatctcagttcaaatcacagcaggtcatcaatttgcttctcaatcttagaaaatatctgaaatcccaatctcagttcaaatcacagccgctattcctgcacatgccggggagggcgaaatatctgaaatcccaatctcagttcaaatcacagctaggagtgaccgcgataaattgctttatgcaatatctgaaatcccaatctcagttcaaatcacagcgccgtaacgctaacagtcacatcagcccgcaatatctgaaatcccaatctcagttcaaatcacagcacgtactcaatcgcttcagaagccgacccgaatatctgaaatcccaatctcagttcaaatcacagctaaaatctaccgaaaccttccccggctcgaaatatctgaaatcccaatctcagttcaaatcacagccgaaagaaagcgcgcccgtcctcgagaataaatatctgaaatcccaatctcagttcaaatcacagctttccgaagggcttgttatgtacgacatccaatatctgaaatcccaatctcagttcaaatcacagcctgttacacttgagggatatttttaagccgaatatctgaaatcccaatctcagttcaaatcacagcacacaagaagatagattgaaacaatccgaaaatatctgaaatcccaatctcagttcaaatcacagctgtggttttgttctcgctcattttgatatgaatatctgaattcccaatctcagttcaaatcacagctctgtgcaatcgtggtcaggcgggcagccaaatatctgaattcccaatctcagttcaaatcaccatccccccccccctttcacctcaccggtggcgatactgcgtagcgggtgccggttgtgagatcgatagcatgccggcggtcgcgggtgatgatgatttcggtgatgcggtcactgcggaagtttaagtcggcatcagcgtttgttatgcggcgcacggtgccgtcggcgaggtgcaggcggcgggtttcggggtcggcgtagaggagcatggtgcggaagccttctgcaaaaacgggctcgccgctcaggcgcgttaccggaatttccgtaccgagggcatacacaagggcagattgcgatccccggctgccgagtagtacgacgggaatttcgctgccggcttcgaggctgccaagtgcttctgcagtctgcatcatccgccactgactcccgtcttcgagggtgaggatggcgttgtcaacgcgggtttcctccgaaaaaataaagctgatgcggtcctgtgaagttgccgtttgcagcggggatgtcagcaacaagagggcagtcagtagcgaaaacagaagcatggatgaaaaaatgaatcggattgtaaatttgagggcagcttatttcagcaggaaatctgccgcgtcacagctgcggtgcggagcaaatagggagatgtcggcgcggcgcagcagggtttcgggctgaatgatggctgtatcgccggtcagccggtcagaagacagcccgcggagggtcgacagcagcagggcatagacgcctcccccggcaggctgtgttgcgagataacggctgagcgcccgaatgttgtcgtcatcgcgggggatgtgctccggcttcaaaaacaaaaagcccgccgcctcatcgaggctgacctcttcctgttcatgatagccgccaccggggctttcttcgtactcaagctgtgcacattccgctttcagccgaatcccgagcggtcgctcggggtcgagtcccgcttctgccgcaagttgtgccaaatcctgcaacaataccgaaaggtaaacgggctttggaaatgttgccgcaatgcggagcgcaggcttccccatccatccaaaaccttccgcagcggaacgggtcgcaccttccccggccggatccgatttcgaaagcagccggcagcccgcctcacccgttacaaaaaagaaggccgcgtctgagagccgttcagcgtgatgggggaggctgagcagacagcttccggcatggggatcatgctcggtttcatacacatttacgccaatacgcgtcgaaatcccgggctgtgatgtcttcatcaggattcgggtgccggtttaatttcgttgggggcagacttgccgtcagcccaggcgttgatgttctcgaaggtggtgtccgaaatattgcggagcgcggtatccgtcaggaacgcctgatggctcgtgatgagcacattctggaacacgagcaggcgcgcaagcatatcatcctgcagaatctgctcggaatgatcgtggaagaacaggccttcctcttcctcatacacatcgaggccgaggtagccgataacgccctgcttcaggccgttgatgaccgcctccgttttgatgaggccgccgcgggaagtgttgatgagcatcacgccttttttgaactgcccgaccgctttttcatcgaccatgtgataggtgtgcttgttgaggggggcgtgcagggtgatgatgtcggagcgcgaaaacagctcttcgagggcgacatactcgggactgatggctttcacaagggatgcattttcgcggatgtcgtagcagagcaccttgcagccaaagccgtgcaggagctttgcaacttccgccccgattttcccggtcccgaccacgcccgcggttttgccgtacatgtcgaagccaatcagcccatcgagggagaagttgagatcgcgtatgcggttgtgcgcccggatcagcttgcggttcaggcccagcatgagcgcaacggtgtgttcggcaaccgcatgaggcgaatattccggcacgttggcgactttcatgccaagttcgtgtgcggcctcgagatcgacattgttgaaacccgccgagcgcagcgcgatataccggacccccacttcgtgcagcgttttcagaattttgtcgtcggctttgtcatttacgaaaatgagggcgacatcagagccttgtgccaggcttgcggtttgttcgctgagctcgggcttgaggaagcgcagctcatgccgcctgttgttagccttttcgatgtaggacttttcaaagcggagggaatcaaaaatagagatgatcatttgggtatgaataggttaaaaggtcgggataggaatgattggcttccggctttcgggcttgccgctcagcgttttccgaggatgatgacctgtacgtcgaagagttttccggcctccacctgaaaccgaacgagagtgcgctctacctgaaagccatgccggccggcggcaccgggattcatgaacagcagatttcccgcctctttgtcgcgggctatttttaggatgtgactgtgtccgcagataaacagatcaggcgggttgccgtagagttccttgcgaatggggatggcatagcggcccggattgcccccgatatgggtcataaatacgttgacgccttcgcacgcaaaacgcaggctgtgcggataaagctgccggatgtcctgtccgtctatgttgccgtaaacgccccggagcggcgcgagttgctgaagttcttctgcaattttgagcgtgccgaaatctccggcatgccatatttcatcgcaccccgcgaagtactccgccacctgcggatcgaggtaagaatgcgtatctgagatgaggccgattttcataagttaattttgatctgcatagcacttgtcagggtaaatgtactgacaatttccctgacttatcaacgcagatcaggcgatcgtaatttcgttggaggcgggtgattagctcccataaatctcattaatcaccatcgcaatccgaaggccggactgaaggaggcgtttttcgacaatatggaagttgcggttgcggtactcccagccgagttcgaggttttcgggcaggtcgtagatgtcgcttcggtacaccatggattcatgcgcccagtcacgaggcccgccctgtttccaggctgcgatggtttcctcatccagaatgaggagggcgtcggtgaactgcgttgtggtaagtccccaggattcgatcatgtcggtatcccagacgcggtgcaggttggagcggttgccgagccattgcacccgcacgtcatttccgccgcggtcctcgcctgtgccaacgtgcagcggctgatgcatgtcgccaatcatgtgaatgaccatgcgaaaagcgtcgcgctcttcttcgggtgaaagttcgccggatttgagcgccgcgatttgccgctcaaaggcttctacaacatcgccgttcgggttgtgctcagcttcttcgtagcgcatgccgtcagggatggtgacccagtgccagtcagcggtgtgccggaaggcatcctgcgaccggacctgatccatccagaccgttgcaacggccagacttgtttcacccaggatgcgctctacgtgcgccgcggcttccggcgtgaggtgccgctgcgcaatctccccggtgatgaaatgccccgtacgtccccagccctgcgcaggatcgggaagcatcaggatgaacagtaaaactgcgctcaataaatgcggcatgaggtttttgggataaacagtccttgaacaaatcgctaacattttagtttttattaagatgaatggtttagtcgctaacacttaattttgaggctgacacaacgatctattttacaaaatcgaggtgttaattcctgtgaaatgggatggactttttttgctacaatcatttcacccgttcagggttgatcgccattttggcctgaaatgccggaattcggagcgtcctgtagggacgccctctgggttgaaaatcgaacaaccccacccaattcccggaatgccgcaggcatgacgcgaccgtcggagaccccgcaccggagccctgccctacgagatccttcgactccgctgcgctccgctcaggatgacaggcgccgcatgagatcaaacggcgcggctggccgcgcaggggtttcaggaaatgcccctgtcatcctgagcaaagacggagcgcagcgaagtcggagtcgaaggatctagtattcaggcctgggaggttgattcgactatgaacaatccgcgtcaatcccgctccatccatataacctgcgctcaatcatcgcgtcgcgaacttcgcgccttcttcgcgtcttcgcgtacctcccatccgcgttccatcatcgcataaagcgcgtccggggcgggcacacaggcccgcccctacgatttcgctatcatcgttgcggcttgctgaccgagcttcatgccgagggctacgcccatgccgccgaggccggcggcgacatacacgccgttttcgtgacgggtgcactcgggggttttggttgcgccgaagcccatcacgccggtccattcctgctcgatctcccagtctgggtcgatgccgagcttttcgttgacgaagctcaccagccagtttttgatttttggattgatttcgttgcggatggactcctcccccgctttgtccacgtcgcgggcaccgccgatgaggagccggtcgccgaggtcgcggaaatagacgtagccgcggttgtagtgacagctgccatgccagggcaggttttggagaggtttggtcacgaacacgtagccgcgggcgggcttcacggttgtgccagactcgagggttgaggtgtagccgttggtcgcgcagaggacagcgccagcctgcaacaccaggccatcctgcagcacaacgccgttgcttttgacttccgcaacgggcgtgttccagcggatttcaaccccggcttcgttcgctttgcggacgagcgcttgcagcattttgccgctgtgcaggtagccttcgagccggttgaaaatggacggaaagctgttgatgtcgcgcacttcgtaggtatcgggcaagccggtgatttcttcaacccagccgctgaagcgcttcaggttggcgacgctttcccggaaatgggggtcggagatgtcatcaaagatttcatagccgccggtcatttcgtagccgatggcgtcggtgccgagctcggttttgagcagctcgaggccttcgaagcgcatccgcaggcgggctttaaccccggcttcgggctcctgatggagatcatcgagcagctctccggctgagccaaaacaggcaaatcccgcattgcgcccggttgcgccggtcggccagaatcctcggtcgagcaccatcacgcggctgtcagggtacatccttcgatagaagagcgcggttgagagtccggtgatcccggagcccacgatgagcagatcagcaggccgggccagcacatctttttcccaccagctccgctgtgtgatatttttgaaaatcatctaaagtcctttt

SEQ ID NO: 2636 - DNA, 23465 bp, synthetic construct
  misc_feature 1..23465: note = Synthetic
  source 1..23465: mol_type = other DNA
ttttacaaaagacaacagccctttaccaagcaataacattaatgatatagatatagatggggttacaggagaagtgttttttgctaccgacaaaggattggtttcttttaaagggacagccaccaaagcaagtgataacctgaataatgtatttgtatacccaaatccagtacgaccagaatttacaggaacagtaaaaatagcagctttaacaaacaaagcaaatgtaaaaattacagatattgaaggaaatttagtttttgaaaccacctcagaaggaggtacagtagaatgggataccacagcttttggtagttataaagttgcctctggagtatatatggtttttatttctgccgaagatggcatagaaactacggtaaaaaaaataatgattgtacgataaatgaatatttacaaactacttcaaatcaatcaaaaaataaacaaccaccgaattaagtttttcggactatggctacttagcgtttttaataaaaggtatttgtcaatacaattcgatcctgttttagcgtgtaatttgcgctgtaagatgtgttattttacagatcctaattttactaaaaaacttaaaggaatttttaaagaagaagatttgccaaaaatagcatctgtaaattttaaaaatgcactaaaaattcaaattggatgtggggcagaacccacgctttttaaaaatatcgacaaaataatagagcttgcccgccaatataaaattccgcatataagtatggttaccaatggtaatttactcacaaaacaagatatttctacttactcagaaaaaggattgcatgagtttattatttcgatgcacggcgtatacaaagacacgtatgaaaactttatggataagggtaattacgatatttttcataaattacttgaaaatatttctcttgagaaaaaaaacaatccaaaattaactttgcgaataaattatacgtttaataaagataatttttacgaaataaaagacttttttaaatggtttggtcagtatgacatcaacaccattcaatttcgtccaatagataaaataggagaaacagcctacaataattttagtctaaaagaaatagaacaagattattcaaaaataatgcaagactttggtgttgaagcgcaactaagaaaaataaatgtacttgctcccacttctattaaaagagatgaagaacgcaatgtggtacaaaacaaaaacaacagctcttatttagttccgtatgccacatgctatatagccccagattttttttggaaagaaaattttgattggaaaaatcaaacatttcatcaatggaaaaaagagaaccattgggattggaaactcttcaaaaacatatttatttcacgaaaaaaactcgatcaaataaatagaaacatgctgaactattcagtagaaatgaacggataatacactaaaaatgcttattaaaacgaaggctattgttttttcaacggtaaaatttcaagaaaaaagtcttattgtaaagtgttttacagaaagtaatggtattaaaacgtatttcgttccaaatgctttttcaagctcaaaaaacaatagaaaaatagcttattttcagccattaaccattttagaaatagaagccaaccataaaaacaaaggaacactagagcattttaaagaaataaaattagctacatcctaccaaaccattccaaacgatatttacaagagtactattgttatttttatctcagaaatagtacaccattgtattcatgaagaagaaaaaaacaccgaattatttcattttttagaaaccgcattactttggctagacacacacgaagaaatagctaatttccacctcattttactcgtacaacttacaaagtttttaggcttttatcctgatagttccaatagttccaattctttttttgatataaacgaaggaaactttataacacaccaaacgctcaattctatttcagaaacagaaacattgttatttaaaaagctcttagaattaaaattcagtacgcctcaaaaaatatttaccgcatctcatagacaattactgttaaaaatactactacagtattacgccattcacctagacggttttaaaaaaccaaaatctcttgaggtcttaaaggaggtttttgcttaaaatataaaaaaacataattctttctaaattttctataaaagtctattctcttttatcaattttctattctcttttatcaaaattccttactttcgcaacctgatttaagaatacgacaaaatgagcacaaaatttactgaatacaaaggacttgacttgccaacagtagcatcagaagttcttgatttttggaaaaaaaataatgtatttgaacaaagtgtaacttcgcgcgaaggtgcaacgccatatgtgttttttgaagggccaccttctgccaatggattgccaggaattcatcacgtgatggctcgcgctattaaagatattttttgtcgttataaaactcaaaaaggctatcaagtaaaacgtaaagcaggttgggacacacatggtttacccgtagaactaggtaccgaaaaagaactaggtattaccaaagaagatattggaaaaaccatttcggttacagaatataatgaagcctgcaaacgcactgtaatgcgctataccgatgtatggaacgaccttaccgaaaaaatggggtattgggtagatatggaagatccgtatgtaacctacaaatccaaatacatggaatcggtttggtggttgttaaaacaaatttacaacaaagatttattatataaaggttacacaattcagccgtattcaccaaaagctggtacaggtttgtcttcacacgaagtaaaccaacctggagcttatcgcgatgtaaccgatactacgatagtagcacaattcaaaacaaaattggaaacgttacctatctttttgcaaggttttggtgatattcacattttggcttggacaacaacaccttggactttaccaagtaacacagctttgactgttggtccaaaaatagattatgttttggttaaaacatttaatgaatatacaggtattgaaattaatgtagtattggcaaaaaatctgcttaataagcatttttcaaatgctattcaggttgaagattttaaaaattctaatgaagaaataattaaaaattattttgagaataatccttcatcagatgatcaaaaaattaaatttattttagaagagatagatgcaactttaaataattttattaaaaaatcaacaaaccattatttaaatattttaacaaaagattcagtttttgaaatatttgaaaaagttcagataaagcaagaatcccttcaaaagcttttagttaagaacagatatcaaatccttgccgaatgtaaaggagccgatttagttggaattcgttatgagcaattattaccattggctttaccttatcaaaatcctgaaaatgcttttagagtaattgcaggtgattttgttactaccgaagacggaacgggtattgtgcatacagcgccaacttttggtgcagatgattctaaagttgccaaagaagcaacacccgaagtgccaccaatgttggttttagacgaaaatggaaatcctgtgccgttggttgatttgcaaggaaaattcattcaaggcttaggagaattttcaggaaagtatgtaaaaaacgaatattacaacgagggtgaagctccagaaaaatctgtcgatgtagaaattgctattctattaaaagagcaaaataaagcctttaaggttgaaaaatacgtacacagctacccacattgttggagaactgacaagcctattttatattatccattagattcttggttcatcaaagtaaccgaaatcaaagatagaatgtttgatttaaacgaaacgattaactggaaacctaaagcaacaggagaagggcgttttgggaattggttgaaaaacgccaacgattggaacttatcacgttcaagatattggggaattccactaccaatttggagaaccgaagataaaacagaagaaatttgtattggctctgtagaagaattgtatgctgaaattgaaaaatctatcgcagcaggtttccaaaaagaaaacccatttaaaggttttgtagttggaagcatgagcgaagaaaactacgatttggtagatttacataaaaacgtagttgatgatattgtattggtatcagctacaggtaaacctatgaaacgcgaaaccgatctaattgatgtttggtttgatagtggtgcaatgccttatgcacaatggcattatccatttgaaaacaaagagttgattgacaaaaacaaagcatttccagccgattttattgccgaaggtgtcgatcaaactcgtggttggttttacacattacacgctattggaacattggtttttgataaaattgcgtataaaaatgtagtttcaaacggtttagttctagacaaaaacggacaaaaaatgtcgaaacgtttgggtaatgctgttgatccatttactactttggcagagtatggtccagatgcaacgcgttggtatatgatttcgaatgctaatccgtgggacaacttaaaatttgatatagaaggtgttgctgaagttcgtagaaaattctttggaactttatacaacacgtattcattctttagcttatacgctaatatagatggctttacttatgctgaagccgaaattccattggcagaaagaccagaaattgaccgatggattttatcagaattacactctttaattgctttggtagatgaggcttatgccgattacgaacctacaaaggcagcaagagctatatccgattttgtacaagaaaatttaagtaattggtatgttcgtttatgccgaagaagattttggaaaggcgaatacggcacagataaaatagcagcttaccaaaccctttacacttgtttggttaccatagccaagttgtctgctccaattgctccgttttttatggataggctttacaaagatttgaacacggctacaaacaacgaaaaatttaatagtgtgcacttgtcagagtttcctgttttggttgaaaactttgttgataaatcgctagaaagcaaaatgttgaaagcacaaaccgtttcttcattggtgttgtcacttcgaaaaaaagaaatgataaaagtaagacaacctttgcaaagggttatgattcctgtacttgatgaggtttttaaagcagaaatagaagctgttgcagaccttattaaagcagaagtaaatgtaaaagaaatcgaacttctagatgatgcttcgggtgtattggtaaaacaaattaaaccaaattttaaagcactagggcctaagtttggaaaagatattaatctagtttccaaagagatacaggctttttctcaagatcaaattaatgaaatagacacaaaaggagaaatttctattgttatttcaggaaaaagcataattttaacttctcaagaagtagaaataacttctcaagatattccaggttggttggtagctagcgcaaacggaattactgttgccttagatattacaatatcggatgccttgaaaaaagaaggaatttctagagaattggtaaaccgaattcaaaatatacgtaaagattcaggttttgaagtaaccgataaaataaaagtaactttggagcgttttggtaatttggaagatgcgatactcagtaatcaagagtatattaaatcggaaactttaaccgaagaattaaatttttctgataatttagaaaatggtatagaaattgaatttgacgatatcaaaacaaaaatattaatttcaaaatagttgtattatgacagatgaagtagtaagatattctgatgccgatttggcggaattcaaagaaattattttaaaaaaaatagaaaaagctcaaaaagatcttgaacttatcaagagtgcttatatgaatgatttgaataatggcaccgatgatacttcgcctacatttaaagcgtttgaagaaggtagcgaaaccatgagtaaagaggcaaattcgcaattggcaattcgtcaagaaaaatttattcgcgaccttaaaaatgctctttttagagtagaaaacaaaacctatggtgtgtgtaaaattacaggaaaattaataggtaaagatagacttaaaattgtgcctcatgctacgatgagtatcgaggctaaaaatatgcaacgataagttaaactttatttaaaacaaagtatagaaacactctttttagggtgtttttgtatttttatactacttttgccaaaaataatagaaaaaatcgacaaaggatttatctattttttattagaatacttattagaaaattaataaaatgaaaataaaacacgctatatacatcatcatcttggttctatttatagatcagttttcaaaaatatatgtaaaaaccaatttcttttacggcgaaagtgtagatatattaaaatggtttaaacttacttttatagaaaatgaaggtatggcttggggtacagaaattccaggtgaatacggaaaattgtttttaacactatttagaataacagctgtagttggtattgcatattggttatgggaatcatctgtaacgaaaaaaaaatctaagtatttaattgttgctatctctttaatcatggcaggtgctttgggtaacattatagattcggtgttttatggagttattttcgataagagtactcctacgcatttagcatcattatttgcagagaataattacggcacatggtttcatggtagagtagtagatatgttttatttccctatttggcatggttttttaccgcagtggatacccgtatatgggggtaaagaatttactttttttaatgccatattcaatgttgccgatttttctatttctacaggagttggaatacttatattttttaacaaaaaagcttttgataatacccccgcaaattctactaaaccctacttaaacaatgatttagaagaaaataaataaagttatgtttcatgaaaactctatagggagtatttatttgttagccacaccttttcatgtggttgtaattttgtttgaaatgtattacagtataaagcacaaaaaatctttatacactacccgagatacccttacaacattgtatttagcagttcttaattttgctatagatattgtaatgaaaggcattgcttttggcgtaatgttttacttttataagtataaaattattactttagaacatactttttggtattggttggcacttgttgtacttcaagatttggcatattattttttgcatttgctagatcattcttctcgtttattttgggcgatacacgttacacatcataattcggaatattttaatatagccacaggatttcgttcatctgtatttcagcctttataccggtatttattttttgcacctatcgcttttttagggtttaacccttttgatgttatggctgtatatgctattgtgcaagtttatggcacttgggtacatactcaaacaatccgcaatatgggttggttagaatatattttggttacgccatctcatcatagagtacatcatgcgtgtaatgctcgttatctggatagaaatatgggtatggcttttattatttgggataaaatttttggaacctttgaaaaagaagatccaaattacgagcctgtaaagtttggtattactgttcctgtagaaaacaaagggcctgttaatattgtttttcatgaattgaaatctatttggaaagacgcatctcaacccaatatttcattcaaaaatagacttcaatatatattttaccctccaggttggaatcatttaggaaatggaaaaacctccaaacaagtaagaactttagaaaggcttgagcgttctaaaattgaaaaattgcatgaggtgtaatgcaataatctaattttatatcacatgggtttgcatctttaatacaatctacaggattaaaaaaagacaatccaattttaatgacctcaggcttacattccgatagaaatttgtcgtaaaaaccctttccataacctacgcgattgccttgcttgtcgtagcccaaaacgggaacaaataccacgtctattttatagcttggaacttcaataccacccatgggttctggaatattgtatggattctttttaatttttgtattctcggtaagtaaaaaatgcgtcattttgcacgtttcaaattctgattttgaaagtatgacatctttatcttttccggccaatatttgtaatatatattcggtattgacttctttttgctctgtaatgcttaaaaaaatatgataatacgttttgtcccaaacattcatctttaaagccatattggctatagctaaactttgtgtttcaatgtcttcttcagataaattttgtcttaggtttttatgaaaaattctacatggttttttcagcatacaaatgatgttttaaatcgtctataaaattagttaaatgttctacttctacatgatccattaaaacaattttataccaattattatcatcattatgtttttgaggtactaagtcgtattttttttctaattctttagaaataaattgtgcatcaactgtaacaatattcatataaggatggcggtaaaaatcaacacccaatttttcaagttctttacataaatattcggttcgcatttgcaagatacttactttttcgtaccaaccgtgtggcccgtaggtaaacaatatcatccaaacagctacagcattcgagccgcttcggcttccgcaaagggttaaatccataccttcaacatattcagcttcttgcgttagcacattttctataagtccttttctacatataaaaacgccagttccataaggagcttgtaacattttgtgcgcatctatagtaatagaacttattttcgggtttgaaaaatttatttttgattgctgattgctaaacggatatacaaatcctccgtaagcaccatcaatatgtagtttataaattacctgcgctttttcaaaaacatgagtatacacatcagggttgtctacgcttccaaacatagttgtacccatattggcaacggcaataaaatattttttacctgagtttttggcttcaacaataagttgttctagtttttcgggactaatttctctagttttaaaccctacaggcacttttatccaatctatttgcaataaattggagccctttgctatagaataatgtgtgtcttcagaggcaactatggcaatttcgttaagttgagctttaaagtgtgtaataaataagtttcggtacatccagagtgcttgtatattggcttcggtaccacctggcgaaatataaccgtcaaaatcgtggggtttggcattaaaaatatcacaagcaattacattaagtacttcgcgctctatatcttgagtgccactaaaagctttttctgaggttcctagagtatgacagcctatatggtttggattggcaacgtaagtttgtaatgttggagcgtcttttaaaaaaggagcatcgttgtaaaaaacacgttcatcaagttttgaagcaggataacccaaagaggcatcagtagcaaaatttacgttttgatgtaacgcttgttcaattctatatttacgttcgtcttgtgtaagttttttccaaaaaaccataggtataaattttaggcaaaactattggaatcttcacgtttaaaatatgataattgttaggtaaaaaaagtcccaccgaggcaggactaaagattttcatctacggcatatagccttattgtgataagattaaagatttgaaattttaatctgatacaaatataggtaaaaatattttggctcagttacggtttcccgtaatgttatttattttctttttcttatttttagtaattgattttaaagcgatacaaaatggcaaaaatattagggttggacctaggaacaaacagtattggatgggcattgattgatgatgttcagaataaaattttaggcattggtagtagaatatttccaatgggagttgaaaatttaggtgaaggagaaggaagagaaatgtctaaaaatgcagggagaacagggtcaagaggtgttcgtcgtcaattttttagaagaagattaagaaagaggattttattaaaagcactttcagaacataaaatgtgtccaatgattgcattagattttgaagattggaaaaaaactaaagaatttccatctgaaaaattagccaattggtttgcgttaaatccttatgagttacgatataaagctttacatcaaaaattatctttagaagaaataggtagaattttttatcatttaattcaaagaagagggtttttaagtaatagtagaaaaggagggacagatgacggaactatttttaaaggaaatccaaaagaaggtaaaattggaattacagaaacgcaagaaagcattcatgataaaactttaggttcttatttatttgaaatttaccccaaagagaatcaaccttttcaaggtggtttagaacgaattcgaaaccgatatactactcgtaaaatgtatgtagatgagtttgaattgatttggaacaaacaatctcaattttattctgaattaaatgaagatttaaaaacactttttggcggaagaaaattagacggttacaaagaagatggtattttatttcatcaacgaccattacgatctcaaaagcatttagttggaaattgtgcttttgaaccaaccaaaacgaaatgtcccatcagcgctatcccatttgaacaattcagagtttggcagtgggtaaatactgttgaatacaatggaaagaaaatttctcaagaagaaaaagaaaagatagttgagtttctgtattcaaatgaaaagcctgaattcaaaaaaattagaaaagttattgggaaagaaagtgccgaattcaaattcaattataaagatgaagataaaattgtaggcacacacactatttctaatttatctaacaaaaaatattttggtaaaaaatggtttgaactttcagaaaaagaacaagaagacatttggcatgttttgtatttttttgatagtaaatcaaatttaaaagaatatgctattaaaaattggaatttcacagaagaacaagcagaatccatttcaaaatttaatgtaaaagatggttattctagtttaagccgaaaagccatttcaaatatattaccttttttaaaattgggttttacttatgatgttgccgttgtattgggcggaatcaaaaatgtatttggttcagattgggataatctttctgatgacaagagaaatttcttaattgataatatggaaggaattgttcgttccaaaaccaaaggcggtttcattgatattataaaagatattttgagaaatgactataatatttcagataatcaattacgaaaattataccatcataccgcaactattgatgtttcagaattactagaaaaattgccaattggaaaagaggctgataaagaaatacaagctattcgtaatccaattgtaatatctgcactatttgaattaagaaagttagtaaacgaactaattgaggattatggtaaaatagatgaaataaaagttgaaatggctcgcgatttaaaaatttcaaaatcgcaacgtaataaaattagaaaagaacaaaacagattagagcgagagaacgacagggttaaagatagattgattgaaaataacatcagaattacacatgataacatcttgttgtataaattatgggaagaatgtaaaaagacttgtccttatacagggaatcctatttcagtaactcagttgttttctggagaagttcaaattgaacacattcatccttggagtcgctcattaaatgatagtttttctaacaaaacactttgttatgcagatgaaaatcgtaaaaaaggaaacaaaacaccttacgaattttatggaaatgatgaagctaattggtcagctataaaagaacgtgccttgaaattattctctgacaccaaagaatatccaaatgcgtaccaaaaattcaaacgttttgtgcaacaaaaatttgatgatgatttttcttctcgacaattaaatgatacacgttatatcagtaaagaagccaaaaattatttgtcaaaagtttgtaaaaatgtgattgtttctccaggtcaagcaacttcaaatttgcgccaaaaatggggtttaaaccatattttgaatgacgaaaatgtcaaaactcgtgaagatcatagacatcatgctattgatgctttggttatggcttgtaccaaactttcgtatgtgcaagaattatcaaaatggaatcaatacaaaaaaacgcacgaaatgaaaaactttccattaccttgggaaacatttaactacgatgccgaaaaagctgttgaaaaaatattgatttcacacaaacgagtttcaaacgatattaccattcgctataaaaccattgagaaaaatggcaaaaaacacaccaataaaggtgtcgctgctcgtggacaattgcatttagaaactgtttatgggcaaaacaagaattgtaaatctgatgaatatgtatatagagttgatataaataatttaagtttttctcaattaaccagtattgttgatttgaatttgaaacaaataattttaaatgaaatatttaagaaattagagttcgctgaaattgagtttttcaatatgatgaattcaaaagttaagaacttagataaaactcaacagaagaaaattaaagagaaaattgataaaatattaaaagaaacttcattctttatgccaaatgaaggtaaaagatatgcaagacttaataaaattgaaccaaatgatataaaaagagttccagttccaattaaaaaagtcagaataaaaaaagtattaggaaaagctgaaagagtcaatgacaaaattaagcagtttgttgaccccaataaaaaccatcacgtattaatttacaaagacgaaaaaggaaatctaaaagaagaagtagttacattttggacagtagtagaaagaaaaagaacaggacaatctgcctatcaattacctcttgatggaaaagaaatggtaacaacattacatattaatgatatgtttttgttaggtataaataatgacgaaatcaattgggaaaatcctgattttgaagttttgaaaaagaatctttatagagttcaaaagttatcttcaaaattttatgagtttagattagcttctgaagcatcaattcaaaataactttcaaccattttatattagaattcaaagttttggtgaaggaaaaactggttgggacacttttaatccaataaaggtgaagatttcagtttcaggaaaaattaaaaaggcataaattgtcattccgacgaaaggaggaatcacataaagaaaagtaaaacatgttggggtataacgaaaatgaaggcagtcacacctattatgtgtatattataacaaacccatataggtcaacctattacataggcatgactaataatttagcagagcgattacaacagcataaagaaaatatagaaaaaggtaataaaacctttgcagcaaaatataacataaagcatttagtgtattatgagcggtttagttggatacaaaatgctatagccagagaaaaggaattaaaaggttggcgacgtgataagaaattgagtttaattagttcttttaatgaaaattttgagtttttagaagatagatttcttaaaaaataagaataaatttgtcattttgaatacaatgaaaagttgaataaagtatgataaattgattatgtgattcctcctttcgtcggaatgacgaatcgttcattgacatgaagtttttcaaatacttaaacaaccaaaccacaactgggtttccacgcagtcaaacagttgtggtttgattaaagatttgaaaacacgatatttaccaataaagcgaatacgatctaattgttgttgtggtttgattaaagatttgaaaacacgatattgctggcgttatttgggcggtcggtaaaaatgttgtggtttgattaaagatttgaaaacacgatatttgaatagcactaccgggttacgcatgtattgttgtggtttgattaaagatttgaaaacacgatattcgagaaagcaaaaaacgacagaaactatgcgttgtggtttgattaaagatttgaaaacacgatattcccattccaaaataattgtttataacaaatgttgtggtttgattaaagatttgaaaacacgatattagtgcagcaattgcgtacagataaaactttgttgtggtttgattaaagatttgaaaacacgatatttaattatgtagtgaagtatatgaacaaaacgttgtggtttgattaaagatttgaaaacacgatattggaaacgttgggcagttctagtgctaatgtgttgtggtttgattaaagatttgaaaacacgatatttacgcaccaagttttgaaaacaatactacggttgtggtttgattaaagatttgaaaacacgatattgaatatcagccggtataaatgttcttttatgttgtggtttgattaaagatttgaaaacacgatatttaaaaatttgtacattggttaccgattcgggttgtggtttgattaaagatttgaaaacacgatattcagcagctaatgtaaaatatatctgggatagttgtggtttgattaaagatttgaaaacacgatattcctcttatactttcaagattagatataactgttgtggtttgattaaagatttgaaaacacgatatttaggctttgaagacagaactaaaaactcatgttgtggtttgattaaagatttgaaaacacgatattgtaatgactttgtcggaatactataaaatagttgtggtttgattaaagatttgaaaacacgatatttgctggagatattatttatacagcagacgagttgtggtttgattaaagatttgaaaacacgatatttgaatttccgttgtagttgtattaattggagttgtggtttgattaaagatttgaaaacacgatattttcagaaacattttttaaaaataattgttggttgtggtttgattaaagatttgaaaacacgatattagatttttcattcgaaactagatatgctcagttgtggtttgattaaagatttgaaaacacgatattttgaagtagcaacaggagcaaggattggtagttgtggtttgattaaagatttgaaaacacgatatttctacaagttgctgttatctttcagttgcggttgtggtttgattaaagatttgaaaacacgatattttaattgatattgtaggttcattactttgtgttgtggtttgattaaagatttgaaaacacgatattgtaatgactttgtctgaatactataaaatagttgtggtttgattaaagatttgaaaacacgatattgtcttattttttaagttttttagcaactacgttgtggtttgattaaagatttgaaaacacgatattagccgacgaagaaataaacaacggcacacagttgtggtttgattaaagatttgaaaacacgatattagttaatgaatttggattaacttatgatgagttgtggtttgattaaagatttgaaaacacgatatttcttggaatattaatggagataacattgggttgtggtttgattaaagatttgaaaacacgatattacctgcttttaaaacatgcccaggcgatgcgttgtggtttgattaaagatttgaaaacacgatattgccaaagtaagctacttatataaaaaagaggttgtggtttgattaaagatttgaaaacacgatattttgtaaaataaataatatagagcatattgagttgtggtttgattaaagatttgaaaacacgatattatcgtatgaaaggtatgatacttctactggttgtggtttgattaaagatttgaaaacacgatattcagtagcattgttttttactatctccacagttgtggtttgattaaagatttgaaaacacgatattacctaccgaaataacagaagagcaatacaagttgtggtttgattaaagatttgaaaacacgatatttggattaaaatttacagagatgaccaagatgttgtggtttgattaaagatttgaaaacacgatatttacagatacattacaagctatttacaacaagttgtggtttgattaaagatttgaaaacacgatattaaatgatttgaaagccgaagccaaagccttgttgtggtttgattaaagatttgaaaacacgatattaaatttttcactttccattttcaaaaatctagttgtggtttgattaaagatttgaaaacacgatattagattttaaaaattagttattcattgcagcgttgtggtttgattaaagatttgaaaacacgatattaatctcggataaagtttgttgataatgcttgttgtggtttgattaaagatttgaaaacacgatatttgacgcaaaagcagatgatatatatgaagggttgtggtttgattaaagatttgaaaacacgatattattaatacgctcaaaaaacatctacttgtcgttgtggtttgattaaagatttgaaaacacgatattttacgtgtataaatacaccacaattgtctagttgtggtttgattaaagatttgaaaacacgatatttttttgaaaatctaataacgcaaaacaatggttgtggtttgattaaagatttgaaaacacgatattatttcttgattttttgtttgttgtattcttgttgtggtttgattaaagatttgaaaacacgatattatcaaggaaatatttgtacagcacctactggttgtggtttgattaaagatttgaaaacacgatattccacaaattttgtggcgtttttttctacaagttgtggtttgattaaagatttgaaaacacgatattaacagtaattaatattgaaaacactatctcgttgtggtttgattaaagatttgaaaacacgatattagttagctttctatattttgataatcaattaattgtgttgaaatatcgtaataaaaaatgcttcttttttgtagtgataaggcaaaattgaggcatttttttattttaaaataattccaattgggtaggttggggcgttttgggtacttcggctttgccccaaaaattcaaaatattaccaaactgtttatctgtaattcgcaacacacttactttgcccaatggtggtaataaggtatgtattcgtttttcgtgtacatcggcactttcactactagcgcaatggcgtatatacaccgaatattgcatcatactaaatccatcttttagtaagctggttctaaaacccgaagcattttttcggtcttttttagtatctgtaggtaaatcaaaaaacacaaataaccacataattcggtatccatttagttccataattttggatagtttatttttttacgttcacccaaataacattgttgtaaagagctggccgttttttgtaaaccaaccatcaacggacttttttcttctttaaaatataccgttttagtaagaacttgcaataattcgctttttattttggtatttaattcttgttcagaatagttctgcattatttcaaaaactttttcatctaccattgggcgaaatggttccataatatcatcggctaaagcaaaagcattgtatttacttttatgatgaatacctagcgtatttaatagcccgcttccagacaaagcccttgctgtagctgctcttaaaatagcatatccataatttaaaaaattatttgggtaatcaccaaagcgttcacgtttaaaattttgttcaaaaaatgttttccaataaaaatttgcagcaacaccttccatattacttgtatcgccacttaaaacttttcgagataaaaaatcaaaattatttttctttccagttattttttccaacaaaataccttgattggtaattttttcaacaatggtttgttgccaaagttgttttttgagtggttcggaagcatttatttggtgcttaaaaatttcttgttgaatatgatgactgtttaaattcataaacaaaccattgggtaagtgatgggcattgcaaattatcacagcagcattatgctctataagtaaatttaaagcaggaatacttatgtaaatttcggcattatcgagtactaaatagccaatatcttctacaggtatagtactttcttttacttcggtttttattacaagctgttgatttttggtggttaccgaagctttgttttctagtagtaaagttctttttaacatatttatttgattttaaggcgattataaatatattaattttcaagaataatcgcaaatcaattatttttatctttgttttatgcacgcttcattagaacttcaaatacaaacattacccgataaccctggtgtatatcaatattacgacaaagagggtaaaattttatatgtaggtaaagcaaaaaatcttaaaaaaagagtttcttcgtatttcaataaacatcacgataatgccaaaaccaatgtgctggttcgcaaaattgttgagataaaacacattgtagtggctaccgaagccgatgcgcttttgcttgagaacaatcttataaaaaaactacaaccacgctacaatgtattactcaaagacgataagagttatccgtggatatgtataaaaaaagaaccttttccgagagtgttttctacccgccgtatggtaaaagacggctcggaatattttgggccttataccaattttaaagtagtacatacgatactcgatttaataaaagagttgtaccctttgcgaacgtgtaatctcgatttaaagccatccaacattaattcaggtaagtttaaagtatgtttggaataccatattggtaattgtaaaggcccatgtgaaggttatgaaacacaagaaaactacgaaaaacatgtaatagctattcgagaaattttaaaaggaaattttaaagacagtttgcgcgattttaaaaaaacgatgcaagactatgccctagaaatgcaatttgaagaagctcaaaaaattaaagaaaaaatagaagttcttgaaaattatcaagctcgttctacggtttttaatcctaaaataaacaacatagatgttttttctattgtttcagatgaggctatggcttacgtgaattttctacaaatagcacacggagctattattcgttcgcatacattagaattaaagaaaaaactagacgaaaccgatgaagaattattagaattggctgtggtagaattgcgagagcggtttcatttaacagccaaagaaatcgttgtgccttttgcaataaatttgggtgaaaatttaaaaattacagtgccacaactcggcgacaaaaagcaaatactcgatttatctactcgaaatgcaaaataccatcgattggaacaactcaaacaaatacaaattgtagatccagaacggcacaccaaccgtattatggcacaaatgatgaaagacttgcgtcttactgtagaacctcgccatattgaatgctttgacaattcgaatatacaaggaacaaaccctgtttcggcatgtgtggtttttaaagacggaaagccaagcaaaaaagattaccgtcattttaacataaaaacggttgaagggccaaacgattttgctagtatggaagaagtagtttaccgcagatacaaacgcctactcgatgaaaacgaacccttgcctcaacttatagttatcgatggaggtaaagggcaactgtcatcggctttaaaaagtttggaagcacttaaccttcgtggtaaaatagcaattataggtattgcaaaacggctagaagaattgttttatccaggtgattcagtacccttgtatcttgataaaaagtcagaaacattaaaggttattcagcatttgcgtaatgaagcccaccgatttggtatcacatttcatagagataaacgcagtaagtctgccattcaaaccagtttggaaaccatacctggcattggcgaaaaaacaatgcaaatcttaataaaacactttaaaagtgttaaaagaattaaagaagcctccgaaagtgaaatttctgaagtagtaggtgtttcaaaagccaaaaaaatttccgaattttacaaaaaagaatcctagatgtacatggagccattaggcattagccaaaagccaatagtaaaaataataaaaacaaatgcattatatgcatcaagagttactattgcctattgccttttagctcttgccctatttccctttcaaacagtaaaagctcaaaatacaatacagaaacccaaaataggcgttgtgctttcgggcggaggagccaaaggttttgcacatattggagtgcttaaagtaatagactcattaggaataaaagtagattatattggcggaacaagtatgggtagtgttgtgggcggactttacgcttctggctacacagccaagcaaatagattcgctatttcatgaaataaatttcacagaacttcttcaagattatatccctagaaaatctaaaagtttttatgaaaaaagaaacgatgaggtgtatgccattactttaccgtttaaaaaattcaaccttggattacctttagccttatccaaaggaatgtacaattacaatttgcttacaagattgttgcatcccgtacatcatacaaccaattttaaagaactacccattccgtttgtttgtgtggctactgatattgagaaaggaaaagaaatagtactcgataaagggtgtttgccacaagcaatattggcaagctcggcttttcctagtttgttttcacctgtagaaatagacggtaaaatgcttattgatggcggtgtacttaataattatcctgtagagctggtaaaacaaatgggtgcagacattattattggtgtagatgtgcaagacaatctaaaagacagaaacgaacttaaagacgctacgagaatattggttcaaatatccaatttacaaatgatagagtcgatgaagaacaagattaaacaaaccgacatctacatcaaacctgatatttctgcctacaatgttgtttcttttgatgatggtgcaaaaattattcaagcaggagaattggctgccttacaacatattcaacaacttaatatttattcgaatataaattataaaaaaacgcctcttaaaaaagagtctgatagtatttggataaacaaagtgtctataaatgaactccgaaattatacacgagcttatgttatgggtaaacttggatttaaaacaaaaaacaagatatcctacactcaattggtagacggtataaataaacttaatgcaacgcaaaattttcgatctatatattatcaattaaatgataacaacaacaatgatgaactaagcataacacttcaagaaagtaaaataagaacttttcttaagtttggattgcattatgatgggctgtacaaaagtggaatacttaccaatatcacccaaaaacgatcattatttagaaacgatgtaataagtttagatgttatattgggagataattttaggtacaatctagattattatatagacaatggtttctattttagttttggagtaaaatctagatttaatcaattcaaccgcaatgttgcaaccgattttaataacggctctactttttctcaattaggaataaacaccttaaatattgattttcaagattttacaaatcaaacctatgtacaaaccatttttgcacaaaagtttcttattggagcaggtttagagtggaaacacattaaattgaaatccaatacattacaaagttcagcactatttgaaaatagcgattacggaagtgtttttgggtatttaaaatacgactcgttcgacaataaatactttcctaaaaaaggatggtacttaaatggcgatttacaatcatacctttattctaccaattataccgaaaaattcaaccgattttctatcgcgaaagcagaaacaggtgttacaagaaccttttttaaaaaaattaatttaaaatttcaaacagaagcagggttggcttttggagaatcaagcgttcattttatggattttatattaggaggttacgggtttatgccaattaataattttaaacatttctatggttacgattttgtgtcaattgcagcagatagctatatcaaaacagctttgacttttgattttgaattttacaaaaaaaaacacataaattttagtgcaaactttgccaatgccgaaaatggtttgtttcaaacaggcaattggctatcaataccaaaatattcaggatacgcttttggatatggcttagaaacctttattggtcctgtagaaattaagtatagctggtctccagaattacccaaaggatatacttggtttggagtaggtttttggttttaatggttgtttttttgtaaatagtttaaaaaattaaacaaaaaagttatatttgaacaattaatcaactaaaaacattgtatatgtctatttggaaaaggaaatctataacgcaattattagcagaagcctcagattctgaaaaaggactaaaaagaacattatcttcaaaagcattgatggctctaggagtaggagctattattggagctggtttattttcattaacaggtattgccgccgcagaacatgcaggaccagcagttacgttatcttttgtattggctgctgtaggttgtgcttttgcaggtttgtgttatgcagaatttgcttcaatgattcctgtggcaggaagtgcctatacctattcatacgctactatgggggaatttatggcttggataatcggctgggatttagtgcttgagtatgcacttggagcagcaacagttggtgtaagttggtctagatatttgttagaattactcaacaagtttggtatacatttaccacatgaattaatttgttcgccctgggaaacgcttaagttaagcgacggaactgtagttgatggaggtattattaatttacctgctatttttatagtttcattattgtcattattactaattagaggaactaaagaatcagcaactatgaataactttttagtagttcttaaagttgcagttgttatattatttatagtactaggttggaactttatagacaatgcaaattatacaccatatatccctcaaaatacaggtgagtttggtaagtttggttggtctggaattgcagcaggtgcaggaactgtgttttttgcttttattggatttgatgctgtttctacagcagcccaag

SEQ ID NO: 2637 - DNA, 23456 bp, synthetic construct
  misc_feature 1..23456: note = Synthetic
  source 1..23456: mol_type = other DNA
cacaaacatttttttgaaccaactgaaaacggagtaaaaatgaccgacgtggttcattatgccttgccgttgggaattattggtcaaatgatgaatgctttggtggtcaaaaataaactcaaggaaatctttgaatatcgagtgaaagccgtcaacgaaatcttcaattctaaataatgaataaacaagaagtaactattttttggtttcgccgcgatttgcgattggaggataatgtgggtttattccactccttacaatcccaatatttggtgattcccttatttatttttgatgattcaattttggattctttgcctaaaaatgatgccagagtgggttttattcacgaaacgctttcgaaaataaaccagaaattacaggaaacgggcagttcgcttttggtaaaaaaagggaaaacacaaaccgtttggcaagaacttattcaagaatttgatgtcaaggaagtgttcttcaacaaagattacgaaccttttgcgattaaaagggatttggctattgaagaattgttgaaagccaataaaatagattgtttttcctttaaagaccaagtcattttcgaggaaaacgaaatcgtgaaaagcgacggattgccttatacggtttacacgccattcaaaaataaatggttggaaaaatacaatgcaacggctccagttcgagaatatgatgccacagaaaagttttccagtttccataaatatgattttgtttttccttcattggaagaaataggattcgaggaaagtgccataaaagtcattcctcataacttgaaaaatgtttcgacttaccacgaaactcgtgattttccggctttgaataccacatcatatctttcgccccatttgcgttttggaacggtaagtattcgtaaattagtgaattgggcggctcgaaaaaaccaggtgtttttgagtgagctgatttggagggaattttttatgcagattttgtttcattttcccaaagtggtgacacacaatttcaaatcggcttacgatggcgttcaatggcggaatgacgaaaaggaatttaagcgctggtgtgagggcaggacgggttatccaatggtagatgccggaatgcgggaactcaatgaaacgggttatatgcacaaccgagttcggatggtggtggcaagttttctctgcaaacatttgttgattgactggaaatggggcgaagcctactttgccgaaaaattgttggattttgaattggcggccaatgtcggaaactggcaatgggctgcgggaacaggttgtgatgcggcaccttatttccgggttttcaatcccgaaatccagcagaagaaatttgacgaaaaaggaatctacatccgaaaatggattcccgaatttgatttaggttacggccaaccaatggtcgatcacgcttttgccagagatagagctattgctacctataaagccggcattttgaagtgattatttaatgagtttgttaatcattccttcaaaaataaatccgtgaaaggggagaacggcataccaatatagttttccccaaatgccatcaggtctgaatgttgccgattgatataaggtattgttgatgattttgaattcgagccaagcctcgcccggcaatttcatttcggcgtacaaaactaattttccttcctctttgttggcatacaaaacccgccaaaaatccagtgcatcgcctgaatgaatttcgtgtttgttggttcggcctcttctggaacctacaccaccaaataattggtcgatgaagccacgcaaattccacaaccaatcgccataataccagccggtttctcctccaatggaccaaattctttcgatggtgaaatctcgattttgtatttcttttttgcgtcggtcgatgaaacaatctttcttgggaaccttccgaaatgcagaaatattgctgctaaaccgtccgctcaccaaggaatctttccagctggaagcgaccttgtcttcatcgacttttatcagggctctcgatagggcttgttcgtaggacatcggttttacttccaacaaatcgttgattttattgtccctgcaaatcacttccaccttcatgctgctcaccaaggccgaggccaatttataggaagtcgaggttacgaaatacaaccaataggacgataattttggcgtcattacgggaacggtaaaaatccatctttttaatttttttgctttggcaaaacccaaaagcatttctttgtacgttagaatatccggaccaccaatatcgaaacttttgccgtaagtaacgggattcaagagtgatttggacaaaaattccagaacatcgggaatcgcaatgggttgacatttggtattcagccattttggagtgatcattatgggaagtttattgaccaaatcccgaatgatttcaaacgaagcactgccggaacccacaataattccagccctcaaagtggtcacggcaaaggttccattgttcaggacgtcttccactttttttctggaggacaagtgtttggaaagcgatttgtcgttcacgataccgctcaaataaatgacttgtttggcgattgtttggtttattctatgaacaaaattttctgccgaaactcgttccagttcatcataattattgtccgagccagacatcgaatggattaaataataggcagcatcaacatccgttggaatggcggtcaatgtttctttttttagaaaatcgacttcgatgaccttgacgtttttccgaaattcttcgggacaataaaacctgtttttgtctctcacgcaacaaattacttcgtggccttgcgtcaccaaaataggcaaaagccgtttgccgatataacctgttgcacctgttaagagaattttcatagctttaatttaggaatcaaatttaactcagtttattggaaactaaactgataaattcttttctggttttgtctttttcgaaagcacctgtaaaggaagaagtcgttgtcactgaattctgtttctggatgccgcgcatttgcatgcacatgtgttgggcttcaatcacgacggctactcccagcggatttaatgcttcctgaatgcaattttttatttggtcggtcaatctttcctgaacctgcattcttcgggcaaaagcgtccacaattcttggtattttgctcaatccgacgatttttccgttaggaatgtaagccacgtgtgctttgccaaaaaatggcaacatatgatgttcacacatcgagtaaatttcaatgtcttttacgacaatcatctgtttgtggtcttccgtaaaaagagccgatttcattatttccaatggatccaatccgtaaccgtgagtcaggtattgcatagctttggctactctttccggtgttttttgcagaccttcccggttgatgttttcgcccaaattttctatgattctttggtagttatcggccaatacttcggttatttcttcgtcgtattgttctactttctcgtaactttttatttcttttatcattttggtttagctaatgtttctgttgtttttctataatttgaatgttacaattccataatccatttcgaaaacttgtccggagatggatttggcttgatccgaaatcaggtaattggccatactcgccacttcttccgctttcaagtaatttttcattggatggcgttcgatcatgttttccttcattcgatcgtttcgtaaaattcctgccgaaagcgaggtttcggtaatggtgggagcaatggcattgatgcgaaccaccgaagccaattcagcaccaagcgatttgaccaatccttcaactcccgctttggccgtggcaatgctggcgtgaaaaggcattcccagttttgctgccaccgtgctgaacaaaacaatcgatggattcgttcctttttttaatactggtaaatatttctgaatggttttcaccgcaccaatcacgttaatttcgaaatcgttcctgaaatcatcgatgcctaaactgccaatgggttttaaattaatcgaacctgggcaataaatcaagacgtcaacgttttcaatgtctgggagcgtatcctgcaagacatccaaggaataatgttttaggttcggatgtgaaagatcaggagcatttcggctaatgttgtgtacttggttcgattccaattgttgcaacaaaatagcatttccaattcctttgctaccgccaatgattacaatgtttctcatgtttttattggtattttttaaattcattgaccacaattttcgctttcaaatcaaacatcaaattgtacaatccaaaaaaagtgcggttcatgtaaatgaaatgttttgaaccgcgattcccgttcatttttttaagattggtgtctttggaaaagcgttcgcccaattgtgctatgttttcgaaaaatatttcatccgaaaaatcaaaagattccgattgaaacggttgggtaaacaatgacaataaatcgtaaaacatttgggtgaaatattcgatttcttccttggaatcgtccactctaagaatttccaattcgaataatttcttttcaaaaagggttttattgtctatgacttccttgttgattagctcaaaataaggaatgtaaaactcgtttggaatttgtttcatacaaccaaaatcgagtgccaccaattgattttctgaattgaccaaaaaatttccaggatgcggatcggcgtgtacttttcttaaaatatgaatttgatacatatagaaatcccacaacgcttggccaattttgttggctgcttcttgattggtgtttttgttggtaaactccgaaagatgaattcccgtcatccaatccatcgtgatgattttctcggaagaatattcgggataatagttcggaaaaaccagattttctattttttcacaggcttcgaccacttcttggctttgtttcaattccaataaatagttggtttcctcaatcaatttgtcttcgacttccttaaaatatttgtctgaatcttttccctgaaggttaaacattctgatggcaatgggttttaccaaagccaagtctgacgaaatactgttggccacgcctggatactggattttaacggccagtttttggttgtttttgacagccaagtgcacttgtccaatgctggcggcattgacggaattgggattgaattcatcaaagatttcgtgaggagttttgccaaaattggtcttgaaagttttcaaaaccaaaggtgcggacaatggcggaaccgagaactgcgacaacgaaaatttctccacatacgcctgtggcaaaaagcttttgtccatactcaacatttgggctactttcagtgcgcttcctttgaggcttttgagtccgtcataaatgtcttcggcattgttttcgttgagtttgtcgcgggtcaaatcgctgttgaccattttttcgccgtaatatttcaggtaatttacgcccactttggcaccggtttgaacgagttttgaggctctttcaatttttgaagtagggatatagtctatggttttcattattttttttgtattttttctttgaaaatgaattttccaaaatcgattaggctttccaagggtgcaatattcatcaattcaaaagtggcttttactgatttttcaatataaatgtctgttttttcaaatgctggtgattcgtcttccaaccagaattttagtgtcaataaaaactgaatccaagccgtttcctgtatcgctttttcttgaatgttttgaaatttttcgtactgggttctcacttcgtccgtcataatttcggtgatgtagtttttgaatccaattcgtaggctcgaaagctgcatcaggtttttcagttggttttggtgttctttcaaactcatcacgacataacttctgttggcggtcaacaattcgaagaaggtaaagtaaaaactcagcattttgctttgcatgtcgtagctttcgtaaccgggatctttttgaattaattctttagctttttccaaaaacattttaaaaatctctttctcaacgctttccaatgttccgaaaaaggaatagaattccgtttcctcaaaaccatttgttttggcaaattgatacacggacttaggtttgtcgttattttccaatctgtaattcatgtagatggaaactattttgtcttttgtaattggtgtttttttagcggccattttttatggtgttttgaattagggtgtaaaggtatgtaatgtttaacgatattcaattaaagttaaacaaaatttaacgtaaatgtttgatgtgtcattaaaatgtttaaatttgttgttatgaaaaagaacgtattaataagcggaggttcaggatttatagggaagcatttgactcatttgttgctgggcaaggggtataccgtttccattttaagccgaagccaaaaacaaaacaaggaagatgttttctattatcaatgggatgtttcgactggttttatagaagaagatgctgtcctgaaagctgattatgtcatacatttagccggcgaaaacattgccgaaaagccctggacagcagaacgaaaagaagccatagtccagagtagggaacaacccattcgattgatttataatgtcttgaaaaagaaccataaacaactggatgcctttgtatcggcatcgggagtgggaatttatggggctttgaatggtgaagaagtttgcgccgaaaacaggcctccagaaaatgattttcttggaattacttgccaaaagtgggaagccgccgctgacactatttcggatttcggaattcgagtggtgaaaattcgtactggtttggtattgggtaaagaagatggtttcttgaagaaattaagtcctgtttttaaattcaggctgggttccgccttgggttcagggaaacaatacatgccctggattcatgttgacgatttgtgtggcatatatcttgaagcgttgaacaatagtacgatgaatggtgcttataatgcggccgttcatgacaataccaccaatgctgttttttcgaaaaccttggcaaaaatttatggatattctgtttggttgcctaatgttcctgcttttttgataaaactagcattgggcgaaatgggacaaatcattctcacgggaagaagggtttcttcggaaaaaatagagaaaacaggattcaagtttaaattttcaagcttggaacaagcgctcagggattgtttggggagataggcatgttcagctgaaacagtgtttttatgttgacggtttcggccactttcacactcaacatttcgggaattttgacgtcaaaatctttgctggccacgttaaattccgaaatgaattctaatttgccgtccacttttctaaggatggcaacggtgttgatttttttggattttccgtgtaacttcaatatgcctttcagtttaaattcttttggtgatgtgccaatgatgttcaagttgaacccctcaatgtttcctttgaaaacggcttttggatagctgtggctttccatgtaattttcgttaaaatgtttttccatcatcgaaatcttgaaatggaaatcttttatcaaaactatacttgcaatggctcccgttttagtgtttatgacacaagtagcctcattgtttgtggctttgacttcttcaaatagaggcactgatgcctcaaagtggatgatccccgttgtggtggtcaattcttcttgagcggaaatcacattggcattgaacaatagcaataatagtataatttttttcatgtcggcagatgaattaaattatttaaagttacgctattttgtttaaaattccttggttttattaagaaaaattgtcttataaaaaagagaaatacttagttttttaccctgatttaaagcgtattgttcatttgttcctgatcggcgttggctcgattcaggatgttgtcgggaagtgctttcttggctttggcacccatttttttcaatttttcgacactcgtgatgaggtttccttttccatccaccaatttgttcatcgctccttggtattccattttgctttcgtcaatcttttttcccactttgatcaaatcggccacaaaaccttcaaatttgtcatacaaagcaccggcttgacgggcaatttcaaaagcattttcctgttgtttctggttggtccacatactgtctatggtgcgcaaagtggccaatagggtagaaggtgtcacgatcacgatatttttttcgaaagctttgttgtataaagtcgtgtcttcgttgagtgccaaggcgaaagcgggttccatcgggatgaaaagcagcacaaaatcagggctttcgatttggtataaatcttggtaatttttatcgcccagttgctccacatggcgtttgatggaattgacgtgttcttttaaatagccgtttttcaagctctcgtcttcctcgttgatgtgcttttcataagcagtcaaagacactttcgaatcgacaaccatctttttgccgtcgggcaaattaatcacgacatcaggaaaaacgcgttgtccctcttgattaacgtgggattgttgcacaaaatattctcgatctttttccaagcccgatttttccaaaacgcgttccagaatcaactcgccccagtttccctgcattttgctgtcgcctttcaatgctttggtcaggttcaaggtttccttgctcatttgaaggttcatttcgcgcaaacccagaatttgttggcgcaaagctgcgtgataatcaatgctttctttgtgggtgtcttccacttttttctcgaacaattggatcttgtcttgcaggggcgacaagatgtttttcatgttctccttgttttgttcggtgaatttattcgacttttcgtccaatattttattggccaaattctcgaattccttggtgaacttttcctgtagtttctctacttcttctttttgttccttgttgcgttgccaaagattttcaaaatcgacttcttttttggtgagttgaatgttgagggtctctttttcgttgcgaatgctttctttttcttgcacagtttgctgcagttgtttttccaaagctgttttttctaattgggattgctctttgaggctgttcagtttttcttccagaaaagctttttcagattcggattttgtcgagaaaatcatttttccaatgaaaattccaatggcgagggcaacaatgaaaagcaataaaaagggaagcatgtttgacataaaaaagatgttttttgtagaacgtaaaaataggtattattggtttaagtaggccaattactttttaagttttgactgtttttttgaacaccaattgtttcagcattagcttcaattttttgcccgggcggaacacgattgaactgctttttattttggttttatctacttcttcgggagttgggctggccgtactttgtatgcttatttgaaaagaacccagatgtcccaatcgaacaatgttgccttctttcaaggcgattcctatttcattgactaggctgataaccaccgcataacaatcggattgggttacggaacaactactggaaacacggtcagacaagtcgtctaaatccataacgccacttttggtgattcggggataataagctaccgtgggattggcttgatttgggataatttttttagttacgctaaaaggaacagccataaggattgaaattgagattgatacccacaaatatactaattcatcctgatgaatcaaataaatggccgcgaccaaatgattattttgccgcgaccattttattaattggccacggccattttaaggtctcgtcttgatcagtggaatggtttagcaggatgttttaaaaaaaaagtcccaccgaagcaggacaaaagattttaatctacggcatatagccttattgtgataagattaaagattagaaattttaatcagttacaaatgtaaataaaaaaaactttagtttgaatgaggaaaaccgtaaaaggggtaattattttttcagtaactttaaaaatcttaaaaagacagattattatggctaaaatattaggattggatttaggtacaaactcgattggatgggctttgattgatgataaattgaataaaattattggaatgggaagcagaatatttcctgttggtgttgataatttaggagatggtgaaggagaactttccaaaaatgcaagcagaacaggagcaagaggaacgcgaagacaattttttagaagaagattaaggaagcgagttttattaaaagaattggcatcgttaaatatgtgtcctttgtctaatgaagatttcgagaattggaaaaccactaaaaagtttccaactcaggagttagcttcttggtttgccctcaatccttatgaattaagacatagagcattaaatgaaaagttgtcttttgaagaaattggtcgtgttttttatcatttaattcaacgaagaggatttttgagtaatagcagaagtgctggaaaagatgatggtgccattttcaaagggaatgctaaagaaggaaaaataggaatcgatgaaactagagaacaaattgaaaataaaactttgggttcttacttttatgaaattgcaccaaaagaaaatcagccatttgtagatggattagagcgaattagaaatagatatactacacgacaaatgtatgttgacgaatttgaacaaatttgggaacatcaaaaagtgtatcattctaatttgactcacgacataaaagaaaaaattggcggaagaaagagtgatgaaggttataaagaagacggtattttgtttcatcaaagacctttgcgttcacaaaagcatttagttggtaattgcacatttgaatcaaacaagactaaatgccaattgagtgcaattccttttgaattatatagattgcatcaatggattaacacagttgaatataatggtcataagttgcacgctgacgagagaaaattagtttttaattttctaattgaaaaagaaaaaccaagttttaaagacattcgcaaagccatcaacaaactcgatacaatttataaattcaactataaagatgaagacaaaattgtggggactcacaccatatcaaatctttgcagtaaaaagttttttggtaaaaaatggtttggtttcactgaaaaagaacaagaggatatttggcacgttttgtatttttttgacagcaaggataaagtaaaagaatatgccattaaaaattggggttttgatgaaacacaagcagaagctatttctaaattcaatctaaaagataaatatgccagtttaagcagaaaagcaattaacaatattttgcctttcctggaaatgggatttcaatatgacattgctgtagttcttggaggaataaaaaatgcttatggacaaaattgggaaaccttagatagtggtgacaaagggttgattttggataatatatatgaaattgttcgctcgaatatgaaagggggatttattgaacctttaaaacattttctgaaaacagatttgcatcttaccgaaaagcagttaactaaactataccatcattcagccaatattgaagaaactgttttgttggataaacttccagtaaatgcaaatgcggacaaggaaattcaggccattagaaatccagttgtaataactgctttatttgaaatcaggaaattagtaaacgaaattgttgatgaatatggaaaacctgacgaaataaaagtggaactagctcgaaacttgaaagcttcgaaatcaggaagaaatgaagagcgaaaaaggcaacaaaaattagaaagagaaaatgacagggtaaaagtagaactcaataatctgggaaaacacatttctcaagataatcttttactttataaactatgggaagaatgtaaacatacttgcccttatacaggaagaagcatcagtgtaacccaattgtttagtggtgaagttcaaatagaacacattcatccttggagtaaatccttgaacgatagctttatgaacaaaacactttgttttgctgatgaaaacagggcaaaaggtgatagaacaccttttgaattttatagtttgcaaggtgaaaataaatggcacgaagtaaaagaaagagcgttgaaactgttttccgacacagctcaatatccaaacagttatcaaaaattcaaacgttttgtgcaacaaaaatttgatgatgattttgcaagtaaaaatctaaatgatacgagatatattagtaaggaagccaagaattatatgtctaagatttgcgagaaagtttctgtttctccaggtcaaatgacggctaatttgcgtcaaaagtggggattgaatgctgtacttaatccagaagataaaaccaaaaccagagaagatcatcgtcatcacgctattgatgctttggttatggcttgcggaaccgttgagcatttaaagaaattatccgaatggaacagatacgatagaaaacccgaaaacaaaaactttcctatgccttgggatggttttgttaaagatgctgaagtagcggttgataaaattctggtttcgcataaaaaactaaacaatataataaccgtcagaactcataaaacagaaaagaatggacacgttcatagaaatgttggagtagctgcaagaggacaattgcataaagaaacggtttttggaaagcgaaattttaatggagaagaagcataccacgttcgtaaaccaatagaaagtttgactaccgaaaaacaaatagacaaagtcgttgacgagtctactcgattgttgatattgaaaagagtgcaagaattaggcgggtttgaaaaagataaagttcctgccaacaccttttttgtagttgatgagaatggaataaaccaaccacaaattttcttgcctaataaaaacggtgctcctgttcctatcaaaaaagtaagaatgaaagaaagtataggtagagcagaacgattgaaagaagacattaatcaatatgttaaccctagaaataatcatcacgttattatttacaatgatgaaaagggaaatcttaaagaagatgtagtgactttttggacagtggtcgaacgcaaacgtcaaaagcaaactgtttttcaattaccagccgatggaacttcaatagtaaccactttacaaataaatgatatgtttttattggggctgaaagaagaagaaattaattgggagaatcctgattgtgaagttttgaagaatcatttgtatagagttcagaagttgtcttctaaattttatgaattcagattgagtaaagaagcttcaattcaaaataattttcaaccttattatgtcagaatacaaagttttggtgaaggcaaaactggatggttatcttttaatccaataaaagtaaaaatttcagtttcgggtaaaatcgaaaagttgtaagtttgaatgttctttgacatttcgttctaactcttaaacatctcaaaccacaactgaaaggtaggacatccgcccagtagggatgtagtagctttcagttgtggtttgattaaagattagaaaacacgatattctatgtcgtgacatgcggaacgtccgtttagttgtggtttgattaaagattagaaaacacgatattcgtctgcatttttttgctcaacccattcccgttgtggtttgattaaagattagaaaacacgatattgttttaagcatttctaatgcttctgaaccggttgtggtttgattaaagattagaaaacacgatattggttcgattcctgtaattgtcgatttatgggttgtggtttgattaaagattagaaaacacgatattgactatctggaaacggattgttgctggctggttgtggtttgattaaagattagaaaacacgatattttgaagcggttctttcgtcatttagtgtctgttgtggtttgattaaagattagaaaacacgatatttagtaaaagcatcgcttctggaccatccttgttgtggtttgattaaagattagaaaacacgatattaggacctatttttgataatatgtatggctggttgtggtttgattaaagattagaaaacacgatatttaaagattcattttttgtaacgccttcgctgttgtggtttgattaaagattagaaaacacgatatttattccttttttgcttctttattatctatagttgtggtttgattaaagattagaaaacacgatattagttggcttgttaccttctaattatcaatggaataaagaagaatatcgtaaaataaaatgctcctttttagtgttatatcggctagattggagcattttttcgtttctatgcaattgcagttgttcaaatctgaaacacaattgcaataatttgtatatttgtaaaaacatggattatgagagtagttattgaaaccagcgacaagtataaaagtatgttgcaagaaattgcatctgccataaaagcaaaaattacttttgaagaaaaagaagttgatttttgggaggaacttcccgagcacgtaaaagcagggatcattgagagccaagaacaattcaaacaaggaaaattttctacgcacgaagaagttatggccaaatataaaatcaaatatgatctatgaaagtggtttggtcagaaaatgccgaaacaacttttgatataattgtactttatattgaatccgaatttggtattatttcagccaaaaagtttatcactaaagtagattccgtaatccattccatttccatacaaccctacatttataaaagttccagtttcaacaacaaggtcagaaaagcgagtataagtaagcaatgttctttgttttatgaaataaatcaagaagccattcagttgtcttatttctgggacaaccgccaagacccaatgatttaaaacaattccaattgtgttggtgtagctacggcatcttgtttggttttgcccaaataattgattatcattccaaattgtttgtcggttattcttaaaacactgacttttcccaaaggagggacgagtctgtgaattcttttttcgtgtacatcggcactttcaccgctggcacaatggcgaatgtacaccgagaattgcatcatcgagaagccatctttaatgaggttgcctcgaaattgagaggcgttccgtcggtcttttttggtttccgtcggtaaatcaaagaacacgaacaaccacattattcggtaggcgttaagttccataatttggggtatttaattttctttctgtttcccgcaaagcattgttgcaaagaactggccgttttttgtagcgccaccatcaatggacttttttcgtccttgaaataaacggttcgggtcaatacttgcaaaagttcggccttgattttagtattcaattcctgttcgtcatagttttgcataatttcaaaaactttttcgtcaaccaagggtcggaaaggttccataatatcatcggctagggcaaaagcgttgtatttactcttgtgatgaatacccagggtgttcaacaatccacttccagacaaagccctggcggtggctgcccgaagaatggcataaccgtaattgagaaaattattggggtaatcgccaaaacgttcccgtttgaaatcaagttcaaaaaaggatttccaatattgttgggcagcaacaccttccatattggtcgtgtcaccactcaaaaccttgctggccaagaattcaaaggtattcttgttttcggtgatttttgccaaaagaatgccttgattcgttattttttcgacaacagtttgttgccacaattgctttttgagtggaacggtagcctcaatctggtttttgaaaacttcctgctggatgtggtggctgttgaggttgagaaacattccatttggcaaatgatttttggaacaaatgatgacggaagtattgttctccaccaataagttcatcgcaggtaaactaatgtaaatttcttgatgatctaaaaccaaaaaaccaatgtcttcaatagaaatagtactttcgcggatttcggatttgattattagttgcaagttttttgcggtaatagatgttttgttctctatcaaaatggatttctttatcataattggactattaatgagttatgattgaattggggttatgtaaatttaatgaaaaagagattgtgttttttatggatttccgtaaagtgctttagtttagtgtattttagatgttgcggtggtttggaataattttaatttcaggagacttttgcagctagtcgttcaatttgtttatttttacacgaaattccaagtctgaatgtccaatcaccatcacttcatcctacacaaaccttacggttatttgagccaatttatttatgaattgaaacgcaagaaaaaactcttgggagaattgcacgatttcccggcaggaacaatggccataggtcgcctcgacgaagattcggaaggcttgcttttgttgaccacggacggcaagatgagcgaaatcgtccgaagtaaaaaagtggacaaggaatattatgttcaagtcgatggaattatcacgcaagaagcggttgataaaatgaaaaaaggtgtcgaaattgggttcaacggcacgaaatacatcaccaaaccttgtgaatctttcataatcaacgaaattccagcttttggcgccagaggaaaaaaaataagggacgaacgccacggccccacttcttgggcgtctatcacggtcaatgaaggaaagtttcgtcaagttcgaaaaatgaccgcagccgttggttttcctaccttgagattggtgcgcgttcgaattggaaacgtacatttgaatgatttgaaagcaggagaagtgattgaagttgatgcttttttttaataaaaaaatagttttagaccatgaatttcattttcgaatgaaggaaagacagaagcaactctagcaattgatcttcgccctttcgggtcaacgtggtttagatgctccatttataaaaaaccaatgatttcattttaaagttttttgtttgtaaatttgcaacctcaattttttgacaacgatttcattgattgagcaattttatgggaaatagaaaaaaagtcgccttttatactcttgggtgcaaattgaatttttcggaaacttcaaccattgccagaagttttcaggacgaaggttttgaccgcgtcgattttgaagaagtggccgatatgtatgtcatcaacacctgttcggtgaccgagaatgccgacaaacaattcaagcaagtcgttcgaaaagcgatgaaactcaacaacaaggctttcgttgccgccattggttgttatgcccaattgaaacccgaagaattggccaatgttgacggagttgacttggttttgggcgccaccgaaaagtttaaaattaccgattacatcaacgatttatcaaaaaatgattttggcgaagtgcattcttgcgaaatcgaggaagccgatttttacgtgggcagttattccattggcgacagaacccgtgctttcctgaaagtgcaggacggttgcgattacaaatgcacctattgcacgattccattggcgagaggaatttcccgcagtgacgaattgcaaaatgtactcaaaaatgccaaagaaatttccgaacaaggaatcaaagaaattgtcttgactggcgtgaatattggtgattacggaaaaggagaattcggcaacaaaaaacacgaacatacttttctggaattggttcaagaattagataaagtggaaggaatcgagcgtttgcgaatttcttctatcgagccgaatttattgaaaaacgaaacgattgaattcgtgtcgaaaagccgaactttcgtgccgcattttcatattccgttgcaatctggaagcaatgatattctcaaattaatgaaacgccgttatcttcgtgagatatatactgaacgggtaaataaaattcgtgaagtgatgccggatgcctgcattggcgtggacgtgattgttggttttccgggtgaaaccgacgaacatttcttggaaacctatcatttcttgaatgatttggatatttcctatttgcacgtttttacctattcagagcgtgacaataccgaagctgccgaaatggaagggattgttcctgccaatgttcgagccaaacgcagtaaaatgttgcgcggattgtcagtaaaaaaacgtcgtgctttttatgaaagccaaattggaaccaacagaaccgtactttttgaagccgaaaataaagaaggctacattcacggttttactgaaaattacgtgagagtgaaaactccttggaatccagaattggccaacactttgcaagaaatcaatttgacaaaaattgacgaagacggaagcgtgagattggaatttctgaatattgaagtataaaaacaatacaatacaatactttttgtcacatcgagcgcagtcgagatgtattaatggttctcgactgcgcttgaaccgacaaaaaagaaaaacaaatcaaggatttgttgaccaaatgctgctgttttttataaaaacgcgtcggttcaattttaattgggcgatgattaattcggccatatcttcggattgcatcactttttctgggtttccgtccgttaggtttagttccttggccatatcagtggcgacggtgcttggcgtgagagccgtcacccgaatattgtgtttgcgaacttcctgcatcaatgaatcagtcaatcctagaacagcaaattttgaagcactatatgcgcttgtcatggcatttccattgagtcccgccgttgatgaaatgttgatgatgtcaccggtttgtctttcgatcatattgggcaaaacggcacgggttacataatacgttcccattacattgacttggataatgcgttcccaagcggctggttccaattccaagaattttccaaaagcggcaattccagcattgttgatcaaaatatcgatggtcttgaattcggacaacgctttttcaatggcagtatttacagaattgatatcggcaacatcggcggtaattgccaatgattttactccaaaagtggttgcttcttttgcaacttcatcaatatcggcttgtgttcttgccaataaaattacgttgactccttctttggccaaagccaaggctacggcttttccaattccttttccagctccggtaatcagggcatttttattttttaaatggctcatttttttactttttgttcaaaaacaaagttaacgcatttgtttaggcttgaagttgtagattgtgtgaaaaaaaagataaatttttcggatggaaataaaaaaaagacctaacaggttttcaaaacctgttaggtctaaaattattatatcttatttcacagtttccaccaaacggacaaattctgctttgtacccttcgtcgtcattggataatccttctttggccagttttttaatgtcttccgttgttttatttggaaccagattagaatctcttaattttaatccgaaccaagccacggcagtactaaatttgaaatcatcagaggaattcttcagaggaatggatttgttttcaatcacttttaccatttcgatgcttttgtctccatctggttttttataacggaattttatcgttgccagttcattggaataattatcttcatttgaattggtttttgtgtatttcaaatcaggtgtgttgttcaaaaattcgctttttacaccagtcggaatcacttcatacaaggctgtaacggtatgattacttcctaattctccagcatcgatggcgtcattggtgaaatcttcgggacgcaattttctgttttcatacccaatcaatcggtaggcttgaacctgttttggattgaattcgatttggattttcacgtctttggcaatggcaaacatcgaacctttgaattctttgcccaagaaacgattggcttcctgaatattgtcgatataagcgtaatttccgttgcctttgtcggctaaagtttccattttgctgtctttgtaattgtccattccataacccaaacaagtcaagaaaacgcctgattttcttttttcttcaatcaaggtttgcatatccgtattggaggatgcgccaacgttaaaatcgccgtcagtagccagaattactcgattgtttcctcctttgacaaagttttcttgggctaatttgtaggctaaattaattcctgctccaccggccgtacttccgccagcgtttagattttccaacgcattgatgatggtttgtttttcgtctcctgtcgtcggaggcaaaaccattcctgcggctccagcataaaccacaatggctactttgtcttttttgcggagttcattgactaaaattttcaaagattgtttcagtaacggcaatttgttggcatcgcccatcgaacccgaaacatcaatcaagaaaaccaagttggaagctggcaagttttccgttggaatatttttgccttgcaagccaatttttaacaatttatgattggaattccaagggcaatcactgtattctgtgttaatcgaaaacggattttgatcttgcggttgcggatatttgtatttgaagaaattcatcatttcttcgactctcacggcatcttttggaactgactgtccattgttgataaagcgtctcacattggtataagaagcattgtccacatcaatggaaaaagtggaaagcggtgctgattttgggctttcgaattgattttccacaaaattgtcatagtcttcctgggaaacttcgatggattttggtggtaatgctatttgttccggttttttgtttttgtccagttttttgagttttcgttctagttcttttttcgaaagattttgataggttccgtttttagtatttatgataatcactccattggatgctcggcttccgtataaagaagttgctgtggcatctttaagcacatttatacttttaacgttttcgggttttaattgcttgaaatcagcagcatttacaggaactccatcaataatatatatagggtcgttcgattgtgaaatggaagcattacctcgaatggaaattgttggcgatagttcaggcgagccttggcttaaaaatccaggattgtttgtgatttgaactcctgcaactcttccttgaagggcttggctaacatttactgatttttgttttgataaatagtcattagaaacagaagtgactgagcctgttaaagctgattttttttgagttgcgtaacccacaacaactacttcattgtagctattattgtcttcttctattgtaacgattttgttatcggatgaagattcagtttttaaatttcttgaggatgtatcagctatgactaaggcaactggtttttctatctgttttttcagaataacttctgcatccgatttgatgatttctgatggttttttagtggagttggtatcttgcttttcttgaataaccacattgttttccttcgttccgtttggtgcgattatttttgattcgggtttaagaaattgataacccaaagaaaagaacaataggagtgaagcggcaacggccaattttttccaaagtgcaatggcttttttgtcttcttttttgtcgagtttttcttctacacgcatccatactttttcgaatgccggaaagtctttttcttctgctttttgggcagcattctttattttattgaatattttatcttgattgtccatgactatttcgctttttggtaatacaaattatttactaattcttttagcttggttttcgaagcattcaattgtgatttggatgtgccttcggaaatgttgagcataattgcaatttctttgtggccatagccttcgataacgaaaagattaaaaatagttttgcaaccttcgggaatgtgattgagcaaattcagtaaatcttcctcttcgagttccgttacttcatctgtaaagggttgcgaaagggttttgacatcatcgagatacaaattgaaattggtatttttcttgatggtcgccaaacaatgattgaccgtaatttttcgggaccaagcttcaaaagcttcaaactctttgagttggtcgagttttgtaaaaatagtgtagaaagcatcggccaaggcttcttctatttcttcttccttctttaggtagcgcttgcaagtgcggtacaattttggagccataagctcatacacttgacgctgggcatcgcggtgcatttttttgcaatcagaaattaagttttcgtttatcacaattgttgtctttctactaaagagggttgaaaagagaaaaaggttgggaggaggttaaaaaaaaattaaccgcagattcgcagattattttcttaccacattaaaaatctgtgtaaatcagtgaaatcagtggcaaaaaaactggatatttattaattctagtcataagattattgtaatggaatcgacaatttgtaaatattggtttccaaaaggtctgaatcattgtcttcgcaaatcagaaattggatttcggtttcggttttattgtaaagcgacaatccttcgaatttatggttgtcggagattttttgggtgaattcaatttcgaatgtttggctgttcattcgtccaatgagacttcccaatatttcgccatcatcgtaagtggaagtcgtgtcttcggccgtggccaaaaagtaaattttgtcatcaaccaaaatagcatcggtaaacgaagtttccacatgtttgatttttggcaatggtactttgataaactcgatttgattttctgtttcaagtgatttagttttgaaaatcccatttttggagttggctccgtttcctcgttgaaacaaatgccaattttcgttgcaaaataaagcaccttcaatatttaactcatcatcagcaatcgaagtggtttcttttaggtttttgtacaatttcgacaactctttttcttctgtttttttggaatcaagattgtaaattatccttttttctcttttggaagtggaaccggaacccaaaagatggagtttatttcctttcagggcaatagattcaaaatcgaatttgtcttttttgggaatgttttcttggccgttttcgaagagttttattctcgaaagttctttttcctgaattttgtattcgtatagaaaggaactgttgtcggaaataatgaacaaggaattgtctttgtggacgagtcctgatgcagaaccaagaccgatgatttcaaataaaagttggagtgcaaagtttggcataaaaaagctgttgacagttgtttcgtgagggtttggtgcgccattcgaaattagtaaaatcaatcgaatttgtgatgtgttttaccatatctttgccaactaaaaaaaaacaaagtgaatttttctcgatataccaaagagttctcctataat

SEQ ID NO: 2638 - DNA, 23453 bp, synthetic construct
  source 1..23453: mol_type = other DNA
  misc_feature 1..23453: note = Synthetic
ggaacagtaaatgcaacaggcaattacaccaatattgccgaagttaccgccagtagcttaccggatccggatagtacaccaaataatggtgacataaccgaagacgattacggaagcgtaattgttacgccaaccaatttagctgccgatttatcgttgaccaaaacaattgtaggtggaaatacaacaccactggttggttcagaagtttcttttgatataattgtgaccaatagtggccctcaggatgcaacgggtgttcaggttacggatctgcttccatcaggatttacgtatacacgttcgagtatttctaccggaacttatgatgcgataacaggaatctggaatgtcggaggattaatcaacggaaaatcagagaccttaaccatcagcggaacagtaaatgcaactggcaattacaccaacattgccgaagttaccgccagtagcttaccggatcctgacagtacaccaaataatggtgacataaccgaagacgattacggaagcgtaactgtaacaccaactaatttagctgccgatttatcgttaaccaaaacaattgtaggtggaaataccacaccactggtaggttcagaagtttcttttgatataattgtgaccaatagtggccctcaggatgcaacaggtgttcaggttaccgatctgcttccatcaggatttacgtatacgcgttcgagtatttctaccggaacttatgatgccatcaccggaatctggaatgtcggaggattaatcaacggcaaatcagagaccttaaccataagcggaacagtaaatgcaactggcaattataccaatattgccgaagttaccgccagtagcttaccggatccggacagtacaccaaataatggcgtaacgaccgaagacgattacggaagcgtaactgtaacgccaactaatttagctgccgatttatctttaaccaaaacaattgttggaggaaatacaacaccattagttggttcgcaaatttcgtttgaaataattgtgaccaatagtggccctcaggacgcaaccggagttcaggttaccgatttgcttccaacaggctatacttttactattgctactccttcagcaggtacctataatgcaggtacaggaatttggaatgttggaggactaccaaatggacaatcacaaacgttggttgtaacagctactgtaaacgcaactggcgattataccaatattgctgaagttaccgccagcagcttaccggatccagatagtacaccaaataatggcgtaacgaccgaagacgattacggaagcgtaattgtaacaccaacaaatttagctgccgatttatcgttaaccaaaacaattgtaggtggaaatacaacaccactggtaggctcagaagtttcttttgatataattgtgaccaatagtggtcctcaggatgcaacaggtgttcaggttaccgatctgcttccatcaggatttacgtatatacgttcaagtatttctaccggaacttacgatgcgataacaggaatttggaatgtcggaggattaatcaacggcaaatcagagaccttaaccataagcggaacagtaaatgcaacaggcaattacaccaatattgccgaagttaccgccagtagcttaccggatccggatagtacaccaaataatggtgacataaccgaagacgattacggaagcgtaattgttacgccaaccaatttagctgccgacttatcgttgactaaaacaattgtgggtggtaatacgacaccactagtgggctcagaagtttcttttgatataattgtgaccaatagtggccctcaggatgcaacaggcgttcaggttacggatcaacttccatcaggatttacgtatacacgttcgagtatttctaccggaacgtatgatgcgataacaggaatctggaatgttggaggattaatcaacggcaaatcagaaactttaacgataagtggaacagtaaatgcaacaggcaattacaccaatattgcagaagttaccgccagcagcttaccggatccagatagtacaccaaataatggcgtaacgaccgaagacgattacggaagcgtaactgtaataccaactaatttagctgccgatttatcgttgactaaaacaattgtgggaggtaatacgacaccactagtgggctcagaagtttcttttgatataattgtaactaatagtggccctcaggatgcgacgggtgttcaggttaccgatctgcttccatcaggatttacgtatacacgttcaagtatttctaccggaacttacgatgcaataacaggaatctggaatgttggaggattaatcaacggaaaatcagagaccttaaccataagcggaacagtaaatgcaacaggcaattacaccaatattgccgaagttaccgccagtagtttaccggatccggatagtacaccaaataatggagtaacgaccgaagacgattacggaagcgtaactgtaacaccaacaaatttagctgccgatttatctttaaccaaaaccattgtaggtggaaatactacaccactggtaggctcagaagtttcttttgatataattgtaaccaatagtggccctcaggatgcgacaggtgttcaggttacggatctgcttccatcaggatttacgtatacgcgttcgagtatttctaccggaacttatgatgcgataacaggaatctggaatgttggaggattagtgaacggcaaatccgaaactttaacgataagcggaacagtaaatgcaacaggcaattacaccaatattgccgaagttaccgccagtagtttgccggatccggacagtaccccaaataatggagtaacgaccgaagacgattacggaagcgtaattgtcacaccaactagtttgtccgctgatttagcattgaccaaaacaatagtgggaggtaatactagtccgtcatattttacgtcggtaacgtttcagattacagtaaacaataaagggccgcaagatgccggaaaagtacaagttatagataagttgccaagtggttatacttatgttgtatttagttctacttccggtgtttataacgaagtaaccggaatctgggatgttggagcgattgccagtggagcttcggaaactttgttgatcactgcaatcgtaaatactacaggagattaccgcaatacggctgaggtattttcttcagatttaccggatccaaatagtacaccaaacaatggtgttgtaacagaagacgatataagttctgtaattctgacaccagttaatactattgccgatttgtcaattgaaaaactggtagtcgatgacatgttaactcctttggtaggatcacagattacattccaaattacattgatgaattcagggccaaacattgctacgggtgttgaagtaaaagaccttcttcctcccggttatacctttgttttctacaatgcgagttcgggttcttacaatagactaacaggtatttggaacccaggaattgtacttccaaacagtagtcaaaccttgttaataaatgtattggttaatgctccaactggtgcagctaatgaatacttaaacattacagaagtaacggcagcagatgattttgatccagacagtacaccaaataatggtatcaccacagaagatgattacgatagtatttcggtaacgccaattattgttatggcagatttgtctgttgaaaaaacaattattggaaatcaaaaaccaaatgtgggtgatattgttacttttcaagttagggttagaaatgacggaccaggaaatgcaacaggtgttgaggtcaaagatttgcttccttcaggatttgcttatatgatgcatagtgctaccagcggaacgtacacttttgcagatggcagatggaatattgggctaattctcaataataccgaacagatcctgttgattaacgctaccgtaaaaccggcaacaggagccgcaaacgaatatttaaacgtcgccgaagtgacggcaagcggattacctgatcctgacagtacaccaaacaatggcatcaccacagaagacgattatgatagtattctggtagatgtacaaatggcaaacctgagtctggaaaaatcggttagtaatgtaaaagccaatgtcggtgaggttgttacttttaccattcaggttaataatgcaggtcccgtagtggcgaccggtgttgccatagaggatttactgccaattggatatacgaatataactaatataaccggtggaggtatttacagtggttttagaatcacttggtctaatttgcagattccgcttagtggaacaaccttaacgtttcaggcaacggttgaaacaccaaatggtttaaaagattcggattatgtcaatacggcacaggttacagccagtgatcaatttgacccaaacagtactcctgataatgacgatggcgatcaaagtgaagacgatgaagacaatgccgctatcgaaacaccaaaaacggatatcgcgattataaaaactgtggatgcgatcgatccttcaattgacgcgttgatcaactttaccattacagctgataatatcggaagtttaaaagccacaaatgtagaagtacaggatattttacctaccggttaccaatttgtatcggcagcgacaagttcagggacttttgattcaaaaacaggaatatggaaaatacctgctgttgacgttaattcggttcagactttaaccttaaaagtaaaagtacttgatgttaaggactatacaaacactgcaaaattgattgctttagatcagatcgatactaatgcttccaataatcaaagcagtgctacaatagaacctgtttgcttaaaagtccacaatgagttctctcctaatgatgatggtgttaacgatgtattctatatagattgtattgccaactatcctaaaaatgtactcgaaatttataaccgatgggggaatctgatttatacacagcagggttataaaaacacctgggacggaacggctgacggatcttcaaaattattaccggtcggaacctatttctatattctggatctgggagacggaacgcctaaaacatcaggctggttgtatttaaaacgataagtagaaagtaaacggaatagtaaattgctaataacattgaacaatggtcagaagatataaccaaattatcgctatactaatgctgcttatcgcaaactttatgtatgggcagcaagatccgcaatacacacaatatatgtacaatacattgagtgtcaattctgcttatgcaggatctgcggggcatttgacaattacaggaatatacagaacacaatgggttggattggaaggcgccccaaacacgcaatctttcacattggattcccctgttggaaaaaatgtcggactgggattgtcaatcgtaaatgatgaaattggcccgtcggaagaacaatatgtagatttgaatttctcttattccataaaagcttcagatacgtacaaactttcttttggagtaaaaggaggaggaagagtactgaatattgactggtcaaaaggaagttttaaagataatgatgtccaatttcaacaaaacattcagaataagtttttgcccgttgttggagccgggatttatctgcatagcgaaaaaagctatttgggtttatcagtccctaattttttaacagatgagcgttatgatgatgttcaggaaggtttagcggatgaacggatgcatttgtttttaataggaggatgggtttttgatcttagtccaagtgtcaagtttaaaccggcttttctaacgaagtatgtttccggcgcaccggtcattgtagatttatcagccaattttatgtttaatgataaatttagactaggtgcttcttaccgcaccggagattcgtttagtgcgttggcaggtttccagataacacctcagctattagttggttatacctatgattatacgacaaccgaacttcagaaattttcatcgggaagtcatgagataatgttgcgctttgagttaaaatcaaaagagaaaggactaaaatcgcctagatttttttaaactaaagagttatgaaaaaaataattacgctaatcggattatttatagtaatggccggcttttcgcagaccaaaaacaaaactgctgatgctctttttgataaaatgtggtatctcgaggcagctaaggcttatgagtatgccatacaaaaaggagatcgttctatggaaaccttacagagagccggagattcgtattattttaatacagatatgaagcaggcaaatgaaaaataccaactgctgattgcagaatatccaaatgaagtttcagctgagtatatttttcgttatgcccaaactttagaaggaattcaaaactacgatttagccaaaaagtggttgaaaaattttagcaaaaaagcagaggttacagatgccagaaagcaaaatttttcactgaaagaaaacacaatcgaaaaaattatgagcatcgaacctcagtttacacttcaaaatttatcgattaattcttcgtactcagattttggccctatgttttataaaggtcagcttatttatgctacttctatagattcttcttacgctgccacaagaagatatgcctggaacgatcagccgtttttgagtcttcaattgggaaaaattagtccttcacaatctgatgtgacccgtatcagaagattttcaaatgcacttcatagccagtatcatgaagcctgtgtttctttctcgccagatgaaaataccatttatttcacccgaaataattacaacggaaaactgagaagagatggaaaaggaaccaataatctaaaattgtattcggctactgccataacaaaagacgataaaacgagttgggaaaacatacgggaagttcctttcaacagtgacgaatattcagttggacaaccgagtgtaagcaaagatggaaaaaaactctactttatttcagatatgcccggttccattggttctacagatatttttgtggtcgatattttaggagataataaattttcacagcccaaaaatgtaggggataaaatcaatacaatgggaagagaaatgtttccgtttattacagataaaactttgtattttgccagtgacggacatttaggtttaggcggacttgatgtttttgaaagccctgtaaaagacggactttttgaaagccccgttaatcttggagccccattaaacagcaatttagatgattttgcttatatcgttaacgaagaaacaaatttaggctttgtgtcttccaacagaaaatccggaaaaggcgatgacgatatctattctttcgaaagaatacctgtttgcaaacaacagattaaaggttttgtttttaatgaaattacaggcggaaaaatagtcaacgcaaaggtgactttgtacgcagctgatggtgcaaaactggaggaagcaacatcaaatgaattaggggagtatcgatttaatactcctgttgcttgtagcaccagctacaaagtggaagcatttaaacaaggatttactccgcttgtacttccggttctaacacaaggtacttcaggagaaacagtagtagacttaggtataaaatcaccactgattgtaaaagaagatggtattttaaaaataaaaatcggcattattttctttgatttagacaaatccaatattagaaatgacgctgctattgagttaaataaagtggttttattgatgaatgaatatccggatatggtaatcaaaatagaatcccacaccgattcgagagccagagataattacaatcttgtgctttcagataaaagagcaaaatcgtcaagagactatataatctcgcaaggaatagtcgcagaacgaatacaaagtgctattggttatggcgaaacaaaactaatcaataactgtaaaaatggcgttccttgtaccgaagaacaacatcaactcaacagacgatctgagtttattattattaaaatgtagggaggagaaagcgattaattaaaaaattaaacccgacaggttttaaaacctgtcgggtttagtttcaaaggaagatttgaaaagaatatattttatggctcagcaaattttggaatgaatcaggtggatataataacaatacacagataaaaaatacctgtgtattgttgtaaaaataattcggaaacagacgcttttaaattattatttaatgctaaccactttttgtggaatttctctcacctcaacacttccgccaaattcaagaataggacaggcctttgataattcgatagcagtttccatattctcagaacgaatgaataaattgctgactactttgaggccctcagagataatatatccttttacaattttcttgtcgggaccggaaacaatatagccctctcccgggaagggaaaacttataatgtagatgttgttttctttccactgattaagcaatgcgtcccattttggacccactgtttttgcttgttcagtagtatacgtaacaggaacacgaatcaataagctatactctttcattttgttgttgttagattgtgggacattaatttttgactgggcataagtttgacttgatgcaaatacagtaaaagcgataaatactagtaaacgtgatttcatttgttgtttattttagatacaaatgtccgcttatcagtaacttaatccttgtaaaaaatcattgatttaccaatacaattctgatttaaagaagtcagttggtgtttgccctgtaaaaagtttaaagtctttgttgaaatgtgcctgatcgtaaaatccattttcaaatgccatatcaaggaaagaggcagactcagtatttttggaaataatagcgttcatttttacaatcgaagagaattgttttggactagcacctactgcttttctaaaccgtttttcaaaagcatcctgactaataaatagcgattctgcaagtttgtttattctcatggttccattgtttgtatgaatggtagtgatggcattttgtaccagaaaatcaggtttaatgttctggagttttaaagagaagtactgttcaataacagcgattttagtggtattatttttagccagagctaaacgttcttccacaattgaaatttccaatggagcgaaaaaatggtctaatgaaacgctttcctcaaataattcatgcagaggttgtttaaaaaacgcagaagctcccgtttcctgaaagaggacaatcaaggaagctgtttttggtgcgtagttaatgtttcgtaccgtttttcgaagacccgagaaaagagtaggagataaggctattttatccatttcgttgttgtagaaagtttgccccgacaaacgaaatgcaattgcaaatgaggtattgggtataacacgattaaccaattcgtcattactttctataatcttgtaagatttaatgaaaggtcttaataattcggatggtagatattcctcaattttcattttagattattttcaaacggttgcaatttttagagtttctcttgcgaatattgaaagtactttttatccggcttttaagaggggtttctgctaaacgaatataagaaataaaacgataagtgaaacaggtgtaaaagatgtaatgaattggtttttagtgtgatttttggctactggtagtagggtctttatatgctgatttacctcctctattgctaatcaacaactgtaaaaatggtgttccttgtaccgaagaacaacatcaacttaacaggtgatctgagtttattattattaagatgtagggaaggagaaagcgattaatttctaaaatgaaaaagtcccaccgaagcaggactaaagattttcatctacggcatatagccttattgtgataagattaaagattagaaattttaatcagttgtaaagatatatcaaaaataactgcaatgcaatgaggaaagccataaaacagggatttaatttttgcctatatttaacgattgtaaagaaaaatcagattattatggcaaaaatattaggtttggatctgggaacaaattcgattggatgggcgcttatagatgacagattaaataagattttaggaattggaagcagaatttttcctatgggtgttgaaaatttaggagatggtgataatgaaatttctaaaaatgcaagcaggaccggagcgagagggataaggagacaattttttagaagaagactaaggaagaagattttattaaaagcactttccgagaataagatgtgcccgctgaatatagatgattttgaaagatggaagaaaacgaaaaactttccttcagaagtattagcagaatggtttgctttaaatccgtatgaattacgaaataaagcattgaatgaaaaattatcattggaagaaataggaagattattttatcatttaattcaacgcaggggttttttaagtaacagtaggaaagcggggagtaccgacggagccatttttagcggaaatgccaaagaagggaaaataggaattaccgaaacacagcataaaatagaaaacaagacattaggttcttatttatatgaaatttatcccaaacaaaatcaaccttttcaggagggattggaaaggataagaaatcgatatacaacccgcaaaatgtatgtggatgaatttgaaatgatttgggaaaaacaaatgcaatttcactccggtttaaatgaagatctgaaacaggtttttggtgggaggaaattagatggctacaaagaagatggtattttgttttatcaacgccctttgaagtctcagaaacatcttgtgggaaattgttcttttgaaccatcaaaaactaagtgccctgtaagtgcaattccgtttgaattgttcagagtttggcaatgggtaaatacgattgaatataacggaagtaaaatttcacaaggagaaaagcaaaagatagttgattttttatgtgccaatgaaaaaccggatttcaaaaaaataaggaaagttattgggaaagaaagtgcagcatttaaatttaattataaagatgatgataaaattgtaggtgcctataccatttctaatttgtccaataaaaaatatttcggtgccaaatggttttccttttcagagaaagaacaggaagacatttggcatgttttgtatttttttgacagtaaatcgaatttaaaggagtatgccattaaaaactggaattttacagcggaacaagcagaatctatttctaagtttaatgtaaaggaagggtatgcaagtttaagcagaaaagcgataagtatgatccttccatttcttcaaatgggatttacttatgatgttgctgtagtttttggaggtattagaaatgcttttggttctgattgggagaaattgtctgatgcgaaaaggaactttttactggataatatcgaaggaattgttcgttcaggagcaaaaggtggatttatcgaaattatcaaggatattctaagaaatgattatactctttcagataaccggatgagaaaattgtatcatcattcggcagcgattggcgttaaagagctcttgacaaaattaccggttggtaaagaagcagacaggcaaattcaaaccataaaaaatcctattgtaataacagctttatttgaattaaggaaattagttaatgagcttattgaagagcatggtaaccttgatgagataaaagttgaaatggctcgtgatttaaaactatctaaatcgcaaagaaataaaattcgcagagatcaaaaacgtctggagagggagaatgatcgcgtgaagaacagattaacagaagaaggaatcagaattactcatgatactcttttgctttataaattgtgggaagaatgtagaaaaacatgtccatataccggaaagccgatttccctatcgcagttgtattcaggagaagttcaaatagaacatattcatccctggagtcgctctttaaatgatagttttgccaataaaaccctttgttatgccaatgagaacagaagaaaaggagacaaaacaccatatgaattttatggtattgatgaaactcattggtcaggtattaaagaaagagctttgaaattgttttcagataccaaagaatatccaaatgcttatcaaaaattcaaaagatttgtacaacaaaaatttgatgatgatttttcaacacgtcagttaaatgatacgcgatatataagtaaggaagctaaagattatctagcattagtttgcagaaaagttaacgtatcaccgggccagatgacctctaatttgcgtcagaagtggggtttgaatcacctattaaatacggagaataatgcaaaatcacgtgaggatcatcgtcaccatgctattgacgcattggttatggcttgtgggaaaacgagttatttgcaagaattgtcaaaatggaacagatacgatcggaaacccgaattaaaaagatttccattgccttgggaaggatttaattttgatgcagaaaaagctgttgaaaaaatattaatttctcataaaaaagtttccaatgatattacgatccggacacataaaacggagaaaaatggagttgtttatcaaaatgttggtgtagctgcgcgagggcaattgcacaaagaaaccgtttttggtaaaagaaattttaatggagaagaagcttttcatgttcgaaaacctatagagagtttaactactttaaaacaaattgaaaaagtcgtggatgccagtacaagaaatctaattttaaaaaggattcaggaattaggaggttttgtaaaagataaagtccctgctaatgctttttttattgttaatgaaaatggagtaaggcaacctcagatctatttaccaaacaaaaatggcgcaccggttcccattttaaaagtaagaatgaaagaaaatatcagtggagcagaaaagttaaaagacaatataaatcagtgggtaaatccaagaaacaaccatcatgtattgatctacaaagatcaaaaaggaaatctgaaagaagaggttgttactttttggactgtggttgaaagaaagagaacaggagaaccggtttataaagtgccaatagaaggaaaggaaatagtaactgctttgcacattaacgatatgtttctattaggactaaatgaagaggagatcaattgggaaaatccaaattatgaagttttgaaggaacatttgtatagagttcaaaaattatcttcaggtgattatttttacagaaaacatttgtcttctaccgtgacagatgataattataagcaaattagggggtttggtagcggaaaaacgggttggtttaatttttctccggtaaaagtgagaatttcagttttggggaaaattcaaaaagcagtgaatatttaatttcttgaccatgaatagtacattgttgaaatagttatgaatcgtattagaacaaaaaaagaaaaagccaagcgtttttcttgcacctttttaggaagtatattaaagttgtaatttaaatccagattagaaaacacgatatcttatttgaaatctaaataaggttttaatcgttgtagtttgattaaagattagaaaacacgatatttaaattgagtaaatccgtttcgatacgattgctatagtttgattaaagaagagagaacacaatattaaaaccgattttatgacgcatttaaagatgattatagtttgattaaagattagaaaacatgatatttctgtataaaaaatggaattcaagtaatgtgttgtagtttgattaaagattagaaaacacgatattcgtggcagaaaatagcgcaaaccaaaagtgttgtagtttgattaaagattagaaaacacgatattgaatggttcaggattatttttaattctttagttgtagtttgattaaagattagaaaacacgatattttatcacaatacactgggtttgactgtggtgttgtagtttgattaaagattagaaaacacgatattttttgctgagcaggacgctctatttaaccagttgtagtttgattaaagattagaaaaaacgatatttcacaaatgccaacaataacagagacacagttgtagtttgattaaagattagaaaaaacgatattatatttacccgacgaccgattaaatattccgttgtagtttgattaaagattagaaaaaacgatattttttttatcctgaaggatgcgccaattattgttgtagtttgattaaagattagaaaaaacgatattagcacaaggaactggcgtaagcggaggatgttgtagtttgattaaagattagaaaaaacgatattcaattccaagaagaggagacatattcacacgttgtagtttgattaaagattagaaaaaacgatattaagaaaagtcgaactgcttatgtaactgcgttgtagtttgattaaagattagaaaaaacgatatttggatattgtgaaagcatcagtctacttttgttgtagtttgattaaagattagaaaaaacgatattaaacaaaagcagtatgagcaacgcgcaagtgttgtagtttgattaaagattagaaaaaacgatattttaaacaaatcagaactgagaaatgaaatcgttgtagtttgattaaagattagaaaaaacgatattttgttggtgttcagtagcaggacgtgaaaagttgtagtttgattaaagattagaaaaaacgatattaggagaggggatatgttgaatcccctctatgttgtagtttgattaaagattagaaaaaacgatattcctgcgtaaggcgttactgttgctttcatagttgtagtttgattaaagattagaaaaaacgatatttgtgggtcaaaaattaaagattctttcatagttgtagtttgattaaagattagaaaaaacgatattagttgttttgctaagtgttgatttttagtgttttatctagtaatgtcgcttgagaaaatgcttcttttttgccttgataaagtaagattgaagcattttttagttttaaaataattctaattgggtaggctgtgatattttagggatttctgcttttccccaaaaattctgaatattgccaaattgtttgtcggttattcgaagcacacttactttacctaaagggggtaataacttgtgaattcttttctcatgtacatcggcactttcgctgctggcacaatgacgcatatagacagagtattgcatcatcgaaaatccatctttgagcaaattatttctgaatccggaggcatttcgtctgtctttttttgtctcggtgggtaaatcaaaaaaaacaaatagccacattattcggtatccgttaagctccataatgcaggatatttaattttttttcgagttcctgtaaaacactgctggagcgaacttgctgttttttgcaatgcaatgagtaatgggcttttttcgtctttgaaatagactgtcctggtcagtatttgtaataattcggctttgatgactgtattcaattcctgttcgtcaaaatgttgcataatttcaaagactttttcatctacaatagggcgaaacggttccataatgtcatctgcaagtgcaaaggcattgtacttgcttttatggtgaattcctaaagtattcaataaaccacttccggaaagcgctctggcagttgccgctcttaaaatggcatagccgtaattcagaaaattattcggataatcgccgtaacgttctcttttgatgccgtttgtttctaaattcggatttgggaaatatttccagtattactgtgctgcaactccttccatattagaggaatctccgcttaatactttacctgctaaaaatgcaaagctgtttttagagcgagttattcttgccagtaattgtccctgatttttaattttttcaattatagtttgttgccataattgtttttttaatggcatagaagcctcgatttgatttttaaatatttcctgttgaatatgatgactgttgaggttgagtaacattccgtttggaagatgattttttccgcatatgataacagatgtgttattttcaacgagtaaattcatagcgggaatgcttatgtaaatttcattatgatccaaaacaagaaaaccaatgtcttctatcgggacagtactttcttttgtttctgattttaatactaattgttggtttttggtagtgacagaaagtttattttctattaaaatggttctctttagcatagatttaagttcaaattattggaaaatgctggtaataagtataaagttccgattttgttgaatgttacttttacggttttccttaatatgaaaaattcggtgcttaagaaaatttagtttcttacgtagccttcgacttcgctcagggtgacagtagggagggaatatgacttggtataataatccatcaagtttatcgactcacaccttggaatttgtccttcgacttcgctcaggatgacactgctcttcgctcagagtgacagtagtggagaatatcactcggtataataatccatcaggtttatcggctcacccatttggaatttaaaaaattggaatttaatagatactgcggcttaataaaaaaaagagactatctcgtaattgaaatagtctctttaataagtatattgctttttttacttgatctccgttatgaattcgttctgaggggttctcacttttttcatatttaccaaccagtcgttagcttcatctctgtagccaagtgttaatattatagcacttttaagaccaagttcgtttagccccaaaagtttatctacttcagcaggaagaaaaccttccattggtgttgcatctactttttgttccgctgccgctgcaattgcgataccaaatgaaatataagcttgtcttgccgcgtggttcgcgtgccattcctgacccaatggttcgtacattccccaaagtgtgtttttgtaatcgtccatggtatcggcaggcaatcctctttcagcaagggttctgtcaaatactgctgagattttttctaaagaataaccatcccaggctgcaaaaaccaatacatgagaagcatctgtaatctgactttggtcgaaagctacagctcttaatttttcttttacttctttatttgtaattacaaaaatctgatacggttgtatacccgatgatgaaggtgctaatttagcggcttccagaatgtaatcgattttttcttgtgggacaacttgtccgttcatttttttagtagcataacgccactcgagtgcttttattaagtccatgttcttgatgttaaatttaaattctattcaaatgtaaagactttaagtgtatttttgtcatctgattaccaaaagtaactgtaacattgaggtaactaactgacattttatgataaaagagcccgaacacgatcaacaaaaatgcagccaacacattatggccgtgcatgatgccatgtatgttctgaatggaagatggaaaatttcgataattgcatccttatgttttaatactatgcgattcacagatctggtaagagaagtggaagggatttcaggtaagatgttaagcagggaactaaaaaatctggaagagaaccaattagtaacccgaacagttctcaacaccaaaccgatcactgtagaatataaactgacagactatggacatactttaaaagaagtgatagattctttagcaaagtgggggcataatcacagaaagaaaattacagggaaagaataatattaactgtttaattcagatgccctttgaaaaaaactctgacgggctaatttctgttccgtttcctcaattgctttcaggagattattttgattgtcggtaatttcggttagcgtagttctgataatgtcccaaaccggttgcatttttgcaacaagctcttttccttttgttgtaagtacaattaagcgtttgcgttcgtcgagtttgtcttttttggaactgataattttttgtttttccaattctttaagcaaacttatagtagacggatgggtatagccaatttcatttgcaatttcgaccacacttaggatttccttgatatgcaacgtatagattacaggaaaccattttggctcaaaatcaatatcgtaagatttatacaccagggcaccctcttttcgtaattgctcactaagtcgttgtaatcgtgttgatagggccagaataccaatttcgtctattatattcattttgtcggatttagttgtaaatgacagaacacattatcagcgctcattaacggaaaatcgtgcggaagagcttctttttgtattctcacaaaattatttctttcgtaaaagcgcaatgctgcctgcaggatagaaaccgtccccaaatataggttacttaatccgttttccttgctgtatgcaatcagttgttctaatagttgctgggcaatattatattctttgcctctgtactcttttaaaacaaacatttttctgatggcagcggtcttttcattaaattttaccagcgcaatagtgccaaccagtttttcgtcaataaaagcaccaagaaaacaaccgcccgattcgtaataaaaattcttaatgtttaataaatccggctgatcttctaaagtaatggcaacattaaattcgttttgctgaatatttaaaatcaaatttataatctgtttttcgtattcattttggataggtttgatctgcatttttataagatttaaatatgtgtacaaaactacgtagttaaatacatatatccaaataaaaaaatattgatttcgataatctcgcaaagtcgccaagccgcaaagtttttttattgatttttttaactttgtgattttgagactttgcgagagatactgtcaaaaacgatagtgagccgtaactttcaagaattgagcccaacagattttagatttcgtagaaaaacagttatcgcctttctaaatagttgctttattttccgattttgtagattgaagcattagaaccgtctgtaacggcatataaagcaccgtcttttccttctaacacatctctaaatcgacttttataggtcgtaagtaaacgctcttcaccaactacagcattgtctttaattactaatcttgcgacatgctgaccgcttagagccgcaacaaacaaattgttagtccattcactaatctgattcccggagtaaaaagtaatgccacttggagaaattacaggatcccagtaataaaccggctgttccataccgctttttgttgtaatgcctgcaccaatagcagcaccactatattcaagtccataactaattgttggccagccgtagtttttgcttgctgtaattttattgatttcatcacctcccagcggacctaattcagcttcccaaagatcacctgtaaccgggtgaatggccagaccttgtacatttcgatgtccataagagtaaatttcaggtaaaacaccagtttggccgataaaaggattaccggctgcagccgctccgtttttggtaatgcggactattttgcccagtgcagcatccagtttctgagccaaaggtctggactgtatgtcagagcgttccccggtacttacaaaaagatttccttgtttgtcccaagcaagacgggaaccataatgtagtgtactgttaaactccggaatcgctttgtagattactatagcattttcaattttggtttcattggcagaaagttttccttttgctacagaagttgtggtaccatttgttccggtctgtgcaaaactccaatataccattctgttagtggcaaagtcaggatcgactgcaacgtctagcaaacctccctgtccgctactgtttacggttggaattccggtaatagctccacctacaactcctgcctgagttacaattcgcatggttccgtttttttgtgtaaccaaaattcttccgtcgggtaaattttccattccccaaggatttgtcagaccggttgcaaaaactttaacggtataggctgtttgggtcttcacacctccaattctggtttgtcctttaaaggcgggtttgtatttcgaatttggcggattcgtttctacgggtggtaaagtggctgtagattcttcttcttcagcaggggcatttggtttatcattgttacaggacaattgtaaaaaggccataaataagaccgggaaatacaaaaagactgattgactttttaggaaatattttttcataacgtaatttttttatggttaaaatagggttcactaaatataacaacttttgaaataattttattgtttagagaattatataattgccatgtattgaaaaagaacgagttacaggttttgttttcttgttttttggttccgatgaaaataatctgagcaaatctgcgtgagaaagctttagacgaacacaggagatataaataaaagttgatttttttttttgaagagcatttctttttttttgggtataaaattaaatgcaacaaaatttattctaaaacagatttttgtaacatttttgatctcctatatgaaggcctaaactatatctttgatcaccacgtcgcaagaaaaaaagagtataaaaaaataattatgatagttttaggagacaaagaatattataaaggcattggtcagattaagtatgaaggaaaggattctgataatccgctggctttcagatattataatccggagcaaattgttgctggtaaaacgatgcgcgagcattttaagtttgccgtttcgtattggcatagctttggcggtaacggatcggatctatttggacaaggcactcaaaattttgcatggaacgagacaagagagccgattaaagctgcaaaaatcagagcagatgcggcttttgaatttataagcaagatgggttttgattatttttgttttcacgacttcgatctggtgcaggaaggagaaaacttcggacaatctgaagtacgtttggctacgatgacttcttatttgaatgaaaaaaaagcaggtacggaaattaaggtgctttgggggactgcaaattgtttttcgaatgcccgttatatgaatggagcagctaccaatcctgattttaaggtagtagccagagccgcagcacaggtaaaattagcaatggatgcaactattgctttaggtggtgaaaactacgtcttttggggtggaagagaaggctatatgacactactgaacaccgatatgaaacgcgagttagatcatatgggacaatttctgattcaggcacgggactatgcaagaagacaaggattcaaaggaaattttttactcgaaccaaagccaatggaaccatccaaacaccaatatgattttgattgtgctactacgattggttttttacgtcaatatggtttggagaaagattttaaagtaaatatagaagtaaatcatgccacaatggctcagcatacttttcaacacgaacttgaagtagcggcacaatccggaatgctgggaggtattgatgccaacagaggcgattaccaaaacggttgggatacggctcagtttccaaataatatacaggaggtgacagaggcgatgttggtttttcttaaagcaggtggtcttcagggtggcggagtaaattttgatgccaaaataagaagaaattccaccgatatggaagatattttcttggcacatattggtggtgcagatactttcgcaagagctttactgacagcggataagattattacttcttctccttatgagagtctaagaaagcaacgttacagctcttttgatgatggaaagggaaaagaatttgaagaaggaaaattaaattttacagatttatacaatattgccagagacaacgacccaatagaattgcaaagtgggaaacaagaactttttgagaatattattaataggtatatataaactgaatttttgcaggaaaagatagacggctattgggatacatctttttgtggtgcagtaattccgttttttattaaataagataaaataatttatcaagcttcagagaagcgacatatttatagcaaatagattatagcagtgaaaagctatcctgccgctttacatcaataaaccgttacgctgtcgagattggtagatttaatttaattcgttgggtgtaatttataaaaatgctacatagaaacatagattttgcgaataacaaaggggcaaaaaggaatacatttttatcatatagtcaaactacgagattttcgatttcgcttagactgacaattgaaattttaaataaatgaaacactttttttcgttttcaaaagactatatctcgatgttggaaaataattacacccaatgagctactttatgcaatcggataactttataaatgtaaggcggacgggaatagcagtttaatggttattttttgcgcattcttttcatataatctttttttgcagcaggatacttagcaaaagagagggcaaaactaaaatcgccaaacttagaattgtttacactgtctcttgggtaaggcgctatggtgctaaaaacatggcaggtatagcatgtccttgtcgtttggatgtaggtttccattgtagcattagcaacattactgacaccgctaagcattgaggaaatattgatattccttggtgccgggattgggacagtcggatccggttggaaactttgtgaccaaataacatctaccagtttgtagtattgccaaaccgaattaggataaaactttcgaatgtttctttgcatcacttcattaataggagcagcatcttttttatctatactgtttatgcgcaccgtttgtatcggtaccggagctgcctgttcgagatagtaaggaggtggtctgttgggatcgcaaggtacgactacggtagaatcaccggtacgggtccgaattacgactttccgatctttacagtcagggttgtagaaattgtatccataaggagagggtggcggactgtttaagtgatctctgtcaggtgcattgtctatctgttcaaatgtggcccatacccatgtaggctgattttgtgttttgtgcagtatatgcaagcctacaagtgccacaacggtatttcttagttttcttgtaagggggtctaatacaacggctttagatattttatatcttctccattttggcgattgcggatcaggaacttccagccatgctgcttttagttcaatggccccaacaactccattatattctccttgtggaaaattaatgggcaggtttcgtcttacgctgtcatgttgtactctggcgttataaaatcctttttctacaataaaatcatagtagtctttgttcagcataatttcataccacaaattggtatggttttgtgc

SEQ ID NO: 2639 - DNA, 23408 bp, synthetic construct
  source 1..23408: mol_type = other DNA
  misc_feature 1..23408: note = Synthetic
aatagtatatttcagctactaatttaacgaaaatcgcgcttaaaatctagcgttaaggtatttgtttctgctaatttatatctagtcgaaataaagtgaattttctttatttgtttgaaatagagttgttgttattttgcataagggaaaggtccatttatcaagaaattaattcctttatttttaagtctaaacggagcaatgcattgtttggatcagagccgaaaatactatattcaagtaccccttctgaatttattaatagccagtggggagtgcctcctgcatggtattttttgaaagttttgagcatatcactatccttataaaaaggaaaacgtatgtagtatttttcttgcgcttctttaaaatcagaaaagctatattcaggtccttcaaaccgtgaatgaatgcctataacatttaattgagttccgttttcaaccaccattctattagcataaggaagtgctcgtcctttgcaccctggacaacccaagttaaaaaataaaataagcaatggttttcctttataagttttaacagtaggagcctctgtattaaaaataggctctatatgccattcaggcaacggatgttgtaataataacatggtattttccattttaattccaattgagttgtttgcgttcactccagtatagttcaggagcagttttaaagctagaaagagtagccaattcgtcaggggatatactcaggtgtagcgcttttaggttactttgcaattgtaaattatgatgtgctccactcagtacaatggctttaggaaattgtgttgcagcatattgcattaaaatagcatctctacctaccttgtattttatttctaaggcatgcaaataattataaaaattggtataatgcggatatgcttcattggtgaataccctaccatttgctaatacttctttaagaatcagttgtttattttggttgctaatttctttggcaatagcgtatatactttgttccaaaggattataagtacattggaatacagaaaataatgctacccccgctatttttatggaaagtgctttttgtaatattgctgtttgattggctcctgaggttgtgattcctatttgaaggttatggactgtttttaattgatgtaatttttctaaaacctcttgattttctaaaactccagtagctaacgtagctgaatggatttggtaaaaccttaaataaggaagtaattgtttagatacttgccattgtgcgtttaatttgcttaggctgtgctcctttatttcatgttgtatggcattcggatcaaaattagcagtataagtatatccccatttactacctacaagaatgcttgggtcatttttagttttcacccagtcaatcaatagcgtttctgcaattccatatcctggtgctgtatcaaaatatcttatgccattttcataggcaatatcaagcaatgcgatccctttttttttgaaagcactttgcgaaaaagtttttgtttttgaaaaggtatcttttatattaatatagctaggtcttcctattgcagcagtacccaaccctatgtttttacaagcattcatatatggctattcaaaataaggaatttctccttgtgctaattttaatcgtgtccaaacattcatattgataacaattgctgctatttctgcaatttctttttctgaaaattgtgtggtcatagcatcatgatatttttgaaagtttttgttacttccttctgtaaggatatcgcaataagccaatgcgatcttttctttttcggtaaataattcactattccaccaagaagaaatattatctgtttttgcttctggaataccaatttctctagaagtttttgcatgtaaaatggtgcagtaggcacattcatttttttgggctacgcgcaagcgtaataattgagcaagttttctgtcagtagctaaatcggcagtatatccaaatgctttagccatttgcttagcaatatcaagaaaaggagttgttgctggattgaatcgggtgtttttaaattttagattactcattttattaaggtttattttggtggtggtaaagcatagtagcattttaataattaaaactactattcctttgcacttgattgtttaccaaattgtaatggctattacgaatgacttttttgcaacaagcaaagaaagcactaaagttatggtttatttttataaaactatactgttcaaaaatagttaccctttagtgctattaatttacggcaaggtctatttagttttttaaaaagctatcaaacctttcaaaatggcaagtataaccgttaggtttcttttctaaataatcttgatggtattcttcagcaacccaaaacgtagtataaggttctagggtagttactgcatcggcttcccattttctggagtcgtttactatttgtatgacttcttctgcaacttgtttctcttcatcattttgaaaaaatatggcagatctataactggatccaatatcatttccttgtctatcaatggtagttggattgtgtattctgaaaaaataatctaaaatatttttaaagcttgtttcagaaggatcgtaggtcaattcaattccttcagcatgtcctggatgatttttgtaagtagggtgttcattttgaccgccaatatagcctacttctgtatctttaattcctgggcgctttctaaataaatcttccattccccagaaacatccacctgctatgtatgcttttttataattgttcatgctttttaattttaaggatttattgatgttatttcttttttttgctcttacaaaattacgaatttacgagcgctaataattggacataattcctgtaaagaggtatattttgctcgttgcgttaatttattcttttaagaagagcttgcttcatttaattgcacatcttgtaaaaaggtaattactttttgtgtaggcatttcgcaaggttttagaaattcattttctttggtgatataataattaaggctgatgaaattgttgcctcctaattcttttgcgtacagttttattgactttccttggttaaatgttgttttcgtaatgccgtattttttattctcataaactccttctgaaaagccttctttaattttatttaaatagtgtaacatggtattttatgttgttttaaaagctgtatgataatgcatgatttatgaagagtaagtaaggttaagaactatataaaatttcagcaactttttgttgtagcataggaaccacgtctgttttaaaccaagggtttttagcttgccatctaaaatttaaaggagagggatgcactagtggaaaaaacttaggaaggtattcataaccatgcttaactgtttctgttagattttttttcattgtttttcctaaataatatttttgagcgtaggtgcctactaacaatatgagtttaatgttagtactatattttaaaagttcaggatgccattgaggggcacattcttttcttggaggaaaatcccctcctttaggattgcttccaggaaagcaaaagcccataggaacaatgccgaagttagtagtattgtaaaattgctctttactaacatgtagccagtttcttaagttatcaccacttctatccttaaaaggaatgcctgtttgagctactttttttccaggagcttgtcccacaatcaatatttttgaatttgttgaaattgaaaatataggattgggaggggttggaagaaattgtgcgcaagtattacatttctttattgtgcttaaaagagtactaaagttttgatgcattattttatacgttgattaaaaaaaaggaggtgtacgtttccaataaccatatcaggacaactattttgagtgctatcaaatatagcactacctttaaaagataggcttatggcaggtcagactcattttcatgtacctttaaatcactctccataagaaggtaggaaatccatttttaacagtactcattaacatatagtatttgtttataggtcttttgaaactttttgaacagcgagttcattatgagctacaagaaagcatagagcagcccactttatggcgtgcccattctggtcgtttggcaaaccattttgcgttttcaggttgttcgttataaggtttttttaataattgatgcaatgtttctataagcgtataatctcctgtatctgctttttctatagctaattgcgccatataattacgtaaaacatatttaggatttatacgattcattgcatgttttctatcttcatcagtagtagtttcttcctgtaatcgcgtaatataagagttgcaccattgtgcccatttttcttggagtgttttttgaatttcttcaggtttgtaaaaagcttcattaacaatatccattgcttttttactagtatcagattttttaacattgcttaataccctgaaaaatatagtcatatccgtttctgcttgttgtagaaaagtttccaaatcggcaataagcgttaaatctccatccttgttacttaaaagtcctaatttagctctcatcatgcttaaataagcatccgttaaatcatccgcataagttgttaaaatttcttctaaagggctagcttccccaataataggatacaaagcatttgctaactgatataagttccagtacattatttcaggttgtgtaccatatctatatcttttaagagcattatcagtagtatttggagtccagccatggtcatatccttccaaccaaccataaggcccataatcaatagtgagtcctagtattgaaatattatcagtattcataactccatgaacaaatcctacacgttgccaatgaattactgtttctaagcttcttttggcaacctctctaaaaaagttgatatacgtttctttagaaggagtttccaaaaaagaaaagtggtgttttatggtataatctaccagtttttttaaattcttttgatcatttctggcagcaaaaatttgataattaccaaagcgcaaaaaagattcggcagttctacaaacaatagctcctttttcataagcagcatttccattatataaaacatctcttaatacattgtctcccgaaagtgccaatgacaaagcacgtgtagttggtactcctaaatgaaacatagcctcactacataaatactcgcgaatagacgaacgtaaaacagctagcccatcagctgttctggagtaaggagtttctccagcaccttttaactgcaaagcccagtttttttgttggtgttccacttcacataaattaatagcacggccatctcctaattgtcccgcccaatttccaaactgatgccctccatagcacattgcataaggttgggtattaggaagtagttcatttcctgtaaaaacatttttaaaaaagtttgaattcacatcatttttagaaagccctaaagcaagtaccatttcttctgaagtatgtattatgcgaggagcagacgtttttttgggagttacgtaagagaagcaggcttcttttacttgcctacgggtgtttgctagcacaggatcagaaggtaattctttattaaacttgtctttgatgttgagtttcattgtttttttagtttgtacaaatttaaggaataagtatagaaggttacctttctatattacatagttatttatacatattcctcaaaaagttaataaggtgcttaaagtagcattttttaggaagttgaaaaaaattacacaagctccttaaaaaagtttactttaggaagtgtggatgggtcaattttctttatatcgaatgtagcacgaatactttttttaaagttgctacaaccactaataccatttgcttccattggtaaattgttgtttttcataaacttttttaaattatgtaaggtagtattatcaaatttacaatctttaaaatacattaaaggagttgtgtttttatggggagtgaatttatgaggcaggtgcgctctcgattcagaaaggataagttttaagttgctgaaattaacattggtaaaacggcatttgagaaagataataggatccatttttgagtcggcaaaatctacctgatgtaaatggcagctagtaagtatggggatattgaatttacagcgatagaactttacatttcgaaggcggtaaaaattacaatttttaaaaagttgcgaggtaaaggtgatgttttctagaggaatgtggggagaagagcgttgttttaacaatggcaataccacatcaaggttgttttgaacttcaaattgtttttttataaaagcaactttaaaagcttttatgataaacttggtgtttttattaactttaaaaaactgaattaaagcgtattgtaatatagaaatagtaatgattaagcccaataaaaaaggaataaaaagaaataataaggccatgattgacaagggtacccatgtaaaataaaaaaatacagccgcaataattatgaaaagaatggttaagccaataataaactctccatttttaagaaaaactctagccataaaatttttaactttactacgccagccattttgcattaaaagcaatagagcaggaatatttttgttaagctttaaattgttaggaatggaatcataaataaaattaacaatagggttagaccaatcttcaaataaaattctacttttaaatttatttgttttaatagcgttaataatttcttctgctacaaaaaactcaaaaaacgatttatgaacaaacttaaagtaatcattttctagttcaataaaatatcctgtcaggatttcattttcaaatccctctttttggtattttttagataagtttttaatcgcatatttttcaacccattgttgtagttcctctttaataaaatcaggacgtattttaaactgtttggaaataaatatttgagcagcaatatgtttaaaaaacgatttgataaaggttcttttttgactgttgttagaaaaagccgattgaatatttttgctttcttgtcggttaatccaataatcaatatatttttctatggcatttcctgggttttctatttccgtagcatttcttctatgcaaattagggagcatttctctaataatatgcattaaagaagggcgtttgcatagctctaatatactaggagaattttcaagccaagcaaaaaactcagcagttctttctaccttatagtatttggcaatgtagctttttattttagtttcgtccagtaattttaaacgaatgctactacaataaggctgtgtttgaattatatgatcgctctctttaataatatttaaggtttgctctaattcaaattttgacggaaaataagaagcacgtccagctaagagtattttattctttttaaaagccaatttccatatttcattaatttgtttaaatcggtcatcatgagttccaacaaatcccatttcatcaaaaccatctagtaaaaaaagaattttgcctttatgaataagtatttcaaacaattcataatctacccctaagttttcagccacaaaagcactaattgttttttttatacctccgtgcctaggcgaagtattgtttaaagaaataaatacaggaaaccgtaagattctttttttacttaaaatatctttggcaagattacttgcataataggttaagaaggaggttttacccattccataatcgcccagcaaagctaagtgtttagaggtaggagatttttcaagccaatctgttacatactcttctaaagtaagtgtaggttggctattattatctaacgaatagctaggcattataaatgtttcagaaagtgttttcttttcagagtctttggcaattgctgaaaatatcttattgttattatacttgaatataagcgagttcaaataactattaaaatcaatcaattcatttaaaatagcatcttctgtttttgtataaaaaccaggaatagcagaaggcgcaaagctacctttattgatgatataaaaataatcatataaataagtaatattgcttttattgtgttttaataccgtttttaaacgtttcatttcttgtaaagcgcgttgttgtgttacttcagaaataaccgtatcagtattattttctacatattttataattataaagtagtgcctaaagccttcactatacgaaccatacagtaattgatctttggtagatacatttaaaaatagtttttgctttttgtatttaagttcaatgtatctttttattctttcgtaaaatattggagactcgtaaaagtgatcttttggaaataacagttcttttttttcagatttaggttcttcttttccggcaaaaaagttttgaaaagctttttgttttcttgttttaaaagccatgtgcaataaaataattaccgctaagcaaaatatgccataggttatgatagtaggcgtatctagttgtacacttaatagagtataatttgtacggaattgttggtttatattaccaatgatccagttaataatatggggagtaatttgggagttgataatacaaaatgcagtaaataagataccgattgcatatttgaatagatagttgctttcaagacggtatctatttttaattgttttaaagtaccaaataataaataacctaattaataagaaagcaagtaataagaaaaagagaagggaaaaaataagcatcatgtatagcagtggtatttattgtttttgcagtatttgacaacaaaataagttgtatgttttttaatacagtagctagttgtaataagaggctacattagaaaataaacttttttaagttcaaaaagtttcaatgagttctgtgaaagtagcactagtaaagctttcttttttatggctacttcaataaaaaagaaaatctacatcaaaacggtattgatttatttttaggatacattcaacatataattaatgtctgacaccaatattcaaagctagtaaaaataatttcctttttataatggaagctctgaggtaaaaaatagtgttgcttgttaattctttgtttttaagtatcttatgtttttgtctggtaaaactacttagttgaattctagtagaattacgtagcttttatataaaaaaatctgaaataaaagtataaaaacaagtaagacaggcaaacttaaacctttcctcctcaaaaggaaataggaggcatatttcaaatctattttttgtataagaataatgcctctcctaaaaaaaactctatcctctccaaataccatgataaaaatcccattcccctcataaaaaaacggatgattattttaacttaaaaacataacccattgatttttagtagaaatctgtacaaactttttagaacgcgttccaaaccttgtacaaaaaacgaagttaacatcttgtacagtgtttttacgagggaaaaaaaccttgtacaaaaaacgaagttgaaatcttgtacagtgtttttacgagggaaaaaaacactgtacaaaaaatgaagttgaaatcttgtacagtgtttttacgagggaaaaaaacgctgtacaaaaaatgacgttgaaatcttgtacagcgtttttacgagagaaaaaaacgctgtacaaaaaatgaagttgaaatcttgtacagtgtttttacgagagaaaaaaacgctgtacaaaaaaggaatccaaaagcaaaagatccttcttaaaataggaaggatagctataacaacgagaggctactaaaaacttcaataaaaaacagacaataaccaaaatagatgctataaaaaaagtcctacacgaagcaggactcaagaatttcttctacggcatatagccttattgtgataagaattaaagattagagtaatttttttcacagttcaaatataataaaaaaagcttgttaagcccccaaacaatttttatttttataagaaattaaaagctattaaaacaatgtcaacaatacttggattagacttaggtaccaactccattggttgggctttaataaacaacacaacctcaaaaataataggagtaggaagtagggtattttcagaaggagtagtagatttaggaggcggagaaggaaaagaaatgtcaaaaaatgctagcagaacagtagcaagaggagtcagaagacaattgtttagacgcaggttacgcaagcggtacctattaaaagaattggccaaacaccaactatgtcccatagccccagaggccttagaaaattggaatcaaaccactgtttttgacaccgaagttttaaaaaaatggtttcaacttaatccgtatgaattaagagccaaagctattaaagcacctatttctttgcatgaaataggacgcatattttatcatatgatacagcgcagaggttttttgagcaatagcagaagtgcaggagcagcaaccaaagaaactagcgctatttttaaaggcgatttaaaacaagagaaagtagggatcgctagtactcaacaaagcatagcccaaagcatcactttaggaagttacttgcatacaatacaacctaaagagcacgccccatatgtaaaaaaagtagcacgtataagaaatagatatactactaggcaaatgtatatagacgaatttgaaatgatttgggaatttcaaaaacaatttcatgcagtattaaccaactctctaaaaacccatttgggaggacgaaaaaaagacggctataaaaaagatggcatcctgtttcatcaaaggccattacgctctcaaaaacatctagtaggcaactgtaccttggaacctaaaaaaacaaaagccagcataagttccattccctttgagtattttagaatataccaatggataaatacattggcatgcgattttaacggaaaccaccatcccattagccaaaaagagcgccatcaaataataacactattactatcagcagaaaaagtagcatttaaaaaaatacgaaaagccataggaaaaacagaaaaagaataccagttcaattataaagatgacgctattatttatggtacacacaccattagtaacttatcaaataagaagttttttggcaagcaatggttcaactttactcaggaagagcaagaaaatatttggcacatattgtctttttttgacgatcgtgaaaaattaaaaaactatgccatgacccattggcaatttacagaagaaaaagccattaaaatttcaaaattcaatttaaaagaaggttatgccaacctaagtagaaaagccattaacggaattttaccttttttaaaagaaggctttatgtatgatgtagcagtagcattggcaggggttaaaaatgctttaggtaacacttggcaaacacaccaagaatttgtaaaaaacaatgtgcctgaaatagtacgtgcaaatataaaaggaggctatttagcacccttaaaaaaaatgttagcagcaacgttggcctgtacccccacgcagctcaaaaagttataccaccatagtagtgctataaaagctactactatagcaccaaaattaccagtaggagatattgctgataaagaaatacaaaaaataaaaaacccaatcgtaatcaaagccctttttgaagtcagaaaactggtaaacgagctaataactacctacggaaaacctgacgaaataaagatagaattggcaagagatttaaaaacatcaaaaaaaaataggtatgaaataagaaaacaacaacaatttttagaaaaagaaaataacagaatacaaaaagaattggaaaatttagcacaacgagcaacgccaaccaatatattaaaatacaaactatgggaagaatgcaaccatacttgcccatataccaatacaaaaattcctattcataagctttttacaggcgaaattcaaatagaacacatttacccatggagccgttcattaaatgatagctttatgaataaaacactttgttatgctaatgaaaatagggcgaaaaaaaataaaacaccctatgaattttatcatgatgagcaaggcgaagaaaaatgggcgcaagtaaaacaacaggccttagcatgctttaaaaacaaatatccgaattatcccaatgcttacaataagtttaaacattttgtgcaaaagaaaagagaagaagactttgtaagtcgtcaattaaatgacacaagatatattagcaaagaagctaaaaattacctgtctaaaataagcaataacgtacttgtagcatcagggcaagcaaccgcagcactacgccaccattggggattaaatagtattttaaatgaagtagaaaacgcaaaaactaggcatgaccataggcaccatgctatagatgctttggtaatggcttgtataacagcggggcatgtacaagctctaagccagtggaataggtacgacagaaattatgaactaaaagactttgcaatgccttggccatcttttagagtagatgcagcagtagcaatagcgggcattttagtatctcataaaaaagaaaaaaaattactgaccgtaagaaaacacacggttataaaaaacggacagccatataccaataaaggaatagccgcaagaggcctcttgcacaaagagtcagtgtacggaaaaagaaaagctcctggtaaagaagaagcttatcatataagaaaacccatagaaagcataactactgaaaaaaaattagaaaaagtagtagatccaacaattaaaaatctaatttttaaaagaatacaaaaattaggaggctttgtaaaaggaaaaataccatcagaaaccttttacaaactagcagaaaacggacaaagagtgcctcaaattttcttacccaataaaaacggagctcctgttcctattaaaaaagtaagaataagagaggtaataggaaaggcagtaccgttaaaaaatactgtcaaccaatatgtaaaccccaaaaacaatcaccatatattaatttataaaaatgccaaaggaatcatggaagaagaagtagttagcttttgggaagcggtagaacgcaaaaagcaagaaatagacgtgtttaaaatgccaaaaaaggggaaagaaaaactagcaatactccaaaaaaatgatatgtttgtacttggcttagacatagaaacagttgaggaagcatggcaagataacagcctgctaaaagagcatttatacaaagtgcaaaaaatatctagcaaagattataattttagaaaacattcagatgcaagaccagacgaagccgcaaaaaaagaatatattcgaataagaagtttaggagaaggaaaaaaaggatgggaagcaatgaaccctattaaggtaaaactaaatagcataggaaaaatagtaaaagcatagtgcttatagcattaacgttctttgaaatatataaacatcttttgaactataaaagattagagataacgatattataactaaaaaaacagaaatcaaaaggaagttgtggtttgataaaagattagagataacgatattaaagtcacttacaaattcatcctgggcaaagttgtggtttgataaaagattagagataacgatattgtagcttatagaaatgatgaactagaaaaggttgtggtttgataaaagattagagataacgatattatgcgctgataacaaatgttcctaaatctagttgtggtttgataaaagattagagataacgatatttacgaaaaaagtattatcctgtgtaacttcgttgtggtttgataaaagattagagataacgatatttcgtttaatatatctttagaaaaaacaccagttgtggtttgataaaagattagagataacgatattaacttcattattaatatcagaaggtggaggttgtggtttgataaaagattagagataacgatattaagtagaattgtgtagattgcaagggtttagttgtggtttgataaaagattagagataacgatattcgattgatgcaagcaccatactcgtactagttgtggtttgataaaagattagagataacgatattgagctttcatgatctttagcattgccgtaagttgtggtttgataaaagattagagataacgatattcaacatgctcatcgcataataccatatacgttgtggtttgataaaagattagagataacgatattaacgatgcgatatggaagaaggtacaccgagttgtggtttgataaaagattagagataacgatattaatattgagtaatcttcttagtgaaattggttgtggtttgataaaagattagagataacgatattcgttagcggcttagcgcttggtaactatatagttaaggtgttgtatcgtattgtaaaaatgcttcttataaagatagaaaggctttatttgaagcatttttttattcctattgtatatttttctttttatcaataaattggtggcaactttttgtttggaagcaaaaaaatagtttttttaactaacataggcttcgttatgttgtgataaaaagttaaaattagcgtgtaataagaccaatttgcaggcatcagaaaaagttgaaaccactttaataaataaggtattaaaacaattctagttgtaaaacaggaggaggagacgcttcttgggcgttaccccaaaaattcatcatatttccgtactgcttgtctgtaattcttaaaatacttattcttccataaggaggcaatacagattgtattcttttttcatgtacatcagcacgttcactgctagcacaatgcctaatatatatagaaaattgcatcatggtaaaaccattttttaaaagctgtttacgaaataactgtgcatttttccgatcttttttagttgctgtaggcaaatcaaaaaaaacaaataaccacataactctataagtatttaaatccatagcttcggatattttatttttctagtctttccagaaaaacattgctgtaaagagctagttgtaacagataaagcaaccattaaaggacgctttttaccatcaaaataaaccgtttgtgtcaacgtttctaaaagagccaatttaatagaaggcgttaaaaaagtaccatcaaattgctccataatatccagcacctttttatcaattaaaggtcggtaaggttccataatatcatccgccaaacaaaaagcattgtatttatgatgatggtgaatccctaaagtatttaataaaccactaccagaaagcgctctagccacagcagcacgcaatacagtataaccataatttaaaaaaagattaggaaaacaaccattacgagcccgtttaaaatcaaaatcaaacaagtttttccaataataagccgccgccacggcttctctatgattactatcaccacttaacactttggcagcataaaacaacaaaggagtattgcccttgcctatcttttgtaacaatattgcttgattcgtaattttagtccttataatttgctgccacaattgtttttttaaaggctcagaagctgctatttgatttttaaaatgcacctgttgtatatgatgactatccaaatttaaaagcatactttgtggcaaatgcttattgttacaaaaaataacagcaatattataatcgctcaatttagaaatagtaggcatgctgatataaacctcctgatgttctataaccacaaagccaatatcttccataggaatagatgttttgcgatgagcagttgtaattaataattgttcatattgagtagtcaaagaacatttgttcgtaaaaaaaagggtttttctaatcataagacggtaattatattaaaaataaaaaagaagtttttcatcgttcaacaagcatttatagcagcgcagttatagtatatatggatattcaaaactaataacaaaggaagcaatcgtaccgatgggtttccataactccctaaaaaaaagataaaaaagttttataaaatcttgtacagcgtttttacaagggaaaaaaacaaggcacagcaaatacagtttatactatattgttgaataatagtatatttactccttaattgtaaaaaactatgaaagtaaaagactattttttggcacttattttatgctcttttatccattgtaaaagagtccctacatatgcaatagcaattagcgaatgcttggagcaaagcagaaaagactatttatcttctggaaaaagaaaactttttaaaaacccattgagaaaatatttagatgaaaaacttgtaggaatgaaaatgaataatttaaccttcaaagataaaaaaggaaccactatccatttaaataaaacaggtaaacctgtttacattcaaaccttttccagaagagtagagcagtgcaatagagagctggaagcgttgaatatcttggttgaaaaataccaagataaagttacctttattttactaattaacaaaaaccacgaatccaatccgttgtgtaataacaaactatatagaaaaaaatctccggaagattgcactcctaataagtaccacccatccatccatatcatttattttacaaccgcaaatttagaaggtttggaagacggttatggagaaatgatttacggaataagaaacattgaataccctacctgctattatttaaataaaaacaacaccatatttaaaattacaaccatagaagatataatagtagcaactaataaaatagccttaaaaaatagttctttacatgaaaaagaactgagtcaaaagagctttgaaagtagagtaccaacaattatcaatgaattaattgcgtataatgctactagataaataagaaataattacgcattaaaaacttacgaatattttttctttctccaataattaaaaccaaaaccaaaaacaaacaaaactaaaagcggcaatccgatattaaaaaattgccaaagagtacgctcattataagcacgttgtttatttaagtgattaatttgaatagctttattacgcaagtcaataataccattatcatccaaaagataatcaacagcatttaacaaaaaatccttattaccaaactgttcccccgtccatttatctatagacaaatcggtaggttttccttttaaaatttgatttttaccaacatcaccatcagcaataacaatcattttattaggcatacctttagccataaataaaggcgttgtaaaaggatgcaccctacttttataagcagaagtaaaagccccttccaaaagcacagcaaataattgatgcccgcccttataagcattttgttgcggtgttttagcaatactagccaactcaataattttaggagtccccacagtttgagtgaacatagaactcaataataaaggcgtttttttaacaccattttgtaaagtatctatcgggtttgcaaactgcaagcgtataggcgccgtatttttagtaataacatgattaggatttccatgtaccagaggatgaaaaaaccaatttaaatgctgaaattgaggccgatttcccatagtacccgttgctaatggaatcttagcagcatacaaatctttaatcaaagtaccatttacccgaaccccataattaaaaagaagatccgtcaaatttaaatctctaggatatgccaacatttttccgtccaccaataaactatcttgatctgcctgcacattatcaagcatccatagcgtttttccgccatgtacaataaactgatctaaggtaaatttttcttcagaagtaaacttttgagtaggcttagcaataatagccatgtcatatttagtaagctgattcagcgttttttcaggcgcaacagctacactatccaaagtaaacttcgccaagcggtactttttacctacctcactcaaaaagctatacaaattaagatcttctagctcgccattaccacttaatacagcaattgtttttttagtatttttcacaacagtatggatcgcacttgtaaaagaatattccaaaccttcaattgcattttgcaattgagcctcttgagttttagcaactgaattgggtaataaagaaaccgtttctgtttgatgcccatatgttatttcagcccacggaaaaataatggcattagacagttttccgttttcctctaccgttaattggctaggcatcattccttttttaaccaaggcttttcgatggctatcaggattaataaacctaaaataaatagcagggttaagagctcttaattcttccaaaaactgacgagtttctatttgtaaacgttggaattcagcaggaaaatctccctctaaatacacgttaataaccagttgcttatcaatagcagcaatactatttttagtagtgctagataaagtataacgcttatcttgcgtaagatcaatacgcgtatatattttacgactaataatagttacaatgaatattccaaaaagcaagaaagcaataggtgatagttttttattcattagttaattgtattttggtaataaataaaaagaaaaaagtaatactgataaaataaataagatcacgagaatcaataaccccacgactcacactcttaaaatgctcataaatacctaattgctgtatggcataactattgtcaaataaacccgccatagcatcaaatccataaaaaaagaaaaaagtaatacaagcactagcaataaaagcaactatttgacttttagaaaatgtagaagtaaacaaaccaatagccgtataagtagccgctaaaaataacaagccaatataagaagctatagtgccccctaggtcaatttttccagtaggatttgctaaagcatacaccgtataaacataagttaaagtaggtagcaaagcaagcacaattaacaaaagcgacgctaaaaatttaccaagcacaatttgccaatcagttaaaggtttagtccttaagccttcaatagtaccactaccaaactcatccgcaaaacttttcattgtaatagcaggaatcaaaaataaaaacacccaaggagccaaataaaaaaagctattcaaatcagcaaacccagcatttaaaatattaaaatcgcctttaaaaacccataaaaataaaccattagccattaaaaaagccccaataaccaaataagcaataggagaagcaaaaaacgaattaaattcttttcttaatataggaaacattagttataatttcaaaattaattaatattacggtaaagaagttagtttatcaaggctccaagcctgcggtttgtcattaaataaaacttttgttttagcccaaacacccttaaacaaatcagaattccgataattttctaaatcctgttccgtatcccagtaactatacgtaaaaaaaatactaggatttgttttatctctatacaactctaataaacgacaaccagccgattttcgtataaattctttcttttcattaaaattaaagagaaacgcttcaattttttcaggataaaaactcattttaacaatgcgaacaaacatattttttattttaagactgtaaattcaggggtaacaggagttataaactcaatagtaatagaatctctataccccaaaccaagtaatgaagaagccccaccaacagtttttaagttacttctatatatggcaatctccaaaaaaccagcagcattaaaaatagccagtttatcaccatcattctgacgcctttctacatccagcgtatagtcaacaatatcattatacttactatatattcttgtaaaagaataccttctggcagtaattttaaaatgacgccctctaccaatttcatgaaacattttcttatggatattactaataacatttccataattatcaatataaataaccccaccaataatggttgtttttgcttgatttaccttaggttgaatttcaataattttcttatacgattgaatttcctttccaataacatccaagcttccgccacgagcaataaaacaagctacctgtacaaaaacatctaaaacagggaaactactttcaacacgatcatgaatattaatttcaacaattttagtaggatttatttcagaggcaatcatagaaatcaagccattatcagggcaaacaaaaaaatgatcatccaaggcaatagcaatatgtttattttctacacttaactcagaatctaccccaacaatatgaatagtgcctttaggaaagcttttataagagttttttaaaatatatgcagtttcagtaatattaaaaggagatatttcatgagtaatatctacaattctagcatcaggaagctctgtatagatagctccttttacggcacccacaaagtggtctttggttccaaaatctgttgttaatgtaatcagagacattaaaaagctttctattaattagttgtaaaaaaaatgctaaaaaattttggcaaagctacgcaattattcaaaattattactaaatttcttctgtaatcaaaggactgttttatataactgtgaatcatagattataacactaaaataagataactttaaaaataaatcatttgaacgaacgcattattgagctaacggaaataaatcctaacgatttttttggtgcacaaaacagtaccattacacaattaaaaacctactatccgaaaataaaaattgtagcaagaggaaatacccttaaaatatacggagaacccgaaattttagatgaatttgaaaaacgtttagcaatgcttgtaaagtattttataaaatacaataagctagacgaaaatagcattgaacgtttgctaacttctacaggaaaagaagaaaaagcaacttccggaaaagacacagatgttttagtgcatggcgtaagtggtaaacctattaaagcaaaaacaatcaaccaacaaaaaatggttgaatccatgaaaaaaaacgatctgttgtttgcagtaggacccgccggaacaggaaaaacttataccgcagtagctttggcagtaagagccttaaaagaaaaagaagttcgtagaattattttaactcgcccagcggtagagtcaggtgaaaatttaggatttttaccaggagacttaaaagaaaaactagatccatatatgcaacctttatacgatgcattgagagatatgataccgcatgaacgattagaatcctatttagaaaaaggaatcatccaaatagcccctttggcattcatgcgcggtagaactttagacaatgcttttgtaatattagacgaggcacaaaatacaacccatgcgcaaatgaaaatgtttttaacaagaatgggaatgcatgcaaagtttattattactggtgatccagggcaaatagatttaccaagaagacaaatttcaggattaaagcaagctctattagcattaaaagatattaaaggaatagggcaaatatatttagacgataaagatgtagtacgccatcgtttgataaaaaagattattactgcttataaaagtatagaaacaacataaagcaaaaaagaagcgctataataagaggcaaatcgactgtcgttttttattggtaaaaatagtttttagcgtacttttgcagccaacaacaacacaacaataatatgaacacaattaatgaaactcatttcaagtttccaaagcaaaaatctgtttataaaggaaaagtaagagaagtatataatattaatgatgaagtattggttatgatagcttctgataggctgtcagcatttgatgttattttaccacgtcaaataccatttaaaggacaaatactaaatcaaattgcaaccaaaatgatgaacgatactgtagatattgttccgaattggttaatagcaaatcctgatgaaaacgtagccatagggcatttatgcgaaccctttaaggttgaaatggtaattagaggctatttgtcaggccatgcagcgcgtgtatataaagcaggaaaaagagtgctttgcggagttgaaatgcccgcaggaatgcaagaaaatgacaaatttccaaagcctataataaccccttcaacaaaagccgatcatggagcgcatgatgaagacatttcacgagaagaaattttaaccaaaggaattgtatcagaaaaagagtatcaaatattagaagaatacacatataaattatttgaaagaggtactagaatagcagctgctcgtggcttaattttggtagataccaaatatgagttcggaaaaaccaaagaaggaaaaattgtattgatagatgaaattcatactcctgactcatcgcgttatttttataaagaaggctatgaagaacgccaagaaaaaaaagaaaaacaaaaacaattgtcaaaagaatttgtacgtcaatggttaattgaaaatggctttcaaggaaaggaaggccagcagattcctgaaatgtcagatgaaaaaattaatgaaatatctaacagatatattgaattatacgagcaaataacaggagaaaaatttgtgaaagcaaatacagaagaagtattacatcgtatagaaaaaaatgtggttaattttttaaatggataataaaaagttaagtattagacctgctttaaatttgtcatcaacaattcctattgaagattttcaaaatagaaccctacgtccaattttaaaattacaacattcattcatcttacaaatggccgcttttttttgtagcaaacaaaaagtagctctttctaacataaaagaaaaagaatatgaaaaagtaatagcaggtattttaaaaaagaatatcccttcaagaaatcaattaatagggggcattgtagggcattttacggtaagtgaattcttgttttacgagaaacatgatacggaaataaacaaaagaatcttagcaatgattgaaaaaaaaatacgagaaaatcaacttgctataaaaaaaataaaacaaacaaaccatgataatagcaccaaaaactagaggttttatttgcttaactgcccatccaacgggctgcgcgcaaaatgtaaaaaaacaaatagcctatatccagtcaaaaggagaaataaaaggagccaaaaaagtattggttataggctcgtcaacaggattcggtttggcgtcaagaataaccagtgcatttggctcagacgcagcaactattggcgtgttttttgacaaaccagcaagtgaaggaaggccagcatctcctggtttttacaatacagcagcatttgaaaaagaagcccatgccgcaggattatatgcaaaaagtattaatggagatgctttttcaaatgaggtaaaagaacaggtgattgatttgataaaagaagatttaggacatatagatttagtaatttatagcttagcgtcaccagtgcgaactcatcctgtaagc

SEQ ID NO: 2640 - DNA, 23405 bp, synthetic construct
  source 1..23405: mol_type = other DNA
  misc_feature 1..23405: note = Synthetic
atattcaatgctatgtttaaattgttctttttatttagaggtaaagtcacttcactataaaaatgtaataaatgatatgcatttggtggcgtactaatatctaccaatacattctcttgggttgtggcaacaaaagtttcaaaattaaagttaggaaattgtgtttgttcaaaaacccattcagattttaagcttactttaaaattactccattcgtcttttgtaaatgttagtgtgttattggtattaaatgccggaatgtcaattaaatctatacctgcatttatatcatttcctttggtgtaagaagacgtatgttgccaagcgatattgtcggtaaatttatagtttgatgaaacatcaataccaaatagttctgtatctgttttttgatattcccatacaggaaaggctcctctgatagtttgctcaattccaaatggtcttaaatacataaaatcgttaatatggttataaaacaaatctacgaccaaattaaaattagttgtttttaaattgtaggtaacagaaatacgattagagatttcttgcgctagccttaaatcgcctaactcaatccttgcggcagagtggtgcaacccatcgctaaataattctgatgggttgggaggtctgctcgatagggcatagttacctagaatggtgttgttgtcatctaatagatactttagaccagctgaagccgagaaattatggtacgtaaaaataggatttgttaataattgcgtacctagatcttcaataactatatcggaaaaatcttggtcatagccacgttcttcccaacgcgacgtacgataaaacttttttgcatcaattttattataatcataacgtatgccagcatcgattgttgctttgtcattaacgatccactctgtagtgatgtaagtaccaaaatcaaactttttgtaatctggaataaggcgtctaacacctgtatctggatttgcaaagttatcctgataacgacccattataccaacattaattttgtgctgtaaattagcgtctaaattaaggtctgccgtaattgtatgtgtttgaaggtttaaatctaaagctgctttatttctatcgtcacctactctaatatcaaactcaaaacgttggttgttctggtaatcatattgaaggtttaatttaccaaagtttttaaatcgctgataatatgaagcctttgccaaatgatgggttacatcttgttttggtgcgttaatatcatagctaaaatcatcaattaccaagggctgctgtgagttaatagcgtttattaaatcatttatattaccaatatgagaggatcttagaatcccaatttcgttattgatgtaactgtaaaacacctcaaaaccacgtttaaagtttttacgtcctgcactcacggtaaaactattggaccttaaacctgtgtttgttaaataataatcgggagatttaaagtctccattttgcttcagtgatccttgaaggctcgcaaaccaaccagacgcataccctttgtttaatgatgaggtaataccataacctctaccattggtttgtccagtaatgattgtcttaccataaagcgtatccattctaatagttctattagggtttattaccaccacaccaccaaccgcatcaccaccataggctagcgctgccgacccttttattaccgaaatgttattagcactgttaatatcaacatttggtgcatgctcaattccccattcctgatcttgcaaccgaacactattattaagaattaaaagtctgctactatgtaatccattaatcattggtttaacgatggtattacctgtgttaatagaggaaacacctggtacttctttcagcgcgtctccaagactaagaatgctatactgttttaatacatttgctttaataatacgttcttgggctgtatttgtagttttttgctcattagattttaacgaaacttcatcaagttcttcaatgtggtgctctaacaaaatatttttatacatatctccatttatggtatatgtaagtgttttagtttcgcagccaacatgagaaattacgagagttagctctccttcacaaagattttcaattttaaattttccatctaagtcggacgtcgtatatctatttaaattttgcataaatatagtagcaccaacaataggagtattgtcgtgaaagtctttgagttcacctagaaatgtaaacttacattcttgagcgtagcccaccttaaaagttgtaaaaagtataaataaagccaaaagcctcataactatagattatagtgtacgattgataccaataaaataaaaatactggcactatatgtgttttgtttaccgaagtttaggctgtagttggtggtccccttaaataagatgtattttgctgatgtgttcttaagaacaaataaatgcaagtattaaccttgctgaagttattttgaattatagttttatacgatagagacgtaaaataatagtttgtgttaagtttaaatttataaaactcgcaatcgatgtctaactcatgaaaatgggtattactatcaatatcatttttacaaacctcgtgactatgatgactaaaagcgtgggcaagcttaattgcagagggcaataatactgcgagtattaatgctacagcaagtatctttgaagtaggttttatgatagttttcttactcaatctacaaagcgttttaagccaaatcgtttcaacatttttttttcaaattcccaaaagaacttgtgttgaccaaacagccaaccaaaactaactagaagaatttgatagaaaattaagccaataatagtaaataatatccagtagagtgcaggatttaagttttctttagtaatccctagtaattttattatcggtctgccaacatagagtgacgaagatccggtaatagcaaatacaataaatactctaattatttcccatctgtattctaatttccagcgtttttcaagaaatttaaaaagccttagtgttgctattagtagtactacaaacaatagtactgaagcaataatgattaccatatttctaaagtcaccaaataagaccaaagccaatttaaatgaagaatatcctaaacccagaatgcccaataaaggaaagattaattgccagttatgctggatttcccaatgttctttaaacctattcatagcactttttaagcgctgcaaatgtacgctaaattctaggaattattgaggttaattgttgtttatattttaactgaaagtataaaaagtaattatacagtttgtagttaacttcataaccataatctgtacgcgtgtcgtagtctattcttacttgatacaagtttgggtcgtagctatgcggttgaagattcctttgattccaagcttgtacaagaaaagcatttctatcttctaaccatctttgagagtgaaaacctcttggcctagcagtactaattaaccatgcattaaaaccaggttctatgatgatgatttcgtaatccgtctcatcgctactaatagaaacggtatcattttttactaaagcactgctatttccgttattaattgttgggttgctattgtacgatttacaacttgctatcagagcaattagaataacaaatggaattgtttttttcataacattaaaggtattaataattttaatcattgaagaattattgatgtttaatacaaaataaaatacaaatagagtagtacgaaacagcaaatgagtaaatatatccattcattgagtgaaacagtaaacaaacaaaaccaaaaaagcagctcagttgagctgcttttgtctataaataatcgttagattttattttccgaatagaccacctagaagaccaccaaggcctccttttttcttagcacctccaagcaccattcctgcaacatcgtctataacgctgccatcaccatcggcatctaggattttttctagaaaactttgctcatttctagtgtcattacctccaaggaagccacctaataatcctgtaagatcactttgagagctaacattattttgacgagattgttttcctaaaacacccattaatattggtgcggcaactttaagaatgtcgctcacagaaccagcatctaaaccagatttttgccctataacttgctcaacaccttgttgtttgcttcctaagacatgacctaatattttagacccatcagtctttacttcttcattaacaccaccgccaaagaggctacctaagttatctaagatacttccatcatgtttattgcttaaggctcccataagtccttgggcaccttctggtgttgaggcgttacgctccattgctttcataagaacgggtaatgccattgtcaaaacattacttgttttgttttgatctgttcctgtagaaccagaaacaccacttatgatggtttttcccatgtcactatttaataagtctaaaattccttccattgtttataagattaaggtttaattttcagttaagtaaggtacaaaaaaagtcctatacaattataggactcagttagtttataaaggtcacaattattttgttatcccaatatttttatgatttgatctgcaagttctacaccaattctatcttgtgcttcactagtagcagcaccagtatgtggtgtcagagacaatgcaggattcataagtaattgtacttctggctgtggctctttttcgaacacatctaaagcagctcttgccacttttccactttctatagcttttattaaagcaatttcgtttacaactccaccgcgtgcagcattggctataattacaccgtctttcatttggttaaagtcagcttcatctataacgtaatctttttgtgctggcacatgtagtgttataaaatcagcttgtttcaaaacttcttctttagaaacggtttttatattgaaacttactttctgaccatcgaaaaagtctagatctatcgttgtttcttcaataaatgggtcaaaagccacgatattcataccagctccaatgccaatcttggcagtggcttgtccaattctaccaaaaccaataacacctagagtttttccttttagttcaacacctttagcgtaagcttttttaagtgctttaaaattagaatctccttctaaaggcatatcgcgattagaattatgaagaaatcttgctaggccataaaaatggccaaacactaattctgctacagaatgtgatgatgccgcaggagtattaataacatgaagtcctttttctcttgcataatcaacatctatgttgtccataccaacacctccacgaccaataatcttaaggcttgggcagttgtcaataatatcttttctaactttggtagcacttcttaccagtagcactgaaatatcattatcgttaatgtaattttgtaattgttcttgtgcaacagtcgttgttaacacttcgtaacctgcagcttccaaagcgtctataccgctttgggatacaccatcgtttgctagtactttcatgtaatagtaattctttattagttaggcttttctttctaattcactcataacttctacaagtgcttttacactgtctaaggatagagcattgtacatcgatgctctgtaaccaccaacacttctatgaccgttgagaccattaataccagcttctttccacatggcatcgaaggtttcttttagattttcgttttctagggtaaaggttgcgttcatagtagaacgatcttcttttactgcataccctttaaatagtgggtttaaatctatttctgagtaaattaatcgcgctttcttttcattttcttcttcaatggcctttatgcctcccagatcttttaaccattgtaaggttaacatagatacgtatactgcaaatacaggtggtgtattaaacatacttcctttactgatatgcactttatagtccatcattgaaggaattttacgagacaccttacctaatatatcttcttttacgaccactaaagttgtaccagcaggacccatatttttttgtgcaccagcatagattaaatcaaactgtgtgaaatctaactgacgcgaaaagatatcactactcatatcgcaaaccataggaattggtgcgtttgggaaactcttcatctgtgtcccaaaaatggtgttgttagaggtacagtggaagtaatcgtaatcttcaggaatatcgtaaccctttggtatgtagttaaagtttgcacttttggaagaacccacttcataaatatcatcataaattttagcttctttaatggccttatcactccaagtaccagtatttaggtaaccagctcttttttcaagaagatttaaggcaaccattaaaaactgcgtgcttgcaccaccttgtaagaataaggctttataacccttgccttctaaacctaacagttctaaagctaaagctctggcgttttccataacatctacaaaaggcttgctacgatgcgaaatttcaataagagataagccatcatcaaagtttaaaagtgcttcagaagctttttgaattacggattttggtagtacacaaggacctgcactaaaattatgttttttcattaatagtatagtttcatttctaatgactcagaaatttattatttttttgtttgatctgttacaaaggtgctaattaattggctatttagcattactaaaatgataatttttgtatcaaatttttaacaagaattcaacagtatcaacagcatctgcataatcccaaagctctggtttttgggtatgcccaaaagcaatttcatttttgataaaaccatttgcaactatacattgaattttatcatgctcttcttctaatttgtgttttagattttctttactttcataatattcgtaaaatacagtagcaataggtgaggcatagcttttatcttcctttatcattaaaaagccattttctaacatatcgaactcgctcataaggtacacggtcttgttgtaatcatagttattggcatattttgctccgtggattacgggatgccatttgtaaactgcattaaaaaaggcatcaaagttatagtctttaggtacaaagagttttgatacatttctacaacccaaaccataatatctaaagatatcatcagacaaggcttctaaatcctctttagactcgttgccatttagtattgcaaccgaatttctgttctttctaattatggatggtttgttcttaaagtagtactcaaaatagcgtgctgtattatcgctgcctgtggctattacagcatcaaagctttctagcttgtcttgcgtaaaggtaatttttcctttaaagccaggttctacaacttcgagatacttagctagatagggtaggagatgcttgtcgttagaggattgttttaccaacacattatggccagaaataagtactgatagaaagtcatgaaaaccgaccaaagggatgttaccagccataataataccgacggtcttaggttctatgttttcaaaattataagcccttgtccattggtttatatttttggtagttaaagcatctgcccaagacgctatactaaagtacacattagcctttgtaaaccaaccattatgttcattagccagttttatttggtgtttaaagccctcaaaaaaaaggtcgttggcctctacggtatcatttctttggatgccgctggtatggaattgccttaaaaactgtcctaatttagagaaagcgttaattctttgttgtaaatgcatgtagagtttggtaaaacgcctgttaggctttatttttgcaattgcaaaattacgcaataaaaaagaaaattactatggcaattataatcacagacgaatgtattaattgtggtgcttgcgaaccagagtgtcctaatactgcaatatacgagggtgcagacgattggcgttactctgatggtaccagcttaaaaggcaagattgtactacccaatggtaaaacggtagatgctgatgagacacaaatgcctattagtgatgaagtctattatatagcaccagataaatgtactgagtgtatgggctttcatgaggagccacaatgtgcggcagtttgcccagtagattgttgtgtgcctgacgacaaccatgtagaaaccgaagaagagctacttggtaaacagcgctttatgcatcctgaagactgaattgatgaaccatcaataattaatactaatcctaagcctaaggcttgggatttttttatagtgtaccttaatattttaccaagataacacacctatactatggcataaagtcggcatatagtcggtatatagttggtatatactcagtataaatatgcttgtgttgtatatttttttatatctttatgttattgacaataagtgcattatggcaaaacagaaaggtattgtattttttgaagggactcttggtggtattaatttttattacagaaagggtgtgccaacggccagaagggctggtggaggttttacagctaaagcgataaagcatagtcctaacatggtacgtgtgcgcgaaagcaacagtgagtttgccctgtgctctaagattaacaagtattttaagcttgcgctaaaaccctttttagcaggctataaggatggtactttgcacgccagattgatgcgcttgtttttgagcattaaggatttggatgttacttctgagcgtggccagcgaacggttgggattggttatgctacggaatatggccctagagtgttgagtgattttgtagtgactccagagcgtcctcagttgttttcttgttcttatacttttgattgggctgccttgcgttttaatgtttgggattttagtgttgcggctgccaattttcctaaaggggcggacgttatggagcttgttgttggtgtgctgcgttttgattttgagacgtgcacttatactagtgttatggcggacgctttatatgtgcctagagattttgatgcttcttcttttagtatcagtgttgatggcctgcctgatggtgacggtgtattggttgctgtggcacgtgtggcgttttaccagcaggttaatggagggctttttttgttgtctggtgctgctgggtttggggttgcgatgtttgggtgttgcgatgtttaaatgtttatgtgtttaggcgtttatgtgtttaattgttgagacgttttgatttattcttacttttttaaagacaaaaagaagtcactaaaacgtcttttgctgtaaggggaaattatagggtagctttgggtgttgggtgttgggtattgggtgttgggtgttggctattgggtgtttggtgttgggttttgggtattgggtgttgggttttgggttttggctattggctgttgggtgctgggtttggggttgcgatgtttgggtgttgcgatgtttaaatgtttatgtgtttaggcgtttatgtgtttaattgttgagacgttttgatttattcttacttttttaaagacaaaaagaagtagctaaaacgtcttttgctgtaaggggaaattatagggtagctttgggtgttgggttttgggtgttgctgttataaaaaaagccctacggagtacgcagagcttaagattttcatctacggcatttaagccttattgtgataagattaaagattagaaattttaatctatttcaaatatagtaaaaaatttatacctttgaaaaaagaagaggtgcgtcaacacctcttcaaaagtaaaatgcttataaaagtttctgtaatacaagaacagaggagctttttacacattctcaaaaaataacaacttcaagaaaacatccatacaaacggatgttttttcttttctaatcatttcaaatcacaactgcctaatacaaattctgattttcaaatataattaaaaatattctgcctaatacaatattttttttaattttatttaaaattattaattatggcaaaaacattagggttagacttaggtgccaacagcattggttgggcattaatagatgatgttgataacaagattttaggtattggtagcagaatatttcaagagggtgttgtgaatttaggagagggagaagggagagaagcttcaaaaaatgccagtagaacagatgatagaggtacaagacgtcagttttatagaagacgtctacgtaaacgttatttattacgtgagttagcaaagcacaatatgtgtcctttggattataaggctgtaaagatttggaaccagaaagagatatttggtaatgaaagtatccaagcttggttgcgattgaatccttatgaattgagagcaaaagccattaaagaagaactgacgttagaagaattgggaagagtgttttaccacatgatacaacgtcgcggttttcaaagcaatagtagaagtgtaggggcagataataatgagaaaagtgttatttataaaggcgactctaaaataggtaaaattggtattgcagaaacttctgaaagtataaaacacgcagaaactcttggtacttatttaaatgaaatttatcctaaggaaaacgcgccttttgttggaggtttggagcgtataagaaatcgatatactactagacagatgtatattgatgaatttgaaactatttgggagcatcaaaaacagtatcataaagcgcttactgataatttgaaaaccatttttggtggacgtaaaaaagatggttatgctgaagatggggtgctttttcatcaaagaccattacgttctcaaaaacatttagttgggaattgcacatttgagcccaaaaaaacgaaatgtcctattagtgctataccaaatgaacaacgacgtgtttatgaatgggtaaatactttaaaatgcgatttggcaggagaacctgtaagaattactgatgcagatagagagaagattgtaaaactgttattttctaaagaaaaggtaaagtttaaagaagtaagaaaagctattgataagcttgatagacattatcaatttaactataaagatgatgaccctgtagttggtacgcataccataagcaatttatctaacaaaaagttttttggtaagcaatggtttgatttgacagaaaaagaacaagaagatatttggcatgtgctttatagttttgatgatagagacaagctaaagcagtatgctattgaacattggggatttgatgatggacgagccgaaaagatttcaaaatttaatttaaaagaaggctatgctaatttaagcagaaaggctataaataacattttaccatttttacaattagggtttacttatgatgttgctgttgcattaggaggtgttaaaaatgttttaggtaatgattgggaaacccataaagcatttgtattagataatgtaccagagattgtgcattctaacctaaaaggtggttatatagaccctttaaaagcagtgttaaaaaaagaatgtaacgtatccgataaggcattaaaaaaactgtaccatcatagtagtgctattgatactaatgttttattggaaagactaccgctaggcgttgatgcagataaagagatacaaaacattaaaaaccctgtagtaattacagcactttttgaaatacgaaaactagttaatgaaatcattgatgactatggtaagccagatgagataaaagtagaaatggctcgcgatctaaaaatatcaaagtctaaacgaaatgatataaggcgagagcaaaagcgtttggaacgtgagaatgatagggtaaaagcagaattagattatattggtcagagacatacccacgataacattttaaaatataagttatgggaagagtgtaataaaacttgcccatacacaggtagaaatattgaagttaatcaactgtttagtggtgaggtacagattgaacatattcatccttggagtaaatccttaaatgatagttttatgaataaaaccttgtgctttgcggacgagaacagagctaaaggagataaaacgccttatgagttttacagcaaacaaggtgaacaaaaatggaacgatattaaactacaagctttaagttgttttaaaaacaaaccaccaaactatccaaatgcttataagaagtttaaacagtttgtaaaacaaaagcatgataatgattttataagtaggcagcttaacgatacacgttatataagtaaagaagctaaaaactatttgtctaaaatatgtgataaggttatggttgcgccaggacaaatgacgtctaacctacgacatcattggggtttaaataccatattgaatcaagacgacaatgtaaaaacgagagcagaccataggcatcatgctatagatgctttggttatggcatgtgcaacaagaggccatttgcaagagttgagtaagtggaatagatatgatagacgttatgatttagagcatttcccaaaaccttggactacctttagagaagatgcagaacaagctatagaacaaattttagtgtcccataaaaagcagaagtctatattaacggttagaacacataccaccaaaaaaggaaataaaacgtataagaatataggtgttgctgcaagagggcagttgcataaagaaactgtatttggtaaacgacaagcaccaaatagtgaggaagcttaccatataagaaaaccaatagatagtttgactacagaaaagcaattggaaaaagtggtagacgaaactattaagcagttaatttttaagcgtattcattttttgggaggttttgaaaagggtaagataccatctgaaaccttttttgtagtagatgaaaacggactaaagcaaccgcaaatatttttgcccaacagaaaaggaaaccctgtgcccgttttaaaagtgcgaatgaaagaaaacattggaggcgcagaacaattaaaagatgatactaaccaatgggtaaacccaagaaataaccatcatgtaattatttataagaacgagagcggtaagctacaagaagatgttgtgacgttttggactgtagtagagcgtaaacgaaaaggtttttctgtatatcaattaccagcagatggaaaagacattgttactacattgcaaattaacgatatgtttttgctaggattaagtgaagatgatgttgattggcaagagccaaattatgatttattaaagtctcatttgtatcgcgtacaaaagttatcttctaaattttatgagtttaggctaaatacagaagcttccatacaaaataattttcagccatactatgttagaattcaaagttttggtgatggtaaaacaggatggttaacctttaacccaattaaagtaaaagtgtctgtaacaggtaaactagaaaaggtatgaaacgcttagactttattaaagcctttggattgggtagtactggtttagtaataccgcaaactaattttgcccaaaagccgataaaaatttatgataactacataaaaggtcttacacattatgatcttaataaggtgaaaaaacaaatgagtgtaggtgacgccttgttattacgcagagaaagagaaaacatatatgatagttttgctgtagccgtattttatgataccaaaaagttgggctatttgccagcttatgaaaatgtagttatctccaatttattggaacaaggtgtaaaacttaacggatttgtaagcaagctaaatttacaagatgtttatcaggcagtctctatagaaatatatgcaaatattgtagttgaaagtccttcaatgatacaaaccgatttgttggaacatagagcagatgacgccatagataaatatcgaaaaggaccgtttttttaacagtacgatcattgacattattatggtagtagttaccataccttaaacacaagcgtattataggataaagttttaaaacaccttatttttttaaatggtgtgtttgtgaatctcactatgttcgatttgattaaagattagaaaacacgatattgtagttgccagcgcgatactgcttttgagtgttaaagtggtttacaaacacctcattttattttaatcggtgtgtttgtgaatcttactgcgttcgatttgattaaagattagaaaacacgatatttggcggttctggtgtcacaacaaattacttgttgtggtttgattaaagattagaaaacacgatattcatatacagtccatgctattatcgttaacgttgtggtttgattaaagattagaaaacacgatattttctggtgtaatagtatcagcatctttattgttgtggtttgattaaagattagaaaacacgatattttacttaatggtattatatgatcaaaagttgttgtggtttgattaaagattagaaaacacgatattcaacaaaatcagcaaaccacaggtcgcatagttgtggtttgattaaagattagaaaacacgatattggaggaacattagatgattatcaagaggtggttgtggtttgattaaagattagaaaacacgatattaaaaacgtttggcttgtgtgatgatgtctagttgtggtttgattaaagattagaaaacacgatattaaacaatagacaaattatcattagatacagttgtggtttgattaaagattagaaaacacgatattgcaaaaactatttattattgaaaatagattgttgtggtttgattaaagattagaaaacacgatatttatacagaaagacaagacggcgttctacctgttgtggtttgattaaagattagaaaacacgatattgctgccgttggctgactaacttcaactgtggttgtggtttgattaaagattagaaaacacgatattttttgacaaatcccaacagcggatcctagtagttgtggtttgattaaagattagaaaacacgatattaacaaccttcacagatgcaactatgaatccgttgtggtttgattaaagattagaaaacacgatattagcaataacgaaggtggcagaggatgagcagttgtggtttgattaaagattagaaaacacgatattggaaatcgtgtaaagatatcagcttatccagttgtggtttgattaaagattagaaaacacgatattagtttaaaagtgaatatgcctatgcttttagttgtggtttgattaaagattagaaaacacgatattttctatatcttcgtcctcttggtggccgccgttgtggtttgattaaagattagaaaacacgatattaatcgtccaataattaacgaaacaataacagttgtggtttgattaaagattagaaaacacgatattgcagcaaaacaagaggtgtttggtaaacgtgttgtggtttgattaaagattagaaaacacgatattatattactagattcatcactcttcgcctttgttgtggtttgattaaagattagaaaacacgatattcgatacctggtactggttcattgcagtcgtgttgtggtttgattaaagattagaaaacacgatatttctgctcaattagcctacaacgtcagcgtagttgtggtttgattaaagattagaaaacacgatatttttgggcggttttttagttccagagttcaagttgtggtttgattaaagattagaaaacacgatatttttgcagagcttttccaaatccttttacagttgtggtttgattaaagattagaaaacacgatattaggctattgtttgttgcttgatatacagttaattgtaatgaaatgtcgttttaaaaaatgcttcttttttacagtgattaggtgagattgaggcattttttgttttctagatgggttaaagcttctgctttttattgaaataacagctatggaataattgtgaggttttttgtgtctgagagttacaaatggtgtttaaaatagttctaattgcgttggtaagggctcttttgggacttcggctcgtccccaaaagttcatgatgtttccaaattgtttgtcggttattcgtagaatactaaccttacccagtggtggtaatagtctttttattcttttttcgtgcacatctgcactttcactactagcacaatgcctcatgtatacggagtattgcatcattgtgaaaccgtctttaattaggttttttctgaaacctgaagcatttcttcggtcttttgccgtctctgttggtaggtcgaaaaatacaaataaccacataattctgtatgcatttaattccataataaaggatactttatcttctttcttttgcctgtataacactgctgcaaggaacttgcagttttttgtagtgcaaccatcaacgtactcttttcatttttgaaaaagacagtgcgtgttagaattttcaatagtattgatttcatttgggtattaagttcttgatcatcatagtgctgtacaatgctgtaaaccgcttcgtctaccaaaggtctaaatggttccatgatgtcatctgctagtgcaaaggcgttatatttgcttttgtggtgaattcccagtgtgtttaacaatccactaccagatagtgctctagctgttgcggctcttagaatggcataaccataattgaggaaattattgggatactccccaaagcgttctcttttaaaattatgattaaaaaaagacttccagtaaaggctagctgcaacagcctccatgttggttgagtccccacttttgaccttactagctaaaaattcaaaattatttttagtgttggtgaccttacctaacaatgtgccttgattttttattttgtgttttattgtttgttgccagagttgcttttttagaggaacactagcgttaatttgagccttaaataattcttgttgtatatgatgactattaaggtttaagaccatgccgtttggtaggtgtgatttattacatataataacagcagtattgttgttaactaattggttgagggcagtgatactgatatatgtttctgcgttatctacaacaagaaagcctatatcttctattgggatagacccttccctaaattcatttttaatatttaattgaaggtttttggaagttatcttgcttttttgttctattaaaatggtcttttttaacatattacttttaatttgtactatagataagtaaattatatatactactgaaaattaaacgattaagttgctttttagtatgttgtagtgttattgtgtatcgtttgatatgactaattaattgaatatattgacattctgatggcatatgattttaaagcaatcatacttatctcaacacttaaaaacttaggtaggttggctacttcaacattttctctgggtagtgcattgtttttattgaaatatgtagactacacggccttgatctttgcaaatttgtgcatatcgctaatgaagatggatgttttaataatgttttaaatggtcgcgtctttagcgttaaaagtgacttttgtgttttcaaatacctacttggatttagttccccttcgactacgctcagggcaggccaaaacggctacgctcattgcaggctcaagcgaatccactcggaattgcttacgtctgtgcttaacagaaaaatattaactttaatcccttaattaatagttttacgagactattctacgtgatttgaccaagtaacttattgaaaaacaataattaagcaaattttatgaaaaaaaacctattcccaatttttgcaattggacttatgaccattagttgtaacgcacaacaaaaaactcctgaatttgaaattgaaactgaaaagtggaaaaaagaacttctcgcaagtggtgaagttggaaatccttgtagagaagataatgattggcaaaaatggcaagaagaaaacccaaaagcatatttcggattacaagaaattcaatcaagcgaatcagatttcaattctgacggaattagagatggactattttactttcctgccgaaaattgtgttggtggaaatggaactggttcagattttggaatgttagtttattcaaaagatggtcaattccttacaaataaaaacattactcaaacaatcgaaaacggaataaaaaccgaactcgcaaaaattgatattaatgatctttacaaaatatatattcactataaaggacttggaaaaacaattattggagactattatgcttggtcagaagatgatgcaaattgctgcccaggtggaacaggaacttttgaatatagtccgactgaatttacaactgaaataaaaaatagaacggaataaaaactgcgtagaataacatggatactaagcagaacgtaacacataaatatatggaaagcataacggttcaaacttctatcaaatccgaccttgacagggtttgggactattggacgcgaccagaacacattaccaattggaactttgcgactgatgcatggtgctgcccaaacgctgaaaatgatttaagaccgaatgggaatttctgttggcgcatggaagcgaaagacggtagtatgggctttgattttacgggaacgtatgacaaaataattgacaaggcactgatttcttacaaaatgtcggacggacgaaacgtggctattgcatttttgcaaaacggagatgaggtaaatgtgagggaaacatttgatgcggagggcacacatacggacgaacaacagcgtgctggttggcaggcgatactcgaaaattttaaaaaatacgtggaaacgcagtagcctgatataatgagcgaaaggctcgcttcaatttccgttggatacgcctttacccaaagatttaatactaaaaatgataacgtaccgtaaaacgctattaaatgcataaagcacgtcaaccactttcaacaaagcagccgcctattccagagcctgattataaggttattgaagattggctggcaaactgtattatgccaggcattacgccaatgcttaaaactattgatagcctcatccacgatgccatccccaatctgcattacgctattaaatggggaaatgcctattacggaaccgatgcattgggatggctgattgaagttgcagcttatgaggtgtctgctaatattgtttttttgaatggtgcagcttttgacccacaaccacctttaggaacaggcgaaacaagatatattaagctaaagacactagatgaggtgaatgatgcgcgcgtgattgattttataaaacaagcagcaaattataatggatggcaataaataacaaatgacttacaggaatgtgtataggttatagcggtttgggtactactcaaaccgcttttttgtttgaaatagcgtatattgctatacaccaagccattacataacatcaattactgcttatacataaaccgtggtgcttaattattacgaactgctaactcatgataaaattctttagaaaaattcgccaaaacttacttatggaaaataaaattggaaagtactttaagtatgccattggggaaattgtgcttgtagtcatcggaattttaattgcattacaaattaacaattggaatgagcaacgcaaagaacatagtaaggaacaagcgctattaaaaagacttgaaaaggaatttatatctaatagaaatcaacttctggataaaatagaacttagacatactctgattgaaaattgtaggcagttgttagactaatatgatgaccccgaaaatgctacacgcgatagtatccttgtttatttaagtactattcaaccaccaacctttgacccaattcagaatgacttggtaagttctggacatatcgacattttaaaagatgaaacgttaaagcaactacttgttaattggagcactgatgtgattcaacttcaagaagtagagcaagtgttttttagattttgtgaacaacgcatttatcctcatctcaatgccataggtatacagcgtgatgtagcatacacccattggaaagacgcacccaaaaacttgttagaatctaaacaggttaaaaacctcatacctggaacatcaaaactcattactaggactacgaacgaacttttgaaagactacaaattagaaggtaaggttgcttgggcattaaccctaaatgtgtttaataatcaagaatccgaaaccttaatgaaaaggattaatcgtattcttgaagtaatagaaagccaaataaaaaactaaataaataaagcacaacgctagccaatgataaaattctttagaaaaattagacagaacttactttcggaaggaaaaaccggtaagtatctcaaatatgccatcggagaaattgtacttgtagtcattggtattttgattctgatctctacatttacaaacttgggtaggttggctacttctacagtttctcttgcaggtgctgtgcttttattaaaatatttggcataaacggcactgatttaaggtttagcgactctttttatggcttatattcttttgaagacttattgtacttgaacctttatatccgctaattcaaaaaccatatactgcattaaccgttcaacggttgtggcatcggttgtgttattttcggtatgaaatgaagaatataacacacctccattaccatgtaagaaggtgtaggccaaatgcttattttcgcttataccatcatattctattgggccgtataaccaaggaataactgttgcagcattgtaagtatctacaacctgccaacctccaagaaattcatcgatagttactgtggcgtttggtacttgtataccaaagtttaaatctaaccaatctattagtgtttggtctaggatttctgcatcagtagataaagacgttccgcttttttcaggattatagaaacttaaatagtcagcgccaccttgagttataaaattaaggtaggcatatgcccaatctgttgcatataacaaaccgccattgtttacataatcatttagattgttgccaaaatctgtttttgtttcatttaagccacagtttaagaaaataatatcgtagttgcctaaaagcgttggagattctataaactctccaaacccaaaatctacattaggtgctaacattggattggttcgttttgcgctagcattgctctggtggtgaccatgatgtacattacgattggcaatatcttgaccatcaataatatcgaaaagcggttgttctgttattggatctaccaaaccgatgttgtacaagacctcttcgatatgatcgtagcttcctgtaacaacggcgattgatggtaattgattaattggtaaactatctagattgaatgtaagtgcatcgataaggtcgctaaggtttgccgaggttgaggttttaaactgcccctttgatatagacaactcatagctgtctttagtaaggttgttgagtataaaattgccttcactatccgtaagggcatcttgtattaaggtaccgtctttatatagtttaacactggctttagccactgggtctaatccgtttggcgttagaaattttccggtgatgttgtaatctccagagctatcgttgctttgctctttagaacacgagaaagcgaaaactaaaacgaaaagaagtgcaagtgattttttcatagtatggatgtaattaattggtttgttatagttgtaggtagcaaagttgttggagggttactttggttctacaaggatataacagatgaggttgtgtttttcctagtctctttataaagttaatgaaaaatacatgaagttaggtatagacattttgttttaaaaacccgaactttgattttgacctatttgataataactaagcctgacaacgtgtataactcatggctattcaattgcttaaacaaagatggggtgtgtttagcttttagctcaaccgaaaaataatcgctaacttaaccgtaactgaattttatacttttccgataagtgtcacaccacctatttcaccgcaatcatactgatctctacatttacaaacttaggtaggttggctacttcaacagtttctcttgcaggtgcagtgtcttcattaaaatacgtggcatatacggcattgattttggcaaagttgtgcatatcgctaataaagatggatgttttaataacgttattaaaggtcatgtctgcagcagctaaaactgctttcatgttttccataacctgttttgtttcggcctcaatggtatccataaccaattgcatggtcttaggatgcaaggctatttgcccagaggtgtacaaggtattgtttactaaaacagcttggttgtaagggccaattggtgctggtgcgtttggtgtgttgattatagttttcatgcgtataggttgcttcaattattagtgggtttaaaattcggtaatttgcgtggttttttagaataaaatggtgactattttgtttttggttttgtttggtcttcgacaggctcagactgaccgttgttttaatggttctcgatacatttttaatcgctttgctagcggttaaaaacactcgaactgacggtagatttgttttgtggtttgatgagatgctgaattactgaggtaagttcagcatgacatgttggaatttggtttggcggttactgtgggtattggttttgtttggtcttcgacaggttcagactgaccgttgctttaatggttctcgatacatttttaatcgctttgctagcggttaaaaacactcgaactgacggtagatttgttttgtggtttgatgagatgctgaattactgaagcaagttcagcatgacttgttggaatttggtttggcggttactgtgggtattggttttgtttggtcttcgacaggctcagactgaccgttgctttaatagttctcgatacatttttaatcgctttgctagcggttaaaaacactcgaactgacggtagatttgttttgtggtttgatgagatgctgaattactgaagcaagctcagcatgacatgtcgcaatttagtttggcggttactgtgggtattggttttgtttggtcttcgagaggctcagactgaccgttgctttaatggttctcgatacttttttaatcgctttgctagcgattaaaaacactcgaactgacggtagatttgttttgtggtttgatgagatgctgaattactgaagcaagttcagcatgacatgttggaatttggtttggcggttactgtgggtattggttttgtttggtcttcgacaggctcagactgaccgttgctttaatggttctcgatacatttttaatcgctttgctagcggttaaaaacactcgaactgacggtagatttgttttgtggtttgatgagatgctgaattactgaagcaagttcagcatgacatgttggaatttggtttggcggttac

SEQ ID NO: 2641 - DNA, 23405 bp, synthetic construct
  misc_feature 1..23405: note = Synthetic
  source 1..23405: mol_type = other DNA
aggtcaagttatcatagatcacggttttggcattggcgttgatggtacaatccaagaagtcgggtattttaatcgacgcatctttagcacttgaggttttggatgctggcgctgaagcttcggaaggattttctgcagcggccacatcttgggtcatgaaatcattgagcacaaaggtgttggaactcaagttgaaagtgccctgaagctgtttattgctcaataagaagcccaataaattgttgatagtcccggtggcgctgaagtcgctgcttccggttttcgccataaagttgttgagcgtcaccgtgctcgggttgaaattcaagtcggctgtattgatttgtatcgggtgcagcaagtcttccgaagaaaatacaaaatcgctcacactcatggttccgttggctttgatacgctcgtaggcattcttttcaatggcatccatatcgaaggccatgttgagttttgcctttaaaatcccgctcaactccttgtcaaaatcgataggataggccttgctgaggttggcgagattgagcaccccatcaatattggcattgacgagcatgttcgcggtaagattttttatggtggcagaagatttgaaccggtcttgatcaatcatgaaatcgagcgcgttgatgttcacataagtgtcatccacatttccggtagtgttcttgatttcagtatcaatgctgatgttgctcacgcgctttggcaaatcgggatatttaaaggaggcattgcttgatttgatgctaatgtccaagtttgggatggtggtttcggtaattttacctttgatcaaaccacttaccttaaagtcgccgctggtctctacattttcgatgtttttagaatattcctcaggaattaccgccaagaaatccttgaaagacgagcccggattctcaaagctgatgtcaatcatttggccttcatccagcatttgtacgtagccgttaaaggttaaaggcagttggttgatgtagcccttattatccataaaggtgtatttctgctgctccaaatccaaaccaatcagggcatcgagctttattttattgttgttgaggtattgcgtgctgtcaatggtcatgctcacgttggcgttggtcttggtatccagttccgatttttctacggaaaaaatgccattgccttggtgattgagctctgtgatgtataattgcgtattggaaaccgcgtctaaataggtcactgcggaattgtctatggtgtatttttcaatatcaaatttaaaactgctgttggcggtatccacagtttgcgttgcgccggaagcttccggttgcttggtaatatcataattgacattcccaaaagcatctgttttgagcgtaagcagggcttcatcaatggcaatggaattgaccacaatagggtcttcatcggcatttttgaaaagttctttgatagacatggtaaaagcgatgtccttggcactcataaaggtttcgccctcaaaaggcgcaaagttggtgatgagcaaatcttccacggttacgtgtgcttgtggaaaactgcgtagaaagcttagacttacatcgctaaactccactttggcgttgaggttttgattgacaaatttcttaaccatgtccttgatttgcccctgaaatgcaaacggaatgatgatcaataacagtaaaatggcaagaatgctaatgcctaagactttaagaacttttttcatggatggaagtatttgtaggtcgtatctattttagatttaggccgtaaaggtaaattattaggctttgactttccctaaaatagttataatacttgagctaagaggaagtctttgggggaatcaagattcaggattcaggattcaagattccaaattccaaattctagattccagagccatgaccaatacctcagaggtcaaaagttcgttcttcgaatttaaagttcaaagttcatcgtttgaagcatcataaaggataaggaaaataaaagcccgcttaatagatgaagaaataacctaaaaaccgcttagagcatctcaagttcttcgttattcttcagcttaaagcgcctgttgaaaaggtacacgcctaaatagagaaatggcgtatccagcaaggcgatgattactttaaacaggaagccactaatcaataagcccttaaaattttcccatgggatgatcccgaaaaacgaaaggagtaggataatggtaaaggtgtccacaaattgtgagaagaaggtcgagaggttattccgaagccatagttttttacccttggtgacccgtttccaaaaatgatagatctgtatgtccacaaattgtgcaaagaggtaagtgatcatgctggcaaataccgcaatggccgaattcccaaacacgaggctaaaggtggcatcatctacaaaagaccaggaggtggcaggcgccaagtctgacactaaaatgatgagcaatgaaaatatggaagcgaaaatacccgcgatcaccacttggttcgcgcgcttcttgccatagatttcgctaatgagatcggttatcaaaaaggtaacgggatagggtaaaacgcctacagaaatctcaaaaagtttgctgccaaagatctcaagttcgaaggggtgccaataaaagaatttctgaaatataagattcgagacaactaaggaggtgataaacagtgcagctaaaaataaataggccttttgtgcggcaagtttgtcttttaaggtcataaattgtgaataaatacttgttgcaaagataaggcaaacccaaaatcttttctttattttgatcccgattatgaattcaaaccaccatgtttacatcgcccttggcagcaataaaggcgaccgattaaagctcttgcaggacgccgtgaatttgatattttctgaaattggaaacgtcaacagcatcgctagggtttatgaaacaccagcgtttggctttgagggcggcgattttttgaacacctgtattttggtggaaaccactttttctgcggaaattgtgctgcaaaaactccaagccattgaaagcagaatggggcgggaacgcacttcttctgaaacctatcaatcgcgatgcatcgatttggacatcctgttttttgatgccgaaattattgctacggaagatttaaaggtgccgcacccgcaactgcaacatcgtaaatttgtgctgcaaccactgcaggatattgctgcaaaactgaagcatccgcaattgcaacaaacggttggcgatttgctaaaaacctgtttggatgaaagtagcattgagcccatcaatatttggctgaagaatcccgcaaaacaatatgacttttccaaatacaattacgtcgcgattgaagggaatattggcgccggtaaaaccagcttggcgcatcaactgtctaaggatttcaatgccaaactcattctagagcgctttgccgacaatgcttttttacccaagttttacgaagagccgctgcgttatgccttcactttggaaatgtcctttctggccgatcgctaccaacaaattagcgatgatctttcgcagttggatctgtttcgggattttatcgtgagtgattatgacatctataagtcactcattttttcaaaaatcactttgccagaagatgaattcatactctaccgaaggctcttttacctcatgtacaaagacatcgctaagcccgatctctacatttatctgtatcaaaatacccaacgtttacaggaaaacatcaaaaaacgcggtcgcgattacgagcaaaacatcgaggatgactatttggataaaatcaattcgggttacttggacttccttaaaaaccaaaccgaactcaaagtcaagatcatcgatatttccgaacgtgattttgtgaataaccggaaggattatctatgggttttggagcagatagtttgagctgaacttgaacttgaacttgaaaacgaacttgaacttgaacttgaaattgaaattgaacttgaacttgaatttgaatttgaaaacgggatgagcttcaaaaatcagcaatcagtaatcagcaatcgttaatcgtaaagccaacttcgagattcagttctcagttctcagttctcagttctcggtcttcagttgaagttgaacttgaacttgaacttgaaaacgagatgagcttcaaaaatcagcaatcagcaatcgttaatcctaaagccaacttcgagattcagttctcagttctcggtcttcagtcttcagttgaagtcaaacttgaacttgaacttgaacttgaatttgaatacgagatgaacttcaaaaatcagcaatcagcaatcagcaatcgttaatcgttaatcctaaagccaacttcgagattcagttctcagttctcggtcttcagtcttcagttgaagtcgaacttgaacttgaacttgaatttgaatacgagatgaacttcaaaaatcagcaatcagcaatcagcaatcgttaatcgttaatcgttaatcgtgaatccaacttcgagattcagttctcggttctcggtcttcagtcttcagttgaagtcgaacttgaacttgaacttgaatttgaatttgaaaacgaaatggagttcaaaaatcaaaaatcagcaatcagcaatcagcaatcagcaatcgtcaatcgtaaagccaacttcaacattcagcgttccatattcagtattcattattccgtctccggtctctaggaatacctcacagcagctgtaatttagaaaacacatcccaaaccacaaccccacaacttaccgagatattgagcgagtgtttggtcccaaactgagggatttccaaaacggtatcgctggcatctaccacatcttgcgccacgccttttacttcatttccaaacaccaaggcgtaccttgtttgttgttgaggtttgaaatcgttgagcatcgtggcgtgttcggcttgctcgatagcgcagatgtgcaccttgtcttttttaaggtttttgatgacctccagggtgtgttcagcatattcccaagccacggtttcggtactgccgagcgccgttttcctaatgtcgttgtgcggcggtgtggcggtgatcccgcagagatagattttttcaatcaaaaaagcatcgctggtcctaaaaacggaaccaatgttgttgaggcttctaatattgtccaaaacaataatgataggcgtcttttcagcagttttaaattctgcaacctctagtcggtcgagctcttcgttttttagtttacgcatgattggcttttgagagacctcacaggttttgaaaacctgtgaggtctaattgattgatttctttttgctgccaatggtaattttttagccatgaacttgtgggtaggcaggtttgtggcaacccattttcaaacaacagcattataaaatttggcgttcatggcaactccattattatcaacaattgtaaataacttgtgagccttccgttttagaaagcctcaaaatataagtaccttagcggcaatgtgattctaaacattttcagtaacaaaaatacacaattcccttggccaaaaaagcaaaaaaagagacgcctttaatgaaacagtacaacgccatcaaggtcaagtatccagatgccttgttattgtttcgtgtgggcgatttttacgaaacttttggtgccgatgccgtaaaagcgtctaagatcttggatatcatcctaaccaaaagaggcgctggcagtgaaacggaaaccgaattggcgggctttccacaccactctttgaataattacctgccaaagctggtcaaggcgggttgcagggtggccatttgtgatcagcttgaagatcccaaacaaaccaaaaccattgtgaagcgtggcgtcactgagttggtcacgcctggcgtggcgctcaatgatgatattttacattccaagaccaataattttttggcttcggtatactttggtgtcaatcaggttggggtgtcttttttggacgtgtccaccggggagtttttaatttcccagggcaatgccgaatatgtggataagctgcttcaaaattttaggcccagtgaggttttggtggccaaaccaaataaaaacaaatacaaagccgagtttggcaacgactttcatgccttctttttggaagattgggtgtttcaggaagattatgccaatgagatcttactaaagcatttcaataccaaatccttaaagggttttggaattgatgatctttttgagggcattggcgctgctggtgccattttgcattacctcagtgaaacccaacatcataaattggctcacatcacttccatacagcgcttgaccaagggggagcatgtttggatggaccggtttaccataaaaaacttagagctttaccattccaacaaccaaaatgcggtcacgctggtagatgtgattgataaaaccatttcgcccatgggtggaaggctcctcaaacgttggctggccttgcctttggttaacttggaacagatcaaagaccggcatgatgtggttagttttttaaagtctgaaaccattttgttgtccaagtttcagcttcagttgaagcaaattggcgatattgaacgtcttatttccaaagtggctacgggtaaaatctgtccgcgcgaggtggttcagctcaaaaatgcgctcgaagccattgtgcctataaagagtttggctacagcttcaaaaaattcagctttgaatgccattggcgaaactatggatgcctgtgaaggtctaaggcagcgcatcaaggcgaccctcaatgaagaggcaccggtcaatattttaaagggaaacacgattgcttccgatttttcttcggaattaaaagaactgcgaggcctatctgcctccgggaaatcgtatctcgacaaaatgctggcgcgcgagaccgagcgtaccggcataacttcgctgaaaattgcttccaacaacgtttttgggtattacattgaagtgcggcacacccacaaggataaagtgccggcagattggattagaaaacagaccttagtgagtgcagagcgctatattactgaagagctcaaggagtacgaaaccaagatcctgggcgctgaagaacgcattttgttgattgagcagcagttgtttgctgaattgatcaatgacatggtagcgtttatcaagccagttcagcaaacctcaacccttatcgcaaaattggatgcgctttgtggctttgcgcaattggcaacagaaaataattacagcaggcccaaacttaccgaaacctacgcgttggatatcaaaaacggaaggcatcctgtgatagaaaagcaattgccacacggcgaaccttacattgccaacgatgtgtatttggatcgcgagaaacagcaaatcatcatgatcacggggcctaatatgtctggtaaatcggccattttgagacaaacggcacttattgtattattggcgcaaatgggtagttttgtccctgcggaagctgccaccattggcttaaccgataagattttcacacgggtgggtgccagtgacaacatctcaatgggcgaatctacctttatggtagagatgaatgagaccgcttccatattgaacaatatctcagaccgaagcttggtgctattggatgagataggtcggggcacgagtacttacgatgggatttccatcgcttgggccattagtgaatatttgcacgaacacccgagtcgcgcaaaaaccttgtttgccacacattaccacgagctcaatgaaatgactgaaacttttgaccgcatcaagaatttcaacgtttcggtaaaagaactgaaagacaatgtgttatttctaagaaagctggtagcaggtggcagtgagcacagtttcgggattcatgtagccaaactggccggtatgccgcagcaagtcatacatagggcgaataagattttaaagcagctcgaaaaatcccatagcagcgaggaattgaccaataaagtcaaaaccttgagcaatgacatgcagttgagttttttcaatttggacgaccctttattagaacagatcaaggaagaaatcatcaatatagatatcaataccttgacccctgttgaggcgctcatgaaattaaatgaaatcaaacgcatgttggttaagaagaagcaagcgtaaaaaggctcatggttaatggttgagactctaaaagtctgagttgcaaaatatataaaccaaaacgcgatagggattaaacaggaaacgccattgtgttgttctaaattgggcatagtagcgtcacgttaggtttagacttttaccgaatgttaaggatgagtgcgacgttaggattttaaagacagggttctcaatagattactgagcaagattttgatctggattctttcttctggagcggcttccaaaaaaaagcagaaattttaataaaaaggctttgcatttctgataaaagtcttaaatttgccaccgcaattacaggcgaaagtctagtaaaattgccaacgcgaaagtagctcaggggtagagcatcaccttgccaaggtgggggtcgcgggttcaaatcccgtctttcgctcatattgaatattttcttgtacaagagagcattattttttagcgagaacatagcgactaatgtcgcgcctgcctgccgataggcaggggttcaatcccgatagctatcggggcgtctttcgctcatattgaatattttcttgtacaagagaacattattttttagcgagaacacagcgaccaatgtcgcgcctgcctgccggtaggcatggggttcaatcccgatagctatcggggcgtctttcgctctttttttattgaaaataccaaagaacgtacacttttatgttcaaccaaattgaaacgcggtttcaatttgctgaagtggtggaattggtagacacgttggacttaaaatccaatgtccgtttaggacgtacgggttcaagtcccgtcttcagtacagatgaaaagtcgaaacgaaagtttcggcttttttgattttaaaaagttcccgaatgcttgcattcaaggaaactttttgaaaacaacaaagcgatccatttttatggatcggcttttctcaagatgttgaaataggactcggcggagccacgtcccgtcttcagtacagatgaaaagtcgaaacgaaagtttcggcttttttgattttaaaaagttccagaatgcttgcattcaagagactaactaattttcttgcattggcttttctcaagaggcaaatcgctacattccattgaaaaatctataatttcattacttcacgattgcattctatactttttttttaaatttcaagcgtcaatcgtcaatcgctaatcgtcaaccctcaaccttattttcttttttgattttcataaaatcaaaacttcaatattttaaacaaaaaaagccccaccgaagcaggactaaagattttcatctacggcatatagccttattgtgataagatttttatctaaacacaactactcactacaatgtataagtgatacgatgaattgagttcagcaaatatataaaaatataatctactcactacataaaatttaattatatttgtgctctaaagaaatctgtcatgaaaattgtccaaaaagaagaagataacttctcaaattctattcgatcttttgattggtatcaaagttatacaggtggtgttaattttgaaactgaaatatattgcattgagcctaatcattacattaccaagccaaaatggaaaacttgcgaaatctgtagcgcaacgataagagaaagacaataaaaaaagtcccaccgaagcaggactaaagattttcatctacggcatatagccttattgtgataagattaaagattagaagttttaatctggttcaaatgtaagaaaattttttaatatacaaatgaggtatcccacgtaacttgtcttaaagtttttcgttaagtttagccttcattaaaatcaataagaaaagcatggcaagaattttaggattggatttgggcactaactcgatagggtgggcgttgatagatgatgaaaaaaaagaaatattaggtattgggagcaggatattcccagaaggcgtggtaaatcttggggaaggagaggggcgagaaacctcaaaaaatgctagcaggacggaagataggggcgttagaagacagttttttagacgtcgtttacgcaaacggtatttattaagggagctggcaaaacacgatatgtgtcctattgattataacatggttaaagtttggaatcaaaaggagatcttcagtaataaaaatttgcaagaatggttaagactgaatccttaccaattgcgtgctaaagcgattaatgaagaagtgagtttggatgaacttgggcgtatattctatcatatgatacaaagacgcggttttcaaagtaacagtaggagcgctggtgcagagactaatgagaaaagtgtcatttttaagggcgatgccaaggcaggaaaaataggtattgcagaaactgccaatagtatagaagatcatcaaacacttggctcttatttgaaccagatatatcccaaagaaaatgcacctttcactgatgaattggagcgcattagaaatagatacaccacgcgacaaatgtacattgatgagtttgaagccatatgggagcatcaaaagcagtatcacagtgagcttacagatgagctgaaaaccatatatggcggccgcaaaaaagatggtttcccagaagatggtgttttatttcatcaacgtcctttgcgatcccaaaaacatctggttggcaattgctcgcttgaaccaaaaaagaccaaatgccagataagcgcaatccctaatgagcagaggcgtatttacgaatggctcaataccctcaaatgtgatttggctggggagaaagtcaaaataaattcagaagaaagagaaaagattttagatctcttgttttcaaaagagaaagtaaagtttaaggaaattagaaaagccattggcaaattagatgggcattaccagtttaattacaaggatgacgatgctatttatggaagtcataccataagcaatctatcaaataagaaattcttcggtaaggcatggtttgatttttcagataaggagcaagaagatatttggcacgtgctctacagttttgacgatcgggataagcttaaagcatatgctcttgaaagatgggagtttaacgaggagaaggcagagaaaatttcaaaatttaatttgaaggatggttatgccaacctaagcagaaaggccattagtaatatgctgccatttttaaaattaggttttacttatgatatagcagtggcactaggaggtgtgaaaaacgctctgggaatcaaatgggaaccacaagaggatttcatgctgaataatgttcctgaaattgtgcgatccaatctcgaaggcggttacatagcacatctcaaggaaatgctaaaaaaagaaagccagttatcagacaaagaattagcgaagctttatcatcacagcagcaatattgaaatcactaagttgttggataggttgccagttaacccagaagcggataaagaaatacaaagtattaaaaaccccgtggttatcactgcgctttttgaaattaggaaattagtcaatgaaataattgatgattatggaaaaccagacgaaattaaagtagaactggcgcgagacctaaaaatatcaaagtccaaaagaaatgacattagaaaggagcagcaacgtttggaacgtgaaaatgatcgggtaaaggcagagctagattatattggtcaacgaccaacccatgtcaatatcttaaaatataaactttgggaagagtgcaatagaacttgtccatacactgggcgaaacattgaggtaaatcaattgtttagtggggaagttcaaattgaacatatttatccttggagtcgttctttaaacgacagctttatgaataaaacgctttgttttgtagatgagaatggggcaaagggtgatttaaccccttttgagttttatggtaaattgggcgaacaaaaatgggaagcaattaagctacaggcattaagttgtttcaaaaacaaggcgcattatccaagcgcttattttaaattcaaacaatttgtaaagcaaaaacacgattcagatttcatctcaagacaacttaatgatacgcgctatataagcaaagaagccaataattatttatctaaaatttgcagcaaggttatggtggcaccaggtcaaatgacctcaaatttaaggcatcactggggattgaattcggttttaaatttagaggatgatactaaaaccagagacgatcatcgtcatcacgccattgacgctttggtaatggcttgttcaacaagaggccatctacaagaattgagtaagtggaatagatatgacaggtcttacgatctcaataatttccctaaaccgtgggaaagctttagggaagatgctgaaaaagcagttgacgggatattggtttctcacaagaaatcgaaatctattcttaccgtaagaaagcatataacagagaaaaatggcgaaaggtacaccaacaagggagtagcggctcgtggacagctgcacaaggaaacggtgtttgccaaaagacaagctccaaatagcgacgaggcttttcacgtgaggaaaccaattgatagtttaacaaccgaaaagcaattggaaaaggttgtagatattactattaaacagttgatttttaaacgaattaatgtattgggaggttttgtaaaaggaaagattcctcttgaaacattttttaccgtcgatgaaaatggaaacaagcagccgcaaatctttttacctaataaaaacggaaatccggtccccgtactaaaagtgagaatgcgggaaaatattggtggtgcagaacagttgaaagatgatctgaatcaatgggtcaatcctagaaataaccatcacgtgttgatttataaagatgacgaaggaaatttaaaagaagacgtcgtaacattttggacagttgttgagcgtaaaagcaagggatttcctgtatatcaattgcccccagatggaatagaaataattacagcaatgcaaataaacgatatgtttcttttgggattaaacgaggatgagattgattgggaaaaccttgattatgtttttcttaatgactatttatttaaagttcaaaccttatcatctaatttttatgaatttagattaaatagagatgcgacacaaattaaagatacaaattccaacgtttttagaagaattcaaagttttggtaaaggtaagaccggatggctgacgtttaatccaatcaaagtcaaagtttctgtttcaggaaaaatagtaaaaatttaataagactaaaatgaaaagtgtgattttacatcaaataaattttttgagtcatgacgcggcaaagcttttccttaaccaaacaaaatgacgaatggtaaaaaataaaatagcagatgacgagttcaaatgcaaaagtgaggccatcaattatctcattaaataagcacgaaagcaaatagtgtattatgattttgtgcgaatgaaaatagcgagcaaaacggttttgctaaaaaacaatcccgggaagtaatgttagatgaattcaaacaagatttccatatgaggaaagttctttgacataaatgggtttattaagcaaccaaaccacaacggagaaatgatcttttcaaattttcgaaatgattttccgttgtggtttgattaaagattagaagacacgatattatttggtatttcaaaccatcttgcctgttgttgtggtttgattaaagattagaagacacgatattcagcgtctgaacaatcaagcacaaattgtggttgtggtttgattaaagattagaagacacgatattaatcttttgtgcgcccaaatgcaatcaatggttgtggtttgattaaagattagaagacacgatattgatgcccatgtttaaataattctctggcaagttgtggtttgattaaagattagaagacacgatatttctgcacgctcaatgtccacatctcctgtgttgtggtttgattaaagattagaagacacgatattaaactaagatctgttaatggcggtataacagttgtggtttgattaaagattagaagacacgatattcagcattgtcgattgaataaagtccaccacgttgtggtttgattaaagattagaagacacgatattcacaaatagagtaatgacctctgctgatgggttgtggtttgattaaagattagaagacacgatattcgtgttaaacgaacagcctactttagactagttgtggtttgattaaagattagaagacacgatattctttattttagtccaatcggcatagaggtgttgtggtttgattaaagattagaagacacgatattatcgcaatctatgagtgcggcaaaataggggttgtggtttgattaaagattagaagacacgatattttcctaaatgcaacaccaggcgatcgcgttgttgtggtttgattaaagattagaagacacgatattgagtatatgagatagatggtgtgatgtatgttgtggtttgattaaagattagaagacacgatattttgggttatttctgattgaggatcgtttttgttgtggtttgattaaagattagaagacacgatattcattgtagctgttttgattgcggtactatagttgtggtttgattaaagattagaagacacgatattcaaaaaaaatttatctcgaggagtttttaggttgtggtttgattaaagattagaagacacgatattttcgtgtaagcgatcactaacatggtaaggttgtggtttgattaaagattagaagacacgatatttttgtgccttgaaacgcttggacgcattccgttgtggtttgattaaagattagaagacacgatattcaaccactaaatgggaatattgtaagggtggttgtggtttgattaaagattagaagacacgatattatagaagaaattattgaatcttacctagcggttgtggtttgattaaagattagaagacacgatattaatatctgaaccgctaattttagtactggcgttgtggtttgattaaagattagaagacacgatattccattagaaaccacaaagaaacattttagggttgtggtttgattaaagattagaagacacgatattttgggttatttctgattgaggatcgtttttgttgtggtttgattaaagattagaagacacgatatttattgttttaatttaaatttgttgttcttagttgtggtttgattaaagattagaagacacgatattaaaaccctttatttcaatgagctgttttgtgttgtggtttgattaaagattagaagacacgatatttttggcatctgattaaaccttttaagagatgttgtggtttgattaaagattagaagacacgatattgtgcgaccatcgtggtatcggctattatttgttgtggtttgattaaagattagaagacacgatattagaataaatccgaataagttcagggatgatgttgtggtttgattaaagattagaagacacgatattaagaagatactgcgacaggggatttattaggttgtggtttgattaaagattagaagacacgatattgcccatcaaggatcctgagccatacgaagcgttgtggtttgattaaagattagaagacacgatattaaaattggttttctggtggcgctggtgcgtgttgtggtttgattaaagattagaagacacgatattattacggaaggcaaagtgtttaaggaaatagttgtggtttgattaaagattagaagacacgatattttttattccaaagaccctgcacgcaaattggttgtggtttgattaaagattagaagacacgatattctcggtctttaaatcgtcttcggttatgtagttgtggtttgattaaagattagaagacacgatattttgtaactgtagcaattcacacgacacagtgttgtggtttgattaaagattagaagacacgatattcactaccatatagcgactgatacgtacctagttgtggtttgattaaagattagaagacacgatattagtatttggttgggcatggccactcttgtggttgtggtttgattaaagattagaagacacgatatttggcaatgcatctaaagacaatcgcaccaggttgtggtttgattaaagattagaagacacgatattagctagaaatgcattaatagcacgaggttggttgtggtttgattaaagattagaagacacgatattcaatacccaggacaccggcagctgttgacggttgtggtttgattaaagattagaagacacgatatttccttaaaaaactcggtcgcagtttctgcgttgtggtttgattaaagattagaagacacgatatttctcaagccggttgcatccaagcattctgcgttgtggtttgattaaagattagaagacacgatattaatcccctacgaatttcaattagtgatggggttgtggtttgattaaagattagaagacacgatattattagccttttcttgatttaaaaaagcccagttgtggtttgattaaagattagaagacacgatattgaacgctgaagcgtaaaatgtcatggttggttgtggtttgattaaagattagaagacacgatattggaaccgaaatactagccttcaagtcccaggttgtggtttgattaaagattagaagacacgatatttacaggagcgccatcccgattggaaggtggttgtggtttgattaaagattagaagacacgatattctaaagctgttttaacggcattataatgtgttgtggtttgattaaagattagaagacacgatattctggtttttcacaaacttggagaggatgcggttgtggtttgattaaagattagaagacacgatatttctggattaattaactaatatctacctacggttgtggtttgattaaagattagaagacacgatattcgcaagatgttttattcttacggcaatggggttgtggtttgattaaagattagaagacacgatattttcctaaatgcaacaccaggcgaccgcgttgttgtggtttgattaaagattagaagacacgatatttcctaaatgcaacaccaggcgaccgagttgttgtggtttgattaaagattagaagacacgatattcggcaataaaatacatcggctcgatcttcagttgtggtttgattaaagattagaagacacgatatttgcttttaaaaaacctattacgatgaatacgttgtggtttgattaaagattagaagacacgatattcataagacgtttataactaggcgtttttaggttgtggtttgattaaagattagaagacacgatattataatatatatttatgatgatattatataggttgtggtttgattaaagattagaagacacgatattcactaccacatagcgactgatacgtatttagttgtggtttgattaaagattagaagacacgatatttatagtagtaatagtatattcattagtaccgttgtggtttgattaaagattagaagacacgatattaaatggtacaatttaataatagcactatagttgtggtttgattaaagattagaagacacgatattaagctcccggtcacaacgttattagcgttagttgtggtttgattaaagattagaagacacgatattatctcggcatactcaaactctgggaatacgttgtggtttgattaaagattagaagacacgatattcttgagactgccattttatagctttgacaagttgtggtttgattaaagattagaagacacgatatttcacatcgtaatctccatttaatgttgctggttgtggtttgattaaagattagaagacacgatatttcatctacgtggtcattgatgcttataacgttgtggtttgattaaagattagaagacacgatattattataccgcatttgcgctaatagcacccagttgtggtttgattaaagattagaagacacgatattagaaccgtggttctaacctttcaatcccaggttgtggtttgattaaagattagaagacacgatattagggatctcatcggattgtttgaatattgcgttgtggtttgattaaagattagaagacacgatattaaatacgtacaaagcacactactttgatgcgttgtggtttgattaaagattagaagacacgatattagcaacggatgatcgcggccaagcccggcgttgtggtttgattaaagattagaagacacgatattcatgtgagtttttaattgtgtcggtgccttgttgtggtttgattaaagattagaagacacgatattagttggcctcttgccttctggtagtcatgcatttaaagtgaaatatcgtttaaaaaaacgcttctttcttgcagtgataaggcaagattgaagcgtttttttgttttaaaacagttccagttgtgagggttgtggctcgtttggcacttcggacctgccccaaaagttcatgatattgccaaattgtttgtcggtaatcctgagaacgctaacctttcccaaaggcggcagtaaacgtttgatgcgtttctcatgcacatcggcactttcactgcttgcgcaatgccgcatgtacaccgagtattgcatcatggtgaaaccgtccttcaggaggttttttctaaagccagcagcgttgcgtcggtctttagctgtgttggtaggtaaatcaaaaaatacaaataaccacataattctataggcgtttagttccataattttggatatttgatttttttccgctcgccggtataacactgttgcaaggagcttgctgttttttgcagccctaccatgagtgggcttttctcggttttgaaataaacggttcttgtaagtacttggagtaattcagattttatctcagtagtgagttcttgctcatcataattttgcatgataaagtttacaatttcatctacagcgggcctaaagggctccatgatgtcatcggctagggcgaaagcattgtatttgctcttatggtgtatgcccaaagtatttaacaagccgcttccagataaggctcttgcggtggcggctctcaatatggcgtagccgtaattgagaaaattattggggtaattgccaaagcgctctcttttgaaatcgatttcaaaaaaagatttccaataaaaattagcggcaaccgcttccatatttgtggtatcgccactcaaaaccttgctttccaagtactcaaacttattgtttttggcggttatctgttcgagtagaataccttgattcctaatcttttcttttatggtttgctgccaaagttgcttttttaatggcacacttgcttctatttgatgcttgaagagttcttgctgcacgtgatggctattgagattgagcaacatgccatttggcaaatgcttgtcgtcacagatgatacaggcacaattgttatggatcaatttattgagggctggcatgcttatataagcttcgttatggtcaataacaacgtaaccaatgtcttcaatgggtatggttctttctttgttatttgcaataatgactagctgctcatgggcggtggtaatggcacatttgttcgtgaaaaaaagcgtttttttaagcatagtttcatgtttaattaaaatgaaatttgctattaaagactattaagggaagaataaatatataaattttgattttaacctgccgtgaatttgtaaggtttttgctgcaacagtcatctccatagctaaataaatcaggagtttagactcgtcttgggtgctctggtcaaacgtgaggatatgtaaaaacccatatataaaaaaagcccgatacaacgtaccgagcttcttaacaatagaatccttatggattatttgttgtcatcttgtttgtcaagagaatcaacagcttctcctacagccttaccagcttctttagtttcattgactgcattgtcaatcgcttttccagcatcaaccatttgatcgtcatccttcattgccttataattacgcagtatttttttcacaaacaattcgaatgaacgttcccagcggtatgtaaacataattttctcatttttccaaaaaggatgatttttgggtaaaggtcatcacggattgtgggcataagtggcagatgtgcgaggggataatagtttttatatctgctaataagcagagtggttataacagatagtgatggataacccgataaaaattgttagatggcacttttaattgataattttgtagaatgttttatagaagaaaattggtgtttgctttattagagaattttgaaaacggtcttgaaaagacacgtcttcaaaaattagtttttttattaactaaaaagcaaaaaaatcctaattacgattttgttccttatcgctttgggtgttattcatactctttaaaagcagatttacaagcaatgataaaaagagattggattacaatttctgaaagaggttatgagttaaaaactgaaaataaatattacaatgagctgcgttcagacgataaaaaaattgttgatgatacaatctcactttatgggaaaatgaatactgaacaaataactaagcatacttatttaaattttccttatcacgctattaatagtaccatcgcaagtgatattttgcctgaaaaatattatctacttgttcaagaagctaaacctaaaactgaggaaaccatattatttactcttgggtatgaaggtatatccttagaggagtatcttaatagattaataaggaatgatgtaaagctcttggtagatgttaggagaaatccactaagtcaaaagtatggttttagtaaaaagctattaagcagtttctgtaataatttaggtattgaatatctgcatattccagaggttggtattgattcaagcaaaagaagggaattgaatactcaaaaggattacgatatcttattcgatgactacaataaaacagtacttgaagaaacaatagagagtcaagattatatattgaggctgttaaaaaaacataaaagaatagcactcacttgttttgaagcggatacttgccagtgtcatagaacgcatttagctgaaaaaataaaaagattgcctacatttaaatataaattacaacacatttaatgaatggcgattacaaaagtgcttataacagtaaagacctatccttcactttcagctagatatggagagttagtctgtactgcaggatttcttgaagatggaacttggatgagactctacccaattccttttagaaaactcaagtacgatgaaaagtataagaagtatcaatggattgaactagatatagttaaaaacaataaagattttagaccggaaagttttagaccagctaccatcgatacacctataactctattagatactattgacaccaaaggaaactggtataagcggaagcaaattgccctcaagaatgttcataaggacataaaagcacttattgacgaagcacatgacaaagaaatctgcacctcacttgcagtttttaaaccaacaaaagtattagacttcaaaattgaaaaagtatcctcggaatgggataaaaaaaagattgatcaacaaaaagctcttaatgaccaaggtaacctttttgaaatggaagaattaccgtttgaagttgtagaaaaactaccatataagttttcatatgtgattgaagatgaaaatggtgtttctagtactatgatgattgaagattgggagattggacaattatacagaaatacattggcagctgctgaaggtaatgaagcaatcgctgttcaaaaagtaaaagaaaaatatttcgattattttgcacttaaaagagatttgtatctgtatttaggaactacaaaagcttttcattatcgatctaaaaacccttttatgattataggcacatttacgccaaatatagaaactcagacttctctcttttaattatgatttgtattttctgtaagcaagactctagtgattccaaaagtgttcaatacgtaatttctaaatctttgggtaattaggatttgatgcttacaaaagggatagtatgtgataaatatattcaagaattaaacaataacaactatgatttcgattaaagcaattaagcccggacctaagccaaaaaaaagaagatggcactccagataagaggaggagagtaactccaccaagcaaacaaaagcatcctgaactaaaacctcataagcataagcctggagattaaattctttcacggttgagaatatcccattaaaagtgatattgaataaactccatccaagttttaagaataggatgattcaaacgtatgcaaccttacccaatctcagccttctataaaactgcttattccgatacatattagttttctgtatctactttttaaaagctccctgacggtctatggaataaataccatcaaagttgagtgctatagcattatgaactgccataaggatttttgcgtccgcaatgttgagttttaggtcaatctcttccgacagccggatttgcatctttcttgcattaaaatttgtttcgacagcctcttttacgcttaacagttccgaagagtaaaacaaattcccttgaagattaattatgcgtttgatttgaaattgttgttacgggagtctggagctaaaaaaattagggataggctgtcttgatgagaaagattattttagaataaattctactaagattcaaattgaaacctatgatataaggattaaaaatcaattctggggtgacatggctctagcattatctgaattgaattgaatttaaattgcgtttgttgttgaaatgcttaggatcgaagggtagtttgggagtggagtagttaggaaggagaattgaaagtaaaggatctaatagggaagttgctatttttgccttagcccatcaactatgttttgaatgctttgcagcacttcttcatagttcagggatttatgtgtttcaataatttggttaatgagtttactttcctctttgttgtttagtgcttcatttaggatttctaaaattggtgctattgtttcttgatggtttttaagtagatcattgatgtcctttcctaacagaaccgcacctgctgtggtgcttttaaatggttcggctgcatatacttcttcataataggtggtggcagctctttcttcgtgaatggataaataatttcctagaataaaccca

SEQ ID NO: 2642 - DNA, 23402 bp, synthetic construct
  misc_feature 1..23402: note = Synthetic
  source 1..23402: mol_type = other DNA
gcaaagtgcaaaaccacttttacgcagagcgatattaaaaaggagctccggaaacatgatgtagcgctcattggcggcggaatagacgaagcgccaatggcttataaagacatcatgaaagtaatggacaaccagcaggaactggtaacggttttgggcacatttacgcctaaaattgttagaatggaccgataacagaactggtctgatttccgaatcagaccggttttaaaaccgaaaaacatgaaacgatttcaagacgaaaataagagaagctataatttcacagaagctatagctgttaaatgtcccaaatgccataaacaggcaagcgttacaaaaaaacctgacgggaaaaaaggttacggctacactaaaattttagcatgcaggcactgccacttttcacagcagggcggcatgattaaatataaggccgttgtggatcagtattgctgtaacaatagcaaaaaggttaactatgaatcgcagcttttaaatgaaaaaccggaaacggtacgcttaaaatgcggcagctgcaatgagataaaagcctttaaacccaaaatagtggaagtgtatatgcaatttgtgaccgatgaaaataattacagggaatgctgctttaatacggaattatggtttcagaccgctgtgaagggaaatatattctgggcgtataacgaagcgcatatcggatatatggaacgttatattgctgctgatttaagagaaagaaacagccagtataacggtggtaaaacaatggtggccagtctgccgggatttattaaagacgcaaaaaacagagagaagcttttaaaagcgatacaacaatggaaaggatcatacagataacttccggaagaggtccggaagaatgttcctgggtggccgcccaggtacttaaaaaagtactggaagaggcaaaagaaaaggggatggaagccagagtgctgcaacgggaatccggacaggaaaacgggacggtcaatacggccacagtgcttgtagagggatccggaagtgctgaatttgcagactcatggattggaacgattcaatggatcggacagagccagttccggaaaatgcacaaaagaaagaattggtttatcggaatttttgaagtacggcaatccgcgaaagcgcagatttcgtatacagatattaagtaccaggccatgcgaagctccggagccggagggcagcatgtgaacaaagtgagctctgccgttcgtgccgttcatgttcctacgggcattgcggcagtggcaatggaaagccgttcgcagcatcagaataaaaaaacagcgaccgaacgcttgatccaaaaactggaagcggcaactctggaacagctaaaagaagaagtgaaccaacaatgggaaaaccagctccaaattgaaagaggaaatcccaaacgggtgtttagcggaaccgattttaaaaaacaaaaaacggataaaagctataaaaccacccggcaacaattaaaaaataatttgcaaaactatatcgaatgaaaacagataaattagataagtttttgtttcaggctatggatgcctatccttcttatctggaagaaacagtagaatcattaggctatgccttgtcatacgacgaaaagaatacaatggcattgtgccttttcggccgactgcatgcagagcagttatatgattatgaaagcgcaaaaatgtactttgaacaggcgctgtcagaaaacattaacgcactggaggtttatccgtattttattgatacgcttctgatcaatgaagattacgagcaggccgggaaactaattgatttcgccttaacaattaaaggctgtaataaagcggaaattctgttaaagaaagtaatgtttctggaaagaaaaagagacttcaagcaagccaaagcggttttgaaagaagtaaagctgcattcgtataattccgatttacattattttatttccgatacggaaaagcgtatcaaagagaaaatggaattaaccggtttaaaaaaggataaagagaaagccaaaggcaagaaaaaaacgaaatcgaaaaagaagaataagtaatcgttaaaaagtgaaaggcatcccataaaccgggatgccttttttattgggagctataacaaagcttttattttagcgtactgttgatcgtgatattcacatttttagaaacttttttgctcacaatgctgggaatgtcaattccgaaatcgtctacattcacattaaatgcggcattgataacgatgtcttcaccgctcttctgtatcttggcgggtatgatcacatccttcgtttttccgtgtaattccagttttcctctgatggcaaagtctttcgcagattccgatagggcgctcagcttgaaattatcgattttccctttaaaagtcgctttgggataacggtcgctttcaatgtaattttcattaaaatgttcttccataagtgcaatcttgaaacgaaagctttttaccagaataaggctggcaatttcgccggtgtccgtattcaatacaaaagtggcgttgcggctgttcgcttttacttcttcaaaggcaggaacagaggcttcaaaagttatttccccggttttggtcacttttttagattgtgcggataaagaaccaaaagagaggagtagtgcgaaaacaaatagtgctcttttcatgatttagggtgttttactgttctacaagaccggtattattccattctataattttattaatcgaagtttgcggcagccgggttccgccattcggcatcattcccggtgctccctgcgcccgtgtgatcctgtcgatcaaccctctgttcagtacggcatttttaacatcggcataggtggttaacgacattggagcgccatttgacggcacggttccatggcaggaaatacaattattgtcaataatacttttaacgctattggcgtaggttacaggaccggtattggtatcggttcccacaagattggagtcggtttcattggtacagccggctaacaatacaaatagaaatgagataaaaagtatttttgtgaatttcattgttattgcaattatttagttaaagttatgattaaaaatttaaattatagaaaataatattgttaattttgtgatattaaaataattattatgagaaaaggtaaaataataataatcctcgttattctggctcttttgggctttggtgcttattcgtatttgtatcagggacatcgtgatattgcctctgaaaaacaaagctatctggttacggcaaattctatttttgaagaatttaaaaccaacgaaaccaaagccaacgaaaaatacctggacaaggctatagaagtatacgggaaagtaacgggtatggatttggaaaccaattctgttattattgatgaaaagctttttattgtttttaaggataaaattaaagaaggtgaaatgatgctgttatccaatgtaaatgtgaaagggagatttatcggctatgatgacctgctgggtgaattgaaaatggatgaaggttctgttgtaaaataaaatacagaccattgccgtccgaaacaccaaaatcatcgtatagataagtataaccattatacccaaaaaagtaattatatgaaaaaaaccttactcaccttatgcttattgcctttctgctcctttgcgcaagatgatttactttctcagattgataccgtaaaaacggataataaagttgaagctgtttttaagtctttgaaaattgtcaatctggaatctacaaaattagcctcgaaaggcgacttttattttatagtggcgcaccgtttttcgtatgttaaaaacgggttttccgacttttttggaatggacgatgcaaacacccagattaagtttgtatatggaatcaataactggctaacggcacatgtgtccagaagcggttttgaaaaaacctatgaaatggcgctgaaatacagactgatgtcacaggaaaaaaatggcttcccggtaactctggttgggtttaacagcctggcgatcaattcggaattaaagaaagacgattttccgaatctgaaatttgagaaccgactcagttatgtgacccagttattagtgtcccgaaagtttacggaaagattatcgctggaactggcaccctcctattttcatcaaaataccctgcgggattttctggatgccgataataatgtggtattgcccaatccgcagtccaacgatcagtttgcattgggaatgggaggacgatacaagcttaccaaacgctggtccattaatatggattatgcggcacacctgaaccgtgccaaacattctatctacaccaatccgttgtcaataggggtcgatcttgaaaccggagggcatgtttttcagatgcactttaccaattcgagagccatgcatgaggcaggattcctgggagcaaccaccggggattggtccaaaggagaaatcgcattcggctttaatttagtccgcgtgttttaataaaaaaagtcccgaagattcgggacttttttatgattaattcttgatgaattttgttgagtatttctgaccgttggtgctttctatattcaggatataggttcctttggaaagtgtacggatgtcaatctgttccgactggatcgctgctttcagtactaaacgaccggttgtgtcatagaaaagtgcttttttcgcactgctgtcaaggttgttaaaatgtactttaacaaagtcctgtgccgggttcggataaatcataaatgtatccagggcaacttcaggattgttaagtgctgtaccttcaaccaccataaggctttgatttacggctggattgttaataacatctaccgttccggaaggccatttaacgattacctggtaaatttcggtagctgttcccagaccaaaatgaacatttaaagagctcatgtttctaaaaccgtcgccacttcttacatctctgatttgtttgccccacggaccgaatatttcaattcttgccccgataccgttaatgttgctctgcacgcctttcagtaatatttttaaccatttgttgctgttgccgttattcatataaacgttgtcgttgttctggatatccaggaagccatcgttgtttaaatcgccgataggaccgtttgtaacaccaataggctgtggtgtaaaggtcatgttgccgttgttgatcatgatgatgtttcctgctccgaatacatccacaaaaccgtcgttgttaaaatcatgggcaacattttcctgtcctaagttggttagctgcgggtatccggaaccggctgtaacatcggtaaaagttccgtcgccgttgttgcgcattaatttgtgcatcccgtttgcattcgagcttgctccgactaaaacatccatatcaccgtcattgtcaaaatcggcccatgctgacgaccaggtctggatagggtcggcaagaccggcctgaacgctcacattggtaaaaacaccattaccatcgttacggtgcagttcattgatattggcggtagtgttcccgcctcggcatttggctataaacaaatccggatctccgtcgttgtcataatccacccagatagagccgtaatttccgccttcgggatgatctcccataccgccctgatggaacgtaaagttattattaccgtcgttcaggaaataaacattgggatccacatcatggcatacaaaggcatccaggttaccatcgttattaatgtccacaaagttggttcgctggcagaagatataattaggatacgaagtagcggtataagctgttccgttgctgttggctttcataaaggttgccccgctgccgcctccgtagatcaaatcgttatatccgtttttgtcgtaatctgctgcggcaatactccaggaaggtacgttgttaaccatcgttgtcggataggtagcggtggtaaacccaccagtagcattctggtataaaattttaatctgggaaccgctcacgccaacaatgtcgtccaggtaatccccattcatatccaccacacagttcttataggaagaaccggcaagcgaagcggaaaccggagagaaactaacaagcgttggcggtggaactaccggtgcctgttcggtgattttaaagtcaaatcccacaggactccagcggttatcaaaagcaatataataggtagtgcccggagtaccgttaatcgtagcgatggataaatatccggtaccgctatcgtcatcaccgcccacgcattccagggaaccgcaaagtcctttgtaaatgtgtacacgggtatctttaccggtatttacggcaagatcggtagatacggtaatgctgttgtttgtggtcgcgttgtatttgtaccatttgccggcagtagcagtattgctgtttggggggcaaataggggatggtgcttccgatccgtcaatagcattaacggtgtaggtgccgatgcttaccagttgcgccgtctgacagttgctttgggaaaaggcactgacggcacacgttaaaaatagtaaaagtgtaatttttttcatgttgttttgttttttggtaggtggttactaaatcatggacagttgggatttaaagagtttatccattgctctatcatttgtacaccttcttcgtgtacaattgttcttccgagaagcggcattctgtttgcttcgtctgtagaattcattctgaaatgtaacatggaacgttgaaaacttcctctggttacaatatgggtaagcgaattgtcgatatattcctgaggggaaacacaaatacccagatttacgggattaccggtttcgctgaatgcaaagcgcatcgggcggtaatcgcaatggctgttttcggcatgacaatgcgcgcagttaatatcaatataggagcgtactctcagttccaaaggtttggaagtatcctgccagtttaccgtactggcaatgttggatgggtatccggattgcagcataccgttttccatccatttggtaagctggtttttggcgccgtccgtatagttgtaggtaatattcaggttttgtggtttcggaccaattggaattgctttttcattctttttatgacaggtcaggcattccgttgcggaaggtattctgtagttggtcgattttgttacattgttttctttccaggtgagtggtttatagctgccgttcatatccagcgttgcttccgtctggttttcattccagatataattggcaaagatccagatgtcattgccgctgccgtcaactccttttttaaccatcaaacgggtttcgataatccgggtgtcattggacggctgtacattgtcgtagtaaaaagttttaaccagtgctgttcccaccggaaatttaaggactttaccgtcgccgtcataaacggctttggtgccttcgggcatccatacaaaacgttttttatgggcataatcggtaaacagtccgctggcaatttcataaggcagcacccgggcattgggtgtgttattttttaaaataccggtaaagaaatggtagtccgataatttttgatagggaatctgattgagatccagggagaccggagtagtagttggagtgggcgtaatcgtttcatattcgtcactgtcggactgacaggagaataaggtgaaaacccccagaaatgcaataattgtaagggataagtagcttttcttcatatacttgttattcaaatgtttatgtttttgtataacaaatatatagtatttgtggatttgtttttaaattaacaattattttaaacaatattaattaatttgtttaaaaaagttatatatctaactgtacgccgtaatttgataatccttccaatgcttctttagtggtatggtcaaagcggtttaaatggtcattatgttctttcctgatattgttgcggcgtatggagtcgtaaaagcggcgcacttcatccaggctggtcagtatcggtttcggagcggttacatttttaccggtatcatctttggcaaccatcgtaaaataagaagaattgcaatgtttgacctttccggtctgaatgttttgggaaaccacacggataccgacaaccatcgaacttctgcccacatagttcacacaggctttcagggtaaccaattccccgacttctataggattcaggaagtccactgtatctacagacgcggttacacagtaacggccggaatatttggaagcacaggcaaaagcaatctgatccattagggaaagaatatagccaccgtgaatttttccgctgaaattggaatgggaagggagcatcaattctgagatagtgattctcgaagaatttatttttttgtagtcggtttccatagtgctattcgttttgttcgtgattagtattggctctgttcaggatattttcgggcagcgattttttcgccttggcacccattttctttaatttttccacactgctgatgaggttgcctttaccgtctgtaagcttattcatagcgccctgatattccgttttggcttcgtccatttttttgccgattttaaccaggtcggttacaaaaccatcgaatttatcgtataaagcgccggcctgacgggcaatctcataggcgttctcctgctgtttttggtttgtccacatactgtcaatagtgcgcagggtggccagtaaagtagacggtgttacgattacaatattcttttcgaaagctttattgtaaagtgtgttgtcctcgttaagcgctattgcaaaagccggttccatcgggataaaaagcaatacgaaatccgggctttccatctggtacagatcgtggtaatttttgctgctcaattgttctacgtgacgtctgattgaatgcaggtgttctttcaggtgggctgtttttgccggttcgtcttcttcatttacaaaacgctcgtaggcggttagcgatacttttgaatccaccaccatttttttgccatccggtaaattgatgactacatccggttgtacgcggctgccggctgccgttacaaaactttgctgtacttcatattcacgtcctttttcaagacccgatttttccagtactttttccaggatcaattcgccccagttcccctgcattttgctgtcgccttttagtgcttttgtcaggttgagcgtttctttgctcatctgttcgttcatttcccgtaatcctaaaatctgctggcgtaaagccgcatggtaatcaatgctttccttatgggtgtcttctacctttttttcaaacaaatgaattttttcctgtaaaggagacagtatgtttttcaggttttctttattctgttcggtaaacttagtcgatttttcttccaggattttgttggcaagattttcgaattctttcgcaaacttttcctgcagctggttaacctcttctttttgttctttattgcgttcccagagattgtcaaaatccacttcttttttagaaagttgtatggccagggcatctttttccgtacggatctgttctttctccatattcgattgagtaagctgcctgtcaaactggttgcgctcctgcaggaattgctgtttgagctgttccgcctgagccagtaagccattgatgcgttcgtcccgtccggattgctccgatttggaagcagcggcagccagtatttttcctatccatatcccgataagcagggcaatgataaatgcggcgggtagtattacgttttgtgacatcgtataattaaaatttgcgtgttatgtaaaaataggaatttgtttttattgaataataaaaaaaagaaagtcccaccgaagcaggactaaaggttttcacctacggcatatagccttattgtgataagattaaagattagaataattttttcacatttcaaatgtaataaaaaaatgcttgacttttattatggaaatccgtaaacaaacaatactaattttttagtagctttaaaattcttaaaattttagaatgtcatgacgaaaatattaggattagatttaggaacaaacagtatcggctgggcggttgtggatgatcagcaaaatgaaattgcagatatcgggacaagaatattccctatgggagtagaaaatttgggagatggtgacagggagatgtcgaaaaatgctgcaagaaccggagccagaggaatccgaagacagtttttcagaagaagattgcgaaaaaaaatactgctaaaagcactttccgaaaacaggatgtgtcctatgaccgatgctgactttgaagactggaaaaaaacaaaacaatttccttcagaaaagctaacagactggtttgttctgaatccttatgagcttcgtcagaaagcagtaaacgaaaaaatttcccttgaagaattaggacgaatattgtatcatctgatacagcgcagagggtttttaagcaatagcagaaaaggaggcagtgacgatggtgctatttttaaaggtaatgttaaagaaggtaaaataggaatagaggataccttggaaagtattgaaggaaaaacattaggggggtatctatatgaaatttatccgaaagaaaaccaaccgtttcaatacggattggaaagaatacgcaatcggtataccacccgtaaaatgtatgtggatgaatttgaattgatctggaacaagcaggcacaatttcatacggatctgaatgaagacttaaaaacattatttggaggaagaaaacaagaaggctataaagaggacgggatattattccatcagcgaccattgcgttcacaaaaacatctggttgggaattgttcgtttgaaccggcaaaaaccaaatgcccgcttagtgctgttcccgttgaacaatttagagtctggcaatgggttaatacgattgaatataacggaaaaaaaataacgcaacaggaaaaagaaaaaatagtaacttttctatatgcaaatgagaaaccggagtttaaaaaaattagaaaagtaattgaaaaagaaagtgccgaatttaagtttaattacaaagacgacgataaaattgcaggaactcatacaatttctaatttatccaataaaaaattctttggcaaaaaatggtttgaattttcagataaagaacaggaagatatctggcatgtattgtatttttttgacagtaagtccaatctgaaagaatatgccattaaaaactggaagtttaccgaagaacaggccaataacatttccagatttaatgtaaaagacggttatgccagtttaagcaggaaagcgattaataatatattgccatttctgcagcagggatatacgtatgatgtagccgtagttatggcgggaattaaaaatgtgtttggagcaaaatggcaaaatgatacacccgaaaacaatgtaaaacagttaacactaattgataatattgaaggcatcatcagagctaagatttccggaggctttatcgatactgttaaggacttattgcgtaaagattttggattgggtgataacgaattaaagaaactataccatcattcggcagctataacagtaacgcaaatacttgaaaaattgcctgttggtaaagcagcggataaagcaattcaggcggttagaaatccaattgttattacggctctttttgaattgcgcaagctggtcaatgaacttattgataagcatggagcaattgatgcgattaaaatagagatggcccgtgatttgaaaatatcaaaatcacaacgcaataaaatcaggagggagcaaaaacggttagaaagagaaaacgaccggatcaggcaggaagtggagaagtatacccgggtaactcaggataatattttaaagtttaaactttgggaagaatgcaaaaaaacctgtccgtataccggagttactattccagtaaacaaactgtttacaggcgaaatccaaattgaacatatccacccgtggagccgttctttaaacgatagttttaataacaagacattgtgttgggcggatgagaacagaaaaaaaggagatagatccccttatgagttttacgggaatgatgaagcaaattggtcggcaataaaagagagggctttaaagctgttttctgatacaaaagaatatcccaatgcctaccagaaattcaaacgatttgtacagcagaaatttgatgatgattttacatcaagacaactgaatgatacccgttatatcagtaaagaagcaaaaaattacttagcccagatatgtaaaaatgtaatggtgtcgccagggcagatgactgcgaatttacgccaaaaatggggactgaacacagttttaaacgatgcaaatgccaaaacaagggaagatcaccggcatcatgcgatagatgctttggtgatggcgtgcagtaaaatcagttatttgcaggaattatccaagtggaatcgtcataacagaaattatgacttaaaagattttccgctgccgtgggaaacatttcgatatgatgcagaaaaagcaatagaaaaaatcctggtttctcataaaaagacctctaatgctattactgtcagaacacacaaagtagagaaaaacggaaaaacctataagaatgtaggtgttgccgcacgagggcagttgcataaggaaactgttttcggaaagcgaaaatttaacggagaagaagcttttcatgttagaaaacctatcgataatctggagacggcaaagcagatcgataaagtagttgacgaaacgatcagatcgctaatcttaaagcgaatcaacgaattaggaggctttgtcaaagataaaatcccggctaatactttttttatcgcagatgaaaaaggagtaaagcagccgcaaatctttttgcccaataaaaacggtaatcctgttcctgtgttaaaggtgagaatgaaggaaactataaataaagcgaaacaattaaaaaaagatgaaaaccaatatgttaatcctcgaaataacgaccatgttttaatatatgaaaactatgaaggaaaattagataaagatgttatcagtttttgggaagtcgttgaaagaaaaagacaaggcacaaatcatatacaactcccatttgatggaaaacgaatcgttcaaacttttaaagagaacgaaatgtttatattgttcaaaaatgaaaaagatatagattggaataatgtggaaataaatgatcttgcggattatatttataaagttcaaaaaattgctggagcagattattttatggagatatgtttcagaaagcataatgactcaagagaagataaatatgccaaatcagattatacatacttaaaaggatttggtgagggtaaaacaggatggcatactctaaatccaatcaaaatagtaatatcagttactggaaatataaaaaggtataattattagtttacgattataaaacacgatattcctctgcctatttaatcatgtacttaacccgttgtggtttgattaaagattagaaaacacgatattcagctcacacaaggtcttcaacttaccgttgttgtggtttgattaaagattagaaagcacgatattgcgcaaacgcaaacgcaaacgtttaatacgcagttagttgtggtttgattaaagattagaaagcacgatatttatatccggtggtagacgtgccatttttgcgttgtggtttgattaaagattagaaagcacgatatttttagcaaaccaatttgcccaacatgggaagttgtggtttgattaaagattagaaagcacgatattaaagctcatatttagatatttaatttatacgttgtggtttgattaaagattagaaagcacgatattttgaactttcacccttagcttttcttagttgttgtggtttgattaaagattagaaagcacgatattaacgagattaaacagacacaagcgcgactagttgtggtttgattaaagattagaaagcacgatattaaaatagaggataaacaaagtttatgtaaggttgtggtttgattaaagattagaaagcacgatattgtcgcgacaccatttaaaccagtgtgattagttgtggtttgattaaagattagaaagcacgatattcctgtacgcaatggtaaactactatcgctgttgtggtttgattaaagattagaaagcacgatattcgtacccttgttatcagcgaactttacagggttgtggtttgattaaagattagaaagcacgatatttacacgaccggaataccaagaatgtatagcgttgtggtttgattaaagattagaaagcacgatattatacatatcaccaatgattgtagcagcttagttgtggtttgattaaagattagaaagcacgatatttatacgactggaattccacgcatgtacagtgttgtggtttgattaaagattagaaagcacgatattattattatgggacggttgggaagacttcatgttgtggtttgattaaagattagaaagcacgatatttgagggaatggatttggaagaaatccaacagttgtggtttgattaaagattagaaagcacgatattgctaatgctgaacactcaattacaggcaacgttgtggtttgattaaagattagaaagcacgatattcttttcgatgtgtttacattaattgctgatgttgtggtttgattaaagattagaaagcacgatattccgtacggaaaaaccgttcaggataaacaagttgtggtttgattaaagattagaaagcacgatattccgggtaacgtctttttacctcaatagctagttgtggtttgattaaagattagaaagcacgatatttttatgcattaatcgactttttaaaagaagttgtggtttgattaaagattagaaagcacgatattaagaaataaatgatactgcagacgctactagttgtggtttgattaaagattagaaagcacgatatttttacggtgttttttattgttggtttgtccgttgtggtttgattaaagattagaaagcacgatatttttcagcaataaattacacattgcttctttgttgtggtttgattaaagattagaaagcacgatattattgcgtctgtatatcagttctttctttttgttgtggtttgattaaagattagaaagcacgatattaaattcaactttgaagattactactggccagttgtggtttgattaaagattagaaagcacgatattaggacaaaatgcattcttagacaatagcgggttgtggtttgattaaagattagaaagcacgatattaaattcaatttcgaagattattattggccagttgtggtttgattaaagattagaaagcacgatattattagaattatgggataaaatgttcgaatagttgtggtttgattaaagattagaaagcacgatattctgcgattccttgtactttgctggcagcttgttgtggtttgattaaagattagaaagcacgatattgatttgccagaagtaaaaaaaaaatcttcggttgtggtttgattaaagattagaaagcacgatattatgcggctactattggagcgcgtgcagatggttgtggtttgattaaagattagaaagcacgatattttcttccggagtcgtacagaatcagatcgggttgtggtttgattaaagattagaaagcacgatatttattgttaaaaaatggcttgtggaactgtggttgtggtttgattaaagattagaaagcacgatattatagcaacaggactcgaatcggagtcgatggttgtggtttgattaaagattagaaagcacgatattcttttgcaaagagttttgaacgtctgtttcgttgtggtttgattaaagattagaaagcacgatattggattcggaaacaataatttatcagaagaagttgtggtttgattaaagattagaaagcacgatattcaatttattttgtatttttctgtctgtattgttgtggtttgattaaagattagaaagcacgatattttagtaaacatagtagaattgatgtcacaagttgtggtttgattaaagattagaaagcacgatattagttgcgtttttagcttctgattattaagtgtttaaaagtaaatatcgtgataaaaaatgcttcttttttagagtgataagctaagcttgaagcatttttttatttctaaggttaaaacaattccagttgtgtgggttgcggcgctttggggacttctgctttaccccagaaattaatgatatttccaaactgtttgtcggtaatccttaaaacactcacttttcctaaaggcgggagcagcttataaatccgtttttcatgaacgtcagcactttcactactcgcacaatgccgtatgtaaacagaatactgcatcatcgaaaaaccgtcctttaacaggctgtttcgaaaaccggaagcatttttccggtcttttctggtatcagttggtaaatcaaaaaatacaaacagccacattactcggtatccgttaagttccataacgaaggatatttgatctttttgcggcttcctgtaaaacattgctgcagtgagcttgccgttttttgcaaacccaccatcagcggacttttttcctctttaaaataaaccgttcgggttaacacctgcaggagttccgactttattagcgtatttaattcctcttcatcatattgctgtatgacttgataaaccagctcatctacagccgggcgaaaaggttccatgatatcatcggcaagtgcaaaagcattgtatttgcttttatgatgaatgcccaaagtgttcagcaggccgcttccggataaagccctggcagtagcggctcttaatatggcgtagccgtagttaaaaaagttattcggatattcgccaaaacgttcccttttaaaactgtgctcaaaaaaggacttccagtattgcgatgctgcgacaccttccatattgctggaatcgccgctgagtaccttaccggccaaaaacggaaacgtatttttttgcctggtgattttttccagaagtaatccctgattcttaattttctcgacaacggtttgctgccataattgcttttttagcggtaaagaagcctcaatctggtttcggaatatttcctgttggatatgatggctgttaagattcagaaacatcccgttgggcagatgacttttgccgcaaacaataatcgcagtattattttcgataagcaggttcatggcaggaatgcttaaataaacctcgggattatcaataacaagaaaaccgatatcttcaacaggaataaaactttcccggatctcggattgtaaaaccagctggagattttttgtagtaatacgggttttgttttctacaagaacggtacgtttaatcatagttttaattttttaaggtgcaataccttataaaaagagctaaaaaaaacgaaaaagcattacggaaaaccgtaccctgtttgttgggcaatgcatattaaaccgctcaccgttctttcttcagcaaagcaatcagttcatctttttcctgcagccgtttttcatactgctcgatcagttttttataaacgtcattcaaggctttaatactatccaggataatctccttatcttttctttttttaggatcggttccgtttttctgtttggctaaaaagcttttgggtttcacttcaaaaatcaaactcaactgttcgatatgggaagcccacgactgactttcaccattttcaatacgggcataggcagattgcgatatactgagtttttcggctacttcttcctgcgaaaagccttttaattttctcatatggcgaattttttccccgactgttctgttcatgtatactgttgttttctgcttctaaaaataaaaaaaataaaggttatcttataaaaaaagggtagaattacccttaaatcgcataagagagtgctttttaagtcgttaaatttggaattattaaggcttatttcagaaaaggaaacacaaattagaacaataataatcattcaaaatgtaccattatgaagaaacttaatcttaagaaaaaaattgtttccgtattaacggataaggaaaaagcaaccatccagggtggtggaacaaacgtaacctgtgccagctttgcaacagaaataagatggaccgaagacccttgtgtagtgccgccgccgccaacaaaaagatgtccgaatgacgggatcacaccgccaaccagcgatccgatattcgtgccttaaaactaccgtaaccaatcaaactattatacaatgaaacgattaaacctaaaaaagaaagtggtttccgtattaacggataaagaaaaagcaaacatccagggtggaggaacaaacgaaacctgtgcgagcttcgcaacagagataagatggacagaacagccttgtggtgtacctgttaccagattagagtgcccaagtattaaagtggcttgtgtaacacatttagtgtgccctacaactactcttgaagagatgtagtaaacagacaaaataaaatagcagtaatgtattttactataatcttttaaagatagcagtacaggtgttgaaccaaaagagaagattgttctcttctgcccaaaccggttaaaaatacaattacttcataatgaacgctattttaaaccgttgaagagttgctgttcttcaacggttttgtatttaaataaataatctcacaacaccactatggaactggaaggctataaagaactaaaagaaattaccgactacttacaaaatccggaacaggtttttaaagaagaaaaagccgccaatattgcattgcattccggtttgtctggcgttatcataacattggtaaacattcgtaaaaaattcccggaactggttgatccggatatcatccggcaatatatcgccaaaacctacgatattctttccgaaagtgaagccttctatccgtcattttgcggtggtcttgccggatatgcctatctgctgcacctgctcaaagaagaacagatcctggaaggcgactacagtgagatactcgctgaaattgatgaaatccttgacgaacattttgaaataaacctcgaagaagaagatatcgatatccttcacggtgcgatgggacttggcttgtattttatagaaacgggcaaaaaacaacaggttgaagcattggtcgacagacttgcggggatagcccaaagagaaggcgatcagtgttattggaaaacattcgatcactataaaacccggaaatacaaaattgatttcggactggcacacggcaacgccggagtacaatattttctgggaaaatgcatttaccacaacattaaagccgatgcctgtaaagagctgctccaagccagccttaatttttacaaaaacaacacccagaaccacaatgcgatacaatcgtattttccggtacacataccggaagaaaactatctcgataaaacctatacgcccgaaacatcccgaatggcctggtgctacggcgatttaggcatcttatatacccaattgtttgcagccgatattatggaaatgccggatttgaaatcggaaataatcggacaattgaagcaaacagcccaacgaagaaccaaagaaaacacaatgcacaacgatgccggattttgccatggcaccagcggactgtccattatgtttcaaaacatataccagctgacgaaagaacctgaatttctggaaacagcccaatactggctgcaacaaacgcatgcttataaaaacagcacggcagcctatgatgtggttgcctacagactgtttgaaggaagccggaaaaatgagattgatgttacactgctggaaggaatttccggtgtggcagcggcctatctggccaatcttacaaccggaggaacaaccttattggacaaaacactattcttaaggtattaagcgacaacaccattatgaaaaagaagaacatacgctataacaggtttgataaatatgttttgagaacaccgttaatgccgatcaatttcctgatggaactcacccggcaggcagatactcctgacgaaacaatacagcagcagttccgggatccggtagtccgggaagccatcttcctggcatcaccggtactgtataaggaaattgaaaaatggacggaaggaaaagtagaagaccctaaagaatgcaaaaaaataaagctttccttcctgaaatatttaacccggatggcgttccgtccgacacctttcggactttttgccggttgcaaactgggaagtattacagaaaatacccgtattgaaaacagtgatttttctaaaaacaagcgccatacaaggctggatatgaattttgtcggggctttaaaccaatcccttaccgcaaataagaacattcgggaacagctgcagtattatcccaattcgagcctttattttattgggaataacatccgttatgtggaatgtatctaccagaatacaaatcgttcgcatcatcttatcgaaatagaaacctccgattacctgaatgactgcctgcaactggccaaaaacggtgccgataaagcggcattggtaaagttgctggcaaaagaagacatcactgtggaggaagcagccggatttgtagatgacttaattgacaatcagatcctggttagtgaaatggaactttccgtttccggcgaagaattcatccggcagaccatcaaaacgttaaaaagactaaaggacacggaaaaccttattgccattctggaagaaacggcacaaaaaatagcagcactggatcattccattggaaatgatccgaaggaatatgaagcgctgctggcaatcctgaaaaaatttgacattccgtttgatgaaaaatacatctttcaaaccgacatgattctcaataccagccataacacactgggagaagccactactgcacagcttcaaaaaggaattgcactgttaaacagaatgacctcgcgcatgcccaatctgcagctgcaaaaatttatagacaaatttcaggaacgctatgaagaccgggaggtgccgcttgctttggcacttgataacgagctcggtatcggctatccggtaaacagctataaaggcagcctgaatccgttgttaaacaaaatttatattccgtccggccagcagaccaaccggcagcgggaaatgaaatggtcggcagtagacagtattctttttggtaaaatgagaacggctcaagccaataaagaatataccattcagctacaggatgaagattttagcagctttgaaccaatatgggacgatttaccggatacgatttcgtccatgacagaaattgtaaccagtggtgacgaacagaaaattgtcattaaaacggtaggtggttccggtgcggccaatttgttcggcaggttctgtctgggcgatcaggaacttcatgaatatgccaaaacaatcatcgaaaaagaagaggcgctaaacagcgataaattactgcccgaaatcatacaccttccggaaaacagagtagggaatgtgctgatgcgccctgccttccggaaatttgaaataccgtatctggcttcttccggaaaaacggcagaccatcagctcccgattgaagatctggttgtttccataagagataacacagttgtactccgttcgctgaaacacaataaagaaatcattccccgtttaaccaacgcccataattattcccataacgccttgcctatttatcactttttgtgtgatttacaggcgcagggaaaaagaggcggtttgtactttacctggggaggactgcgtgatgaatatccttttctgccaagggtcgaatatgaaaacatcatcctttccagagccaaatggaaaataacccataaagaagtggaaaaactgttagccatcgatgcggtatcggagatcggtaccattaccgaatggcgcaatgaaaggaatattccgcaatatgccattttggtggaaggcgacaacaagctgctgatcaattttgaaaacctgacctcttttcagatgcttgccacggcagtagcgaaaagaaacgtttttgaaatagaagaattcctgttttttgaagatgccgtgaccagaggtagtaaagaggactattttgccaacgaggtggtcttttcattttataaagaattaaattaaaagaagtgaatatggatacgactataaaacaatcatttcttattggtgacgaatggctgtactataaaatatataccggcttttccacgaccgacactattctgacccatcatcttcatgcggtcattaccggtttgcaggaggaaggaatactcgataaatggttttttatccgctataccgatccggaccatcacattcggctgcgggtgcatttggtcaatacggaacagctgggaaaagtaatgcttgcctttcaggaatgcctgcgcaatttatgggaacagaacagcatctggaaactgcagacggatacctacagcagggagatgaaacgttacggagctacgctgataacggaagccgaaacaattttttttcacgacagccattgtatcacggccgttttaactgttttggaagaaccggaaagtgaaaataccaggtggattttcggaatggcttccattgatacttttttagatacttttggttatccgatccatgaaaaacgggcagtaatggaaagcctgagagaaggtttttttaaagagtttaaagtggatacgcctactaaaaaaggcttgagcgccaaatacagggaacacaaaaatgagattgctgcttttatgaaaaccgaaaccggcgcactaaaacagctgttaacggaaaggaatacccgattagcagaaccggtagtagccattcgggaaaaaatacaccacagcggtaaaacgctgaatgatttgctgggcagttatatccacatgaacatgaaccgtttgttcccgtccaataaccgccaatgtgaaatgatcatctatgacctgctttgcagctactataccactgaaatggcaattgccaaaaaacagcagctccaaaaggaagcggctgcaccggtatagcattcctccggattgcagtaaccggcaccagccaaaaaagtgtatttttgccgcaaattaattgttatgcagcaccgccactttctgatccacaaaccgcatggttatttaagtcagtttatttatgaaaagaaaagacataaaaaactactgggggaactttatgattttccggaaggaaccatggctatcggaaggctggatgaagattcggaaggattgcttttgctcactaccgatggtatgatgagtgaaattgtgcgcagtaaaaccgtagaaaaagaatactacgcccaggtggacggtgtgattacggc

SEQ ID NO: 2643 - DNA, 23393 bp, synthetic construct
  misc_feature 1..23393: note = Synthetic
  source 1..23393: mol_type = other DNA
acttttagctgatgctatttggagtttcaatttttgttgggtttctgttagatcttcttttgatttttcaagattaattctggcacgttgtgtagatgcgcttcttcctcctgaactaaaaatagggatattcatactaactccaaaagcagctgtgcctgcccaaatttggttactatttaaaaatctaaaattttgattattaccaacatacgaagcgtttgcaaaagcacttaatgttggcagcgctttacttttttctaattttaaaagaagttctttagaaactttatcattttctgcaattttaaaatctatattattttcaatcttctcttcagcattgagaagatctaaagtaatattttgagctgttaagctttctaaattatcagtcaatatagttttagaatttatatctgtacctaaagtaatatttagcatttggtaagctaaagtttttaatcgtgatgtattacttaaattactttctacactagataaggttatttgtaattgttcaacactttcttcttcttctagaccattttcataaatctttgtagtttcgttaagatttttctttaagacagctatgttacgttctaaaatcttaacactttcttctgcaagtaaaacattaccataagcatcaataacagtttttctaacctctaaatcggttttttctttggcattttcagaaatttctagaaatacttttgcagactgcaacccgaccaaataagacccgtcaaaaagtaattggtccattcgtattgatggcgtaatagattgtttagctccaaaatctataacaccatcttgatcaaaatctatagcatcaaattgttgttttacattattttgataatcaatttttccgtttatttgaggtaatccaattgtggtagtttcccatttttgtttttctgctgccttaatatcaagtgcagcatttttagcagttctattattttctaatgcaaaatctatagcttcttgcaaagagaaacttttaatgtctccctgagaataaatcgcaatagagcataataaactaaatattaaaattagtttgttcttcatttttatgattgatttgatgttataaatttgtttaatatttgaaagcctttatcagtaacaatggctcttaaatgatattctaaataactctctattaagtattccatggtataaatatctgtagggaaaatggagttgtcttttattccattcattccattaaaatacattctggatataaaatctacattaatatttgatctgaataattcggtgtcgacacccttttgaaggctttctttaaccgaatcatgcattttttcaaactgtttaagttttagcacatcatatatttgtgggtaatattttcttaattgaaattgaggtgatgatttttcactttttaagtgattcatcacaaacattttgatatcatataattcttcaatggggttctttgaagcttcgcaaatagtatcaataccatcgcagatagtttcaaatagttcaaatgttacagcctcaactaatttagttttgttagcaaaatgtacataaatggtttttttagatatacccatttcttgagcaatatcgtccattgtaacacttttaaaacctaacgtaataaataattcggctgccctatgtataattttttctctcataactgggtgcaaatatagaatggaaactataaaaaccaaaaaagtttccaaagtttcacaattttttaacatatgaaaataagatgaaaaccttttaataatactatttactttatttttgcgccatgctttcaatagaaaaatatcaagaagaatttgttgcttatttggaaaaatattcaacattaaaagaacctaataacctttatgcgcccatccaatatattttaggcttgggaggaaaacgattaaggccagttttaacattaatgactgctgaaatttttaatagcgattatagaaaagccttagatgctgctttgagtattgaggtttttcataatttctctctggttcatgatgatattatggatgatgcgcctttgcgtcgtggacaagaaactgttcatgaaaaatgggatattaatacggggattctttctggtgatgccatgttgattatggcatatcagctattcgaaaactatgagactaatacgtttcaatctttagcaaagctatttagcaaaacggctattgaggtttgtgaaggtcaacaatacgatgttgattttgaaaccagaaatgatgtgactgttctggaatacctaaagatgattgaatacaaaacagctgttttggtaggtgctgcaatgaaaatgggagctattgttgctaatgcatcaaataatgatcaaaatagtatttatgaatttgggcgaaatttaggtatagcttttcaattacaagatgactatttagatgcttttggagatccaaaaacatttggaaagcaagttggtggtgatattatagaaaacaagaaaacctatttatatttaaaagctttagagttttccaatgaagaaaatcagcttaaactaaaagagttatttaattcagtacttgaggataacgacgctaaaattagcactgtaaaacaaatttttaatggttcgggagcttcaggtgccacccaggaagaaattaaaaattatacaaataaagcctttatggttttagaatctttagatatttctgaggagaaaaaaacacttttacgtgattttggtaatgccttaatgaatagaaacgtataatgcaattaccatctacattcgaaaaattaattgaagaggccaatcaatcagatttgtacaataagttaattcttcaaattaataaagacttcctcttagcaaatatcgatttagattttcatgaagaaatcttgccatcaagcttaaaactcttgcttcacgaaatgatatataaattaattcaggaaaaatttactgaatatttaaacctgctttatattattgatgttccagaaaaacaggttaaagcactaaatggagatgatcttttaaaactttcagaagccgtttcttttttaattcttaaaagggaatggcaaaaagtatggtttagaaataattattaatagaagcgaattgtaggtggaggagctttctattggtctcttgcttttagcttttaaaaactttagacacgaatttcacgaatgcatacgaattcagtttttacaatgtttattattttatattttgttatttcacgaagcaaactttcagtctgccaaagagaacctatgaacttttagtccttagtggcttagtttctcaataattttaattcggataaatttgtcctaattaaaaatttaacctatttttgtactaaattataatctatatgttttctaaagcttgcgaatatggtattaaagcatcaatatttattgcgcttaattcttataaaaatgttcgcgttagccttaaatccattgctaaagagattaattcgccagaagcatttacagctaaaatccttcaggatttagtaagacatcatgttattaactctatgaaaggggcctatggtggttttgaaatcgaaaaagaattaatttctacagtaaaattatcacatatagtaaatgctattgatggagatgctatttatagcggttgtggtctggggcttcatacttgtgatgaaaaccatccctgcccagtacatcacaaatttaaatctgttagggaagaattaaaatctatgttagagaatactaatcttgaagaattagctctcaatattaaatcgggagcatcatttttaaaagtgtaaaaaaaatttaaatcaaaataggataaaattatccgaattaaaataattattatggaaacaatacttaaagattcacaaaaacaaatcggacaatttgttgccgaagattttagaacagccgcagtttttagtaactatgggatagacttttgttgtcgaggccatagaaccgtagaggaggtatgtgataaaaatggtatagaaacctctgagttattagataaacttcagaatgttttaagcagcactactggtcagaatatagattataaatcatggccgttagatttactggttgattacattgaaaaaaaacaccatcgttatgtagaagagaaagtacctgtattacttcaatttttaaataagctttgtagagttcatggagaaagacaccctgaattattaaaaattaatgagcactttacggcatcggcaagagagttagctgcccatatgaaaaaggaagaattgattctgtttccatttattaagaaaatgataagtgccactattagcaaatctgctatagaagcacctcattttggaactgttgaaaaccccatagccatgatgaaggatgagcatgataatgaaggagtgcgttttagagacattgcaaaattaacaaaccaatacaacccgcctgctgatgcttgtaatacgtttagagtcacttatgctatgttagaggagtttgaaaaagatttgcatttgcatattcatttagaaaacaacattttgttccctaaggctattaaattagaacaacaatttagttagtgattaattctttttgatacttaaaaattccagaaagatacttttatgtttttatccaattattattatagattagtgttgctgttattttgttgattccggataaaagaattgaattcgtttaaactttttctatttcctaaaaaatggccgaaatttacccatattttgttacttttcttatgcgtagctctgctatgccttgcaaaaagtgcctcttctgaataaatttcatctcattttcggttaaaaacaaaaagtttaaacgagttcattgagaaaatattataaatattgtaaaatcgttatcaattatagtaatccaataataaatctataagtttattattggatactatctttagaaatttcattgcctaaataatctagttctttttcaaggtaatataaaccatttaaatacgatgtataatgactttcggctattccatcaatgttatttgttaatcgtccgtttcggtcatacctttttacgctcttaattaggccagagttttgaatagtgtataagtattgtgcgacaccacttttatcttcgattaatttgttattggttccaaaagttctaatttttattgtttctcctttttcattccatttatattcttttttatagtacccttctggacctataacgggcttatcatttttatcaaaataagtatcataaaccacataacctaattcatttaatgtttgattgttagatgatatgccatcaatgttatttgttttttttccattttcatcaaaataagcatatcctatatattgttgctttgagttataataatatttgatcgacgaaaccccagagtcatttaacgctggttcattgtttttattaaaaaaagattcggacgtattattatcatatttattatagatgtatacagtcttacaaactcctttaactagtttattattagtgttatagtttagtataatagagtccctgcccgtaacagaaaggataaacttccgcttaaaaaagccatcaagtatttttggctccatattcttattgaagttagctctttctataagttggtttttattattatacttataggtgttataagtaacattttgatttgcatttgccagttctgatgaactgttataatatgttgtttttatcttattgttatttaaatcatagtcccatttaactatagctacatcggcttgaaactcttttaagtttcctaatgaatctagtgtagattcttgggttttattaccacgattatcatatagatattgaaattctacaatttcatccttggtttgagcataattattattggtatctaaataaattagttttttcaccctattttttttatccagatgttttttaagaatagcaacaccagaattatcattaaaaacatcattaaaaacatctacattacgaacataaactatggagtcattaaggtagttgtattttgaagccccccatttttcatcgttaaatgacagaacatatccaggataatatttgccataaaacaatgtgcgtcctttcttgtcaaatttttcaagctccatatggtaatcatctacacctagaacaggatcattaaatttgttaaaccttttagaactagtacggttgtcatataagtcatatgtgtaagtgtagatggaaatcccgtctttatttggagcaatttctgagtcttgattaagattaatatttctttttaaattacccctttcatcatattcatatttactgttataggaatataggtgcttagcaaaagtaccactctcgtcatactccttataaccaattaattgatgattagaatcatactccttgataacctttgacacaaaatctatatcattttttggaatgttattagagtcaaaaaaatcaagttcaattgttctacctaaagagtctaacgtatttttcttataatgtatgccgtatttgtttttaatactctttaaattgatatcgtaataagaagttatataacatccttgaggatcaattttactttcaatttgataaatcttatttacactaattctttcttctttagagttataataatgacctacttttttatttgctttgttgtaccttttataaatacaaaagtctaatccatcattcaaagtattattaggattaaaatatttaatttcagttaattctttgttctttttaattgaaactttagcggtattaaatgcccctccattttttaaaacaccatttttaaagaaataaacaatgacttcatttcctttttcaactattttgtaggattctccatattttgtgttctcttcataaataggaaatgagtgtagtatatcattgttaaaggttctgtaaatttttctaaagtatttcgtatcacctgtatcatattgatagtaactatgtatgtctgtgttttgaaaataagcagtttgacgtaatagatcatcaattttcatttcccagtacctttgtttttctacaataacactatggtctgtaacactatcgtattctaactgcattaattcgttttccgaatagtatttattgaataaagagtctaacgttttatcattgattttatctttacccagttttacaatttcttttcttaaaaggcgcgtatgatattcggtaatattaaaatggtactgctcgtgaattagaacctgatcatctaacatagaatccgctaatttttcagacttatcaggatccatataggcatatacatcagaatctaaccaagaaatactttctggacaataaatcccataatttattgtagctacataatccttttcttttttttcaacttttgtaaagttatcccatgtgatatttttttttgaccaaataactttattgcttgtagtgtatttttttctttcagttaatcctgtatataataaagctacaaacaagattccagaaataaaatagagtgtttttaacttaaacatcttttaaacgatgattaaaaatgaatgaatatagacccagagaaatataagttaatccaaaaataaataagattgctattaactcggaaattatagtttcaaagccaatgtctgctaatctaaaaatgacattatagagtctaatagttaaataataaaacccagcaaaaactaattgctgattaactaaactagatttttcttctggataaggttttttgtaataactaacatagagtaaaacaataaatcctggaattggcattgcaaaatatgaaagtgttagataggtgtcatattcaaaaaatattaggttgttaatgcctaaaattaaagcaagaagaagtgttatagtaataatttcaaaagtttttatccgagtgatttttttaacagcggggaatttaattgagctctttttttctagatattctttagatttagggttaagaccatatttattctcattattttgcccatcataaaaaaacataatgaatatgtaaaatggaattaattgatagaatccactatttcccaagtcatggcatcttttagaaccttgggctaataaaacccaatatgttgtaaaaataagcaagacaaatatggagtctaataattctgaaatttcagtaaaaaagatgtttaatataagaataaaagcataaaaaagaaaagttaatccatattcgagtcttcttattctaccagaaaacgaaaaggggtttttaaacataaaaaggctaaatttaatttaaatactaatatagtaacattaaaattacgtacatctagtttaattttaaaagtgttggattaatctagccttaaagttaatagaaaagctgatgtaagatccccttttgcgagaaaaattgttagtcagatattattgccttttcattgcaaattgtatttgctcatcaataatttgagagataaaattttccatattttagatgcattataatgagagattataagttctatatgaattgcaaaagggaattgcttacatactaaattctatttgtacagttagttaataacgaaaaaaattataagtgtttaaaaatcattttttgaagctttcaatgttcttttttctcaatatttattaaccaaatttgtattactcggaaatcatatatatgatatcgtctgttgtaatgcataattttatattttttattatcatgcccgcagaaattaaacctctattgtcaaaatatgaacgaggaaagaatttaaaaaatgtgtcaaattcttttcctaataaggcatctattcctgatttgtaaaccttgttggcataaataatttcaatggccaataaccctgttttacaatgttttttaacagcttggtttaaggttgtcttgtctagtaataatatgagtaaagctaaagtaatataatgagaaattaaaaaattttgagacaatttctgggtttcggtttttaacatggttttagttttatagtttataattctcattttttaatagcttatctaagatacgggcttaaaattgtaaattgaactattttggtgcccgtactgaatttctttcagtacctagcagaatctcataattataagttcaatttgcctaaaaaaagagataaatacctcattaacctttttatgtagggaaacaaaaaaggcgtggaactcaacttaccgaaaagagttactacttcgtttgcaaaaattaccagttttcttttcgagattcaaagcaattgcttcaatatcttttatttgaagaattgcaaacatatgtattaagctacaaatataataaaattttcaaaatgcgagtcatagaccgcattttttatttttccaatacattcttttgttactaatgaagcaaaatgagtacatatatggttatataaattccctatgggaaaaatctcgactttcaaaaagaaaatttgcaattaatcataacattgaagaaagtactcttagggatataattaagggaggaaattaccaaatttctttgcctactatttataaaatttgcgaatcacgtgatattaaaatatcagacttttttatagaggttgaggcatggggtaagtctgttaagagatagaaactgtttttagttagtacatttctccagctggtaactataacctattataaataactgcaaataaaaagtcccaccgaagcaggactaaagattttcatctacggcatatagccttattgtgataagattaaggattagaacgtttaatcttgctgctaagatactaaaatatttttcatacaatatacggttttctgtaagaaaaatatattttgttttttgtacatttaaaactcaaaaaattagggagttatgtcaaaaattttaggtttagatctgggtactaatagtattggttgggcattaattgacgatgtacaaaataaaatacttggtattggcagcagagtttttccaatgggggtagataatctgggagatggcgataatgaaatgtctaaaaatgccagtagaacaggagccagaggagtaagaaggcaattttttagaagacgcttaaggaagaaaaagctactaaaagcactttctaaacaccatatgtgtccgttaaaggacagtgattttgaaatatggaaaaaaacaaaacaatttccttctgctaaattggctatatggtttgcacagaatccttacgaattaagacacaaggcattgcatgaaaaattatctttagaagaaataggaagggttttttatcatttaattcagcgtagggggtttttaagcaatagtagaaaaggcggaacagatgatggtgctatttttaaaggaaataccaaagaaggaaaaataggtattacagaaactacagaaagtattaaagaaaaaacgttgggctcgtatttgtttgaaatacatcctaaggagcatcaaccttttcaatgtggtacagagcgtataagaaatagatatactacacgaaaaatgtatgtagacgagtttgagtcaatctggaagcaacagtcacaatttcatactgttttaaatgatgaattaaaaacactttttgggggcaggaaattagaggggtataaagaagacggtattttatttcatcagcgccccttacgctctcaaaaacacttagtaggtaattgttcttttgaacccacaaaaactaaatgccctataagtgccattgtttttgagcaatttagagtttggcaatgggtaaatacagtggaatgtaacggtgctaaaataagtcaggaagacaagggtaaaattgtggactttctgtattccattgaaaaaccggtttttaaaagaatccgaaaagttattggtaaagaaagtgcagaatttaaatttaactataaagatgacgataaaatagtaggaacacataccatttctaatctatctcataataaatactttggtaaaaagtggttcgatttcacccaaaaagaacaggatgatatttggcacgtattatatttttttgatagtaaatccaacttaaagcaatatgccattaaaaattggaactttaccgaagctcaagctgaaaccatttctaagttcaatgtaaaagatggttatgcaaatttaagtagaaaagccatttctaatattttaccctttttacaacaaagttatacttacgatgtggctgttgtaatgggaggggtaaaaaatgtttttggcgatacatggcagaatgattctttagaaaacaataaaaaacaattagaattaatcgataatgtagaagacatagttcgtactaaaattaagggcggttttattgatacgattaaagaattacttcgtaaagattttgggtttaataataggcagttaaaaaaattatatcaccattctgcttcaatcaataatgacactttactagaaaagttaccagtaggaaaagaagctgacaaagaaattcaatccataagaaaccccattgtaataaccgcattatttgaattgcgaaagctggttaatgagttaattgaggactatggtgagattgaggatataaaagtggaaatggcacgcgatttaaaatcatctaaatcacagcgaaataaagtacgtagaaatcaaaaacgattagagcgcgaaaatgatagaataaaaaccgaagtagaaaaatatgtgcgtatttcacacgatagtattttaaaattcaaactatgggaagaatgtaaaaaaacatgtccttacacaggaagagcgatatctgtaacagatttgttttcgggagaagttcagatagaacatattcacccgtggagcaggtcgttaaatgatagctttggaaataaaactttatgttgggcagacgagaatagaaaaaaaggaaataaaaccccttttgagttttatggaaatgatgaagttcattgggcaactgtaaaggagcgcgctttaaaattgttttcagatactaaagagtatcccaacgcttatcaaaaatttaaaaggtttgttcagcaaaattttgatgacgattttacctcacgacagttaaatgataccagatatataagcaaagaagccaaaggttatctttctaaaatatgcggcaaggtgaccgtttctccagggcagataacttcaaatttacgtcataaatgggggctaaatcatattttaaacaatgaaaactcaaagtctcgtgaagaccatcgtcatcatgctgtagatgcactcgtaatggcatgtacaaaagtttcttatgtacaagaattgtctaaatggaatgggtacaacagaaaatcagaatcaaaagtttttcctatgccttggaaaacttttaggtatgatgcggaacaagctattgatactattctggtatctcataagtgtattaaaaatgatatcactgttagaacacatataacagataaaaacggaaagaaacacaaaaataaaggcattgcagccagaggacagttacacaaggaaactgtttttggtaaacgaaaagcaccgtttagcgaagaagcatttcatgttagaaaatcaatagacagtttaacaacttcaaaacacctcgataaagtagtagacgaaactatcaagaccttaatattaaagcgaattcaacaactaggaggttttgataaaggaaagattccagctaatactttttttattgtcgacgaacatggtgtaaaacagccgcaaatatttttaccaaataaaaatggcgacccagtacctgttttaaaagtaaggatgaaagaaaactttagtggagcagaacaactgaaggatgatgtaaaccaatgggtaaaccccagaaacaatcatcatgtattaatttacaaagatgaaaaaggcgaactaaaagaagatgtcgttactttttggacagtagttgaaaggaaaagacaaggcgcttcaatttatcaattgccttctggaggggaagaaatagtaacgacattacatatcaatgatatgtttttattaggactcgatgaagatgaaattaattgggatactccagactataaggtattaagagagcatttatatagggtgcagaaattatcatcgaaattttatgagtttagattaaatagtgaagcctcaatacaaaataataataatccatactatgttaggatacaaagttatggagaaggaaaaacaggttggttaacttttaatcctataaaagtaaaggttttggtttctggaaaaataaagagatttaattactaaatttataatattaagttcattgacattaagggttagaaaacacgatattagaatatcatccaatactggatgttcaaaggttgtagtttgattaaggattagaaaacacgatattcgaagtgtcggacaaatatttcctttcacagttgtagtttgattaaggattagaaaacacgatattacaaaccataccgcaattaacccttcatcggttgtagtttgattaaggattagaaaacacgatattacactaaacaccatcttttatcaacgtatagttgtagtttgattaaggattagaaaacacgatattagaccctacagaaagaacaacgttaacgtcgttgtagtttgattaaggattagaaaacacgatatttaatcggaatcatgtccgtaatgccaaaaagttgtagtttgattaaggattagaaaacacgatattgcacagtctaaaaaccgtaaacccggtagtgttgtagtttgattaaggattagaaaacacgatattcatgtactgtatcatctagatacttgtactgttgtagtttgattaaggattagaaaacacgatatttgcaatatcgctacgatacgctatgttactgttgtagtttgattaaggattagaaaacacgatatttccaccttgtgtataagggatagccgaaccgttgtagtttgattaaggattagaaaacacgatatttatgaattgcacgcttaattttattacgcagttgtagtttgattaaggattagaaaacacgatattttgcagccgctacaggaattaagataactagttgtagtttgattaaggattagaaaacacgatattatcgatctgtccatcttgatccttgtccaagttgtagtttgattaaggattagaaaacacgatatttgtctcctgtgtatcgttatttgatgtctggttgtagtttgattaaggattagaaaacacgatattcgagcctgtttgctttttcctgtttcctaagttgtagtttgattaaggattagaaaacacgatatttcattaagattccgaaaaacaggtaaaaacgttgtagtttgattaaggattagaaaacacgatattatctcatctaacgaactcggattaaaatccgttgtagtttgattaaggattagaaaacacgatatttttagcagtacaataccattgctcgctagtgttgtagtttgattaaggattagaaaacacgatattccttttgcaggttaccagcttatttacaatgttgtagtttgattaaggattagaaaacacgatattctttacgtgttgctgtaacttcaaccactcgttgtagtttgattaaggattagaaaacacgatattagttgacttgttgtcttctgataatcattaaattaagtgtgaatatcgttttaaaaaatgcttcttttttgcagtgataaggcaagattgaagcatttttttattttaaaagagttctaattgggttggaggaggttctttagggacttctgagcgtccccaaaagttcatgatattaccaaattgtttgtctgtaattcgtaatacacttactttacctaaaggcgggagtagtcttttaatacgtttttcatgtacatcggcactttcactgctcgcacaatgccttatgtatacagaatattgcatcatggtaaagccatcttttaaaatgtttttcctaaaaccagaagcattttttctgtctttagcagtttcagtaggtaaatcaaaaaatacaaataaccacataattctatagccatttagttccataatttagggtacttaattttttttctttttccaacatagcattgttgtaaagaactggctgttttttggagcgctaccattaaaggacttttttcatctttaaagtaaaccgttcttgttagggtttgaagaaggattgattttatttctgtatttaaatcttcctcatcataatgttgtgttatggtatgaacagcttcgtctataatgggcctaaagggttccataatatcatctgccaatgcaaaggcattatatttgcttttatgatgaatacccaatgtattcaacagaccgctacccgataaggctctggctgtggcagctcttaaaatggcgtaaccatagtttaaaaaattgtttgggtaattcccgaaacgttcccttttaaaattaatttcaaagaaagatttccagtaaaaattggcagctacggcttccatattggaagtgtctccacttaatactttactcgccagaaactcaaatttgtttttcgactgtgttattttttctaataagattccctggtttttaattttctcaataacagtttgttgccataattgcttttttagtggtagacttgcctcaacctgatgcttaaagatttcttgttgaatatgatggctgtttaaatttaaaaacatgccatttggtaaatgtgttttattgcaaataattacagatgtattatttgcaataagtagatttaaagtggttatgcttatgtatatctctggattatctatgactataaacccaatgtcttctataggaatggttgtatctcttgtttccgatttaataactaattgttcatgtttagtagtgagcgagcatttgttggagaataataacgtctttttaatcattgttaattggaattattaaaaaataataattatctaattagcctgataataagagagttaataaagatactaaaataacatttaatattttacggatatccgtaattagtaataatgttgcttttatagtgtttacaaactagattccatctgtattaattatttaccgtagttttggtttttaaatagaaagccacaatgaatttattcgatatcttattctataatattttctcgcaatacaaaacgaagtataagcaaaaggctaacaacatagctattgcttatgtaacacttttacaggtttcgctactattgcttttaggtgttttctttgcagggttttttaagcaaatgcatatggtaaccatgtcgtctaccaaaacatggacattatttactttaatttctgtgtttatttattttaaaaactggatgcagtacacaggcaaaaaacgtatgatgataaatgcaaaaatgaataagaaaagaacgcagcattataatatttggttgctttggcttttgcctattgctgctttggtgttgagttatgttgtgtatcaggcggtttaggacgtattgttcattcagagtgcggcgaagaatctcacctataataatttagtgaagcttttaaatgtaaaataagcttagtacgagcaagatcctcaatatcgtttttatttaagagattgccgcagtcgtacctccttcgcaatgacatatcatttaactataaacaagtctttgttcttgattctaaaagcaaagcggtctatgttctttggagatgataacagattgccacagtcgtacctccttcgcaatgacatatcatttaactataaacaagtctttgttcttgattctaaaagcaaagcggtctatgttctttggagatgataacagattgccgcagtcgtacctccttcgcaatgacatatcatttaactataaacaagtctttattcttgattctaaaagcaaagcggtctatgtgctttggagatgataacagattgccacagtcgtgcctccttcgcaatgacattacttcttaaaaatagcatacacaggaaaatggtcactataaccacctttgtatctcttaccaacaaaggttctaaaaggtgtgcctttgtatctcccattaaagagttttaggaaatcttcatcaaaaatattggctgtgctaaactcgaatttatcagtcgtgcttttaaaaaagttagttgaaaataaaatctgatcgaataaattccattgtcggttgtggtttgtcgttcctctattgtaagaccgtaagacttccatagggttatataaattagaaccctcaacaagttgtttaatacttctactggaaggatcgtcgttaaaatcaccaataacaataattttagcatctggattatcgtcgcgtagcatcgaaataacttctcctgctttattagacgatgccatacgcttatgttctgtttccttttcgccttcacgtctagacgaccaatggtttacaataacgtgaatggtttcaccatcaagtagaccagaaaccagcaagatatctcgcgtgtaatccggtgagccatcatcatcaaacaactggatggtaaaagtttcagaagcagtcacttcaaaagcattggcatcatataataaagcgacatcaatcccacgttcatctaaagaatcgtaatgcacataatcgtaattgcagccctctaaatgttcagagtttattaaatcttcaataacagaagcgttttcaacttcggccaatcctacgatggcaggatattttcctgtttcgtgcctcccgatgttagaaatagcaaagcccagttttttgagtttatttttataacgcttaggggtccatttttttaccgaagtcggtaaaaaatcattgtcgtgagtgtgtttatcttccgtagtgtcaaataaattttcaaggttataaaatgctacggtttgcaaatcgtctcgaacgggaatgtcttctaaagcgtctgtcataaatcaaaaataggcttaaaaatataaaaataataatacctgtaaatgtttaactttgcaacatgatagaaaagaaagatatggctttagaaaaagctgttttaataggtgttattactaaagatcaggatgaggtaaaatctaaagagtatttagatgaattggagtttttaacctttactgccggggggtatgccataaagcgttttactcagaaaatggatatgccaaaccctaaaacattcataggtactggtaagatggaagatgtacgccaatttatagaggaaaacgatgttggtacagctatttttgatgatgaattgtctgcggctcaagaacgaaatattagtaaaatacttgatgttaaagtattagacagaactaatttaatcctcgatatttttgcgcaacgcgcgcaaacaagttatgccagaacccaggtagagttggcgcaatgcgaatacttactcccacgattaagaggtatgtggacacaccttgaacgacaaaaagggggtattggaatgcgtggtcctggggaaaccgaaattgaaacagatagacgtattgtacgtgataaaatagcgttactaaaagcacgtataaaaaccattgataagcaaatggccatacagcgaggcaatcgtggtaaaatggtgcgtgtggcattggtgggttatacgaacgttgggaaatctacgttaatgaatgtagtaagtaaaagtgaagtttttgctgaaaataagttatttgccactttagatactacggttagaaaggttgtgattcaaaacttaccgtttttgttaagtgatacggttgggtttataagaaagttgcctactcaattggtagatagctttaaaagtacgctggatgaggttagagaagccgatttattactacatgttgttgatatttcgcatcctaattttgaggaacatattgagtctgtaaataaaattttaggtgaaataaaaagtggtgataaacccactattatggtgtttaataaaattgatgcctatgaagctgagcctttggaggaagatgatttagaaacggaacgtacagaaaaacattattctttagaggaatggaaaagtacctggatgagtaaggttggtaataatgctttgtttatttcggcaataaataaaagtaatttagaggactttaaaaaacgtgtttacgatgaggttcgagacattcatgtaacacgttttccttataatcatttcttatatccagattataattatgaagatatggggaaataatgtcattttatatttgaatttgtcataaaagaaaatgatataacgcaaacaaaaaagcatagccccaaaatgaattggattttatcgttattgaagaagaaatgggttaagtggttcatgctggtttgtgcctctgttattgtcttttttaccatcatttacataagtgtacttttaggcttttttggaaaactacccacagaagcagatttaagttctattaaacaagccgaggcaacacaagtcttagataaggacagtaagttaataggcaagtactacatttatgataggcagcctttaacttttaaagatttcccaaaacaccttattgatgcattaatagcaacagaagatgttcgtttttacgagcatgatggtgttgataatgtgagtttacttcgtgtactttttaaaagtattattttaagagataaatcggcaggaggtggtagtactattacgcttcaattagctaaaaacttatttggaagaaagaaacatgctgtatttagcatgctaattaataagtttaaggagtctattatagcaaaacgtattgaagctatttattctaaagaggatattttaatgctttatctcaatacggtgccctttcccgataatacgtatggtattgaaagtgcttcgcgtaaatttttcaataaaccggcatcgacgttaacgcatttagaggcatcaacacttgtaggaactttaaaggcaacgaattattataatccaaggctttatttagagcgaagccaatcacgacggaacgtggtttttcagcaaatgttaaagtatgggtatttatctcaggattcggttgatttgtttaaaaaacaagatgttgttttaaactataaatcgtttcatcacgatgtggggttagccccctattttagagccgaagtaaaaagagaattagcaacgatattagatacgcttaaaaaagcaaatggcgactcgtacgatttgtatagagatggtttgattgtacacacaactttagattcaggcatgcaaacacttgctgaaactgccatgaaagaacatctttccagtttgcaaaaggctcatgaaaaatcctatgggaaatccgcgccgtggcttgcaaataaaaatataattcaaactgccctaagaaaacttccagtttataaatcgtataaaaaattagggttaacagaagcacaaatattagattcgttgtctgtaaaacgtaaaacggaattgtttagatggacagggaacactattaaaaatgtatctactattgatagtttaaagcattatttgaagtttttaaatactggcatgctatccatagaacctcaaacgggagccataagagcttatttaggcggcattgattatcgtttttttaaatatgatcatgtctctcaaagcgaacgtcaggtaggttctacattcaaactctttgtatacaccacagccattgaaaatggtatgaaaccttgtacgtatttttcattatctgaagtcacctatacagattttgataactggacgcctacaaactctggaaaggacgaagatacagagcaccttaactataatttagaaacggcattaagtaattcggtgaataccattgcggtaaaagttttaaataaagtaggaattgagagtgttatagaacaagcaaaaaaaatggggatttctaaagaccttccagaaaaaccatcgttggctttaggtgttgcagagattaatttgaaagaactcacaggggcttatgcgggttatgtgaatgatagtaaaagtgctaaaccttatgcgataacaaaaattgaagataaagaaggaaatataatcgcttcttttaaaccagaagttagtaaggaaaaggtttatagtgattacaccagacaggtgatgctgaaaataatgcagtctacagttaatacaggaacagcatccagattaagaacaacgtatcagcttaaaaatgacattgccggaaaaacaggaacaactcaaaataataaagatggttggtttgtgggtattacacccaaacttgttactgtaacatgggttggcaatgataaccatagcataggatttaaatccacaggaatagggcaaggtgctaattcggcgttaccgattttcgcaaagttttatcaaaagatgaatgctgatgcgcgttttaataacattactaaaagccaatttgaaacacctactcagaaagtgttggatgatttagattgtaatccggaaaagcgagatgggttctttaaaagaatttttgggaataagaagaaaaagaaagcctttaagaaaaagaggtaaaggcaactttttcattgagaaggaggaacgactgaagaatccaaaaaaatgttttttactttattgtaattcaataagcatggtgagattcttcgctacgctctgaatgacattttagctttaattgtgttttattcgatatgactatggtgcagttttcctttagccttacaaatcctttcatctagttttaggtgctcctaaaaaagacaagattctttaacaaatgaacaaaataagctgcgttgtcattcagaaggagggacgactgaagaatctaaaacactgtcctttttttactaccaatgcgtaaatgcattgttaatgtatatgaatttagagggtctccttatacaataggacaatgagattcttcgctttgctctgaatgacatttgagcctcaattgtgtttaattcgatatgattgctaggtgttagtattgtagattctcacgttacgcttttagtactctttaaaaggcacgatcctttaaacaaatgaacaaaataagctgcgttgtcattcagaaggagggacgactgaagaatctcttatatagtatcatcaagaaatgaccacttaggattaatactagaaattagattattctttttttctctactccaacctttgatttgcttttctctttttatagcattttcaatttcaaaaaaatgttcataataaataagataaaaacatttgtattttgaagtaaaagcttttgaaaaaggttctgggtttttatgaaaatagagtcgttcttttaagttattggttactccagtatatagaactgttttcattttatttgttagtacatagacatagtagttatgtgtgccttttgttttcatttagtgctatttttatgagattcttcgctgcgctctgaatgacattacctctatataaaaagaaatcgttatgtcattcagaaggctatcgaaaacaaaatatattttgtttgaagatataagcggagcttacgactgaagaatctaattttgtttttactttactactggtagttctataaatatagtgagatccttcgctacgctctggatgacatttgtattgtgctttaatttctaacctttctacagtgataaatatattcagttataaaatttttatttgaagtcatttcacacgcttcaaatatttgctgaaatttcttgaagttgaatttggtatataaaacctgactgtaataggcattattttctaaaagatcgtaagcatcctgtataatagccaagcctttttctttactgaaaaaagaaaatggaatagatgaaattacagcatttacattttcttttacatgtttttttaagttttgagcgccatcgttaacaataaccaatctgtcatctgtaatgtttcttcttacatgatcgcagaaactttcttttacttcaaaagtatatagttttgatgttggcgcgatggtatttaatatttgctgagtaatattaccatgtcccattccaaattcaacaataactttattgttttctgttgaaatgtgtttacaaatatcaatttcaacctgtctactggtttcagatatagcaccagtaactaataggttttttgcaaatgcaatagatgttttaagtttttgattcatctaattttgttgatttttgattgaaatttattacttaaataataagtcc

SEQ ID NO: 2644 - DNA, 23393 bp, synthetic construct
  source 1..23393: mol_type = other DNA
  misc_feature 1..23393: note = Synthetic
gctttttactatctctgttttaagagctttagcttcatgattgctattagaaaaagtattctatcgagagttgggttcaggtaaaggtataatttgttgtaaatccttataatcattgttttcaaaaagccatccaccatttttattggcaaatattatgttgtatttcgaattaaatttaaaattcttatgattgttaattgtatctattacaacatatttattttttctctgtttcaatgatataagaatctgtgatggaatattcaagttgtatgaatcaaaaaaatcacctttaacaaaaacagtatcaccaattttattccaagaatgaacatcatattggggcaaaaattcattttcaagatttcctgtttcaaacaggttaggacttaatttatttagaaaataaattttactacctgtttgaactacttcatttttactagcacaactaaagtgaaataaaataataaagagtaataaatttctcatctaatgttgattatttctgtattgttttattaattcaaatctatagtgcctattaaccatcattcttttatttcttgttaatctagttatcactacaagagaagactcgtgcaggagctaggggtcttctaataatccagattctccagcatagtctatagcactgctatatacataatcttctgccttgaacactaagcctccaacaactgggttttgatggatataatttatcttttcttgaattacatgattactccataattcaattggtttgttatcatgtctccagaactgatagtttttaacattggatgatttttgagctgcttttttaaaagctaacaataaaaattttttccgactttctcttgagttgttttcgatagctttaacaatttgcttacttgtataccttttaaaatctccaagtagtacttcaggttttatttcaatagtacttctaaagattaaatgaacatggttggtcataatgcaccatgaaataatttccattccctttttcttctgacagaatgataaactatcaagtagtatatctttataaatatttcttgtaaaaacatccaaccaatctaccacagcaaaacttacaaaatattaaccttccgaattatggaatttataattcctactcataactttttaaattaaaagtaatacccttttttgatttttataaacttatttccaaataaattagctgtagttttaccacacgaggggactcgtgcggcagctggggggcaaagtatccttataatggaccttacaactttagtgagaatagggttatagatggtgttgaattagaggggttggagtatggaggatcaatcgttcaaggtttatataattggatagaggctaagcctaagcttgatgtacctgatgaagatgatattcatgatgaatatgatattcatgatgaatatgaaaaggggccaattttatacggagagcttaataaaagtggtgtaatacatggaaatatagaaggtggaaggccaaatggtacatcaattggttctgatgacatgaaaatcaatacaagtagtgctaatcattttttagatttgcttgcaggtttaatggacgcagcttcaaaagcacctgatctattcgatggagtagctgacctattttttgatgaggaggagggtgatcaagtaactacgcaaacagtagataaagaaaaatctaaagctgaaacggcaggtacggcttattcaaaaggagggtataaatatccattaatagtggagaaggatacagttgttaataaatctgatgttgaaagtgttaaccaacagaaagaagaggatattcaaaaaataaaggatgcagcaaatgagttcaataaaaatgaagggtatactggtatacctacttattagtttagtagttttaaattcatgtaagaagaacaatcaccaacttttaaaagatagtattaatgaaagagaggtgataagagtctataaagattctatatatactggattctatatttataatagtactgaagatgaaattaacaataatgatactttagaaataattagtcatgataaaattctctattcaacatctgaaattggcatatttaacaacattgaggatattaaaaatgtaaaacattatagttatctttttgagtcagacaccctaaaatttaaatttagattttcggaagctgggagtaaattaatgagtttcctgattgcggattattttacttactataataaaaataaaaacaggaaagaaataataaaaacaattttaaaatcaaaaactgatttcaaagtgatagaaaatgaagatggcttcaatatcaagaataaatgcatctatctaaatgatttttagcctccccgctcccgctagtttctaactagtggcgagtatgagttaggttttaacaatgaaggtgatttagaatttattttagaaagagctagttatgccatactcagaatccagcccaactgccgcaagaatcttctcgtgtggcagctgggtactcataaaaacaaaaacctctctaaatcttttacaacttagagaggttagttcttactcttttgttttcttactcataaccgccactagaaaaattctagcggtagccatcatttagatatactagcaccatcagggaatgtaaattttatttctcctaacaaatgatttttttaatgatttatactttttcttttctatatctatgttaactgttgttcttgaacatgaatttgttgtataaaaaaaggattctttataatcaaaattagactcttttgcctcaaaatttagatataatatagctctgtttccatttaaagatataccacattgatctggatcactgttcgagtaaaatgttataaattttgactttaattgaccttttattagtttttcaataagaaaagtatatttataatcatacagttttataataccatcatcaaaaacttttatttcttttttatcaacctgtttgccaataaaaattaaatcagtacgcttgacactttttttgaaagtgtttttatctaaacatgtacaacagaaaccattattagtgcataatagtattataaaagaaattaatgttatcttcgaaatttttaaatttatcattttagattctattctgttactactgtagggtctcctttctccctgttctctcctgatgtataatcgtttacatactcaataatattatttacatcctcatcggatattgatttcatttctatttttccatttgaggattcagtatattccattctccctcctggagtataatatttaccaccttcgtcatttagacccaataagtgacctatttcatgagatactaatttgaatgaagccccaaaatcaattcctccataagtgttcataacaataaaatcacttccagtatatccaccaacagggctttttttgttttgttgatcagtgcttatatcatgatttttaccataatatgtatttccaatattgtcacttcttccactttgtgttgcttcggaatactgaattgcttttttagtagatcttaacaaatctttatctgtttttcctttagccgaaacaatcctaggatttttttcaatagcttcttgatctgttatctcacgaggttctataacatttattctaaatctaacagtaactccgtctttttggatttctttattattccaagactcaacccccttacgagcttgttttgctgtgtggctagaaactgtataaatattagctacaattatcattgtcttattaccatcagcatcttcatccatttcaattccaaaatctcgaccatcataatcaacaaaaagaattggattgtttgccgtataattatatgttgataaactaggatacttacctgccaatggatctctagcaaaccacctcccaatcctcggatcataaattctcgcgccataatcaatactatttccatccccttttatctcgttatcattctccattccgttgaatccatacctgtatatcccgctgtcttcgtggcggttaggctggatcatcccaaacggatagtaattaatttcgttgtatgtactgtgtttattgatgatttggatactttatggtgtgttgttattgcactttaaagcaaaaaaagcaacttttttgtactctaatatacagctttttttgttagtaaatgttgacatattttatgctcaataatatcctaaacgataagtgaaaaataaattcacttatcgtttagaatacttttttagttgcttttattcaattgtaataactcgttacatacgatttctgtaatatatcgtttgttaccttccttatcatcataagatctattcgttaactttccttcgatagcgacttcatttcctcttttgattttagattcgatacgttcagcaagttttccccaagcaacaatattgtgccattctgtattggtttcccattcgccacttttgtttttataactttcatttgtagcgatgctaaaacgggctaactttttccctaattcatattcaatgatttctgggtcatttcctaagtttccaattaactgtactttgtttcttaaattactcataacgtgatttttaataattaataaaatgtgattgtcgatctgttgacactgcaaaattgcttactctcacaagttatatccgtctgttaaatgattacttacgaaagtaaacgaatgcaatcgattaaatcgaataatgaatcatttgttttatcaatgaattattttataaattgctgatggtaaaatgaggacaaaaatattattttttggtgcttttttggttttatttggttgtcaaaagcctattgaacataaaggtgtatacaagagggtggttgacaattatggtatagaagtaaatgaagttgcatacacatttaatataccttccagctatttaaaggcattaattctattggaatgttcaggaaggaaagacccaccgtctcgttatgaaaagcacgtttataaaagattaaaaagactaaaacaaggaagaagaagaaaagttgagcaaataagaagagtagatattatcgatgcttctgatgaagctttgaaaaacttagcccgttcatggggaccataccagcttatgggttataaatgtttgcagttgggaattactgtttcagacataagaggaaaagatgcggtatactggggtgcaaagtggatcaatgaagaatatggagatttgcttcgagctggagattacgaaggagcatttcgatatcacaacacaggaaatagaaaaggaaaaacggccgaccccgattatgttcaaaaaggcctggtatatatggaatactttgaattgtattccctttaaaaaaacaattggaaaagacaatgaaaccactagtagaaaactgtttagaatgcggtgagccattaagaggaagaatagataaaaaattctgttctgattactgccggaatacctacaataataaggtagatgtagggagcaaacgcatgatccgtaatgtgaacaatagactgagaaaaaactataaagtattatcagaattaaatatcacgggtaaaactcgtgttacccgtgtaaagatgattagtaataattttgattttaatttattcacctcaatatatacaaccaaaacaggtaatgtatattattatgtttacgatcaaggctatttagcattagaaaatgattactatctactaattaaaagagattaaaagaaaacttattctccgtctgttttgagttgatcgttagagcagcctttaatatttctcgttgactcacctgacctacgagctttccattatgaatcacaggaaatcgtcttttccgtttctttaaaaatagattgacagcgtcaaaaatatttgtgttttgactaatggtttccacttctttgatcataaattgctcaacttttgcagatcccaaaggaacattgaaataacgattgtttgcaatttttcgaagacagtccctctctgaaatgataccaacaagttcatttttgtcgttaacaaccggtcctccggaaatttttttgcgaacaagcgtgtccattacagatagcattgtttgatctggtgtgaatgtaattactttagtaatcatgtaatcggctactaaaatcggtttagtaaccaacttgtcaggttttaccttttttgatttaaaatttttgattgtcatatcgccccgttttttgtgattcctaataagatacgatttttatttggaatcttaaaattaattaactgataaacagtgttttgtgtcgttttttgcttcttgctaaatgataaatgtcatattaaaatgcaagcagtaggattaactttgtactctaaaaacaggaatatgtctaaattagttaatgaaatattaaggcttaaggaagagaagaatgcggtaattcttgcgcattactatcagcgaccagagatacaagaaatagcagattttgtaggagatagtttagggctttctcagaaagctaccgaagtcgatgcagatattattgtttttgctggagtacattttatggcagagactgctaagattttgaatcctaaaaaaacagttgttttgcccgatttaaatacaggttgttctttggcagattcttgtccaccagatagattcagagaatttatagaccgttatccagatcatatggtgataacttatgttaattgtagtgcagatatcaaagcgatgagtgatgtggtttgtacatcttctaacgcgcttaaaatagtaaactctgtgcctgaagatcaacccataatctttgcaccagacaggaatctaggaaactatattaaaaaagaaacgggtagggatatgttactttgggacggtagttgtattgtacacgaagcttttagtattgaaaaattactagagctacacaaaaagcatcccgatgcagaaattatagcccatccagagtcggaaactcatattttaaaagtagcaaactttataggatcaacttctcaattgattgattatgcaaaacaaaaccctactaagaagtatatcgtaggtacagaagcgggtattttgtttaaaatgcaagaagctgttccagatgcaactttgattcctttgccagcagatgaagacaatagctgtgcatgtagtgaatgtgcatatatgaagatcaataccttggaaaaattaagagattgtatccgtgatgaatcacctcagatacacattccgcaggaaaccatttttgatgctcaactaccgattaggagaatgctagaactttcatagaaaacatgaaaacagattttttggtcataggttcaggtttggcagctttaagttatgccattaaaacagcagaattctttgtagataaaaaagtgcttattttaacgaaatctgatcttgaagagtccaatacaaagtatgctcaaggaggagttgccgttgttcaagattttgaaaatgattcttttgagaagcacattcgagataccctaattgctggtggagataaatgtgaccaagaagttgtttctaaagtaataacagaagggcctaaattactcgaagatttgatgctttggggagtgaattttgatcgagaaccttcaggaaatttgtcactaacaagagaaggggggcactcagaaaagcgtgtggtacatcacaaagatatcactggtttagagatttctaatgtgcttattcgcaaagtcaaacagctccaaaatgttagtatatggaccaatacatttgttaaagaattactggtggcaaataataattgttttggctgtacgatagttttgggcaataaaattcaaagtgtctttgcagatcaaaccgttttagcaacaggaggaataggaagtatttatggagcgtcaaccaatccatctattgcaacaggagatggtattgctatggccattcgcgcaaatgctagagtagaagatatggcctttgtccaatttcacccatctgcgttttatattgaagatgaagagcggtattttttgttgacagaagctttgagaggtcaaggagcatttttgaaaaacgaaaaaggagaacggtttctattgtctaaagacagtagagcagaactcgcaccaagagatattgtagcaagggcaatctttgaagaaattcatttcaaacaacatcaggtgtatatcgatgccacgcattttgatagccaaatgcttaaaaaccatttccctaatatttataaagtttgtaagcgaaatggatatgatatgcagcaggataggataccgattacacctgtttcacattatatctgtggaggaatagctgttgacctgtacggaagaacatcagtagacaatttatatgcttgtggggaatgcgctcgaactggcttgcatggggctaaccgtttggcttctaattcccttctcgaagcactagtttatgcaaatgaggtgtttgaataccaaaagaaacatcaagccattacgagattgaacaatgttgattacacgaatgcgatacatactgtagtattagtaaacgaatcggataagattgatcaattgaagaaatcgttaaacaatttgatgattcacaaagtaggtattgtacgttcatcctcaaaattggaagaggcttttcgcggaacacaattattgatagaagaggtttccaaattaaagccaagtatagagacgtttgagttgcagaatatgctagttgtagcccaacaaattatctttgattcgcaggctcagaaaaggaaccaaggagggtattacaatattgatttgatctagcaattatttaaagatttcatttaccgcttctgttctatactcaaaaatttcgttaagttttttttcaattaatatcgtattggcaatacgtcccaggaatccaaaaggaggttcatagctcacgatatcagtcatcagagtacctccgtctttttcttctaaaatatgctgatgatgccacaggttgtaaggcccaatgcgttgttcatctacaaaatacttttcgttaaccacatgtgtgatttctgtgacccaagttgttttaaaacctggaaacggtgcaactttataagaaacaatcatcccttggtacatgtgatctggaacgtcttttgacgtgatatcaaaccccatgtgatcgggtgtgattctttttaaattttttggatcggatataaattcccaaacctcttttttaggcctgtttatgaattgagttcttttgaattgataaaaagccatgaattaattttttataacaatataagcatttagagacgttgcgattaataaccaaataacgtatggtaaaatcaatatggatttcgctttcagattactgtaaaacgtatatagaagataaaatacagtaatggtgagcaagctaatgataatcaaaccgaagaaggaataattaaaatagaaaaatacgggattccaaccgatattaaggacaagttgaataacgtaggcaatgaacaatgaccttttacagtcaatagcagaccatagatatgccatgtagaaactaaaacaaatcatgatagttgaccaagctactccaaaagaccaacctggtggcgtccaaggagctttgtctagattttgataccagtcagaagcaacgccatcagacgtaaataagctccctattgcaagtgcaccaaaattgataactaaaaacagtagtactcgtagaatcatattagtagttgtaaaaaatcccaccgaagtgggataaaagattttcatctacggcatatagccttattgtgataagattaaagattagatttgttttctttcacatcactaatatagtagttttttgttgtaaaaaagctcgtttttagatatttttagtacttatttctaaaaattgcaaatcacacgatcatgataaaaaaattaggtttagacctaggaacgaattctataggttgggcattgattgaagagggaagaattattaaactcgggagtagaatttttcctgaaggggtagtgaatttaggagatggagaaggtagagaacagtccaaaaattcgagtcgaacagaagctagaggaaggagaaggcaatttttcaggcggagattgagaaaaagatacctattgaaggagttagcaaaaaatggtttatgtccattaacttccgaacaagtaaaactttggaatcaatcaggcttttttgagactcaagaattaaaaagttggtttgcgttaaatccttacgagttgagagtaaaagcaattcatgaggaagttacgttacacgaattgggacgaattttctatcacatgattcaaaggcgtggttttttgagtaacagtagaagtgcgagtgctgagttgaatgaaaagagtgtgatttttaaaggagatgataaggtaggtaaaattggaattgccaaaactcttgatgatattagcgaacataaaaccttaggagcttatctggctacaattgctcctaaggaaaatgaacctttcaaaaacggacaggagcgtattcgtaacaggtatacaacacgtcagatgtttatagatgagtttgaaatcatctgggaagcccaaaagaaatatcataccgctcttacagatgaactgaagtctataattggaggaagaaaaaaagatggttataaagatgatggcgtgttattccatcaaagacctttgcgttctcaaaaacatttggtaggaaactgttcttttgaaccaaaaaagagtaaagcattaaaaagtaccatttattttgaacaatttagagtctatcaatgggtaaatactgttgagtgtaacggaaaaagactgagtaaagaggatagagaagtattggctgaccaattatttttaaaagaatcagttaccttcaaagctttacgtaaaagtttaaaaaaactcgatgcctactaccagttcaattacaatgatgatgataaggtggtcggtacgcataccatcagtaagctatccaataagaaattttttggaaaagaatggtttgattattcagaagatacacaggagaaaatatggaatgtgttgtacttttttgatgatagagataagctaaaacagtatgcaatcgagcattggggatttgatcatgaaaaggcagaggccatatcaaaatttaatttgaaagacggttatgcaaatttaagtttaaaggcgataaaaaacatattaccatttttaaaatcaggttttcagtatgatgttgctgttggtttagggggtgttaaaaacgctttaggagagcaatgggaagaaaacaaagcatttgttttggacaacgttccagaaatagttcgttccaatttaaagggtggttatatagagccattaaaacaaacattacagactgaatttaacctgtccaacaaacagctactaaagctataccatcacagtacgtcaattgcaactacatcattattagaaaaattgcctttgggcaaagaagctgatagagaaattcaaaacattaagaatccagtagttgttacagctttgtttgaattgcgaaagttggtaaatgaactgatagacacctatggaaagatagatgaaatcaaagtcgaaatggctcgtgatttaaaagcgtcgaagtcgcaaagaaataaagtccgacttgaacagcgaagattggaacgcgaaaacgatcgggtaaaggataggttagaaaaagaaggcattcgaattactcatgacaatatgctcaaatataaactttgggaagagtgtaatcgcagatgcccttttacgggaaaaaatattgctatagaacaattgtttagtggagacatccaaatagaacatatttttccatggagtcgatcactgaatgatagttttatgaacaagacactttgttatgcagacgaaaacagggcaaaaggaaatcagacaccttatgagttttatagtgcacagggagaggaaaaatgggcacaaataaagcaacaagcattatcctgtttttcattcaaaaaagaatatcccaatgcatataaaaaattcaaacattttgtgagaaaaacacatgatagtgattttatatctaggcagctaaacgatacacgatatattagtaaagaagctaaaaactatttgtccaaaatatgtaacaatgtgacagtatctcctgggcaggcaactgcaaagttgaggtaccattggggattgaatggtattttaaacgaagaaaacgccaaggttagaacagatcatagacaccatgctattgatgctttggtgatggcttgtaccactagagggcatttacaagaattgagtaagtggaatagttataataggtcttatgaaacaaaagatttcatagttccatgggaaggctttctgcaagatgcaacaaaagaagtggacaatattttagtttctcatcgtagagataaaaacttgttgactgttcgcaagcatttcacaaagaaagacggaaaagtatatagcaatataggtgttgctgctcgtggtcagttacataaagaaacagtttatggaaaacgtacagctccagatacattagaaccagctttccatgtgagaaagcctgtggttagtttaacgcctccagaaattaccaaaatagttgattctaaaatcagagaaattgtatatgaaaatatacaaaatgcaggtttacttatcaatagtaaagataagaaaccagtagtcaaaacgcctgaagagaaaaaaacgtttgaaaaggttttaagcgaagggttttacttaccaaataaaaaaggggaaccagtaccaattaggaaggttagaattagaaaacgctttacgaaagttgagcctctaaaaggagatgtaaatcaatgggtagatttgcaaaataatcatcatgtgttgatctataaagatgaggaagggaatttaaaagaggatgttgttacattctggctagctgtagaacgtaaaagacaaaaacaacctgtaattcaattaccatcggatgggtttgaaattgtaacaacgttacagattaatgatatgtttttattggggttaaaagaagatgaaatcaattgggaaaaccctgattataatatgattagaagacatttatttagagttcagagtgcttcgtcgttctattatgaatttagaatgtctacaaatactgaatctcaaaataagaaagaaccatattatttttacataagaagttttggaaatggtaaaacaggttggaacactcttaatcctattaaagtgcgagtatcatcgataggttcgatattcaagatttagtagttataatatttaacgttctttgaaattagagattacgatattagtaagcccttcggaatcaatcccaagaggttgtggtttgattaaagattagagattacgatattcgttaacagcaccagggaaatacatcattgttgtggtttgattaaagattagagattacgatattcagtttctattgaatgaataaacgctacatgttgtggtttgattaaagattagagattacgatattccaaggaatcaaaggaagtgccatcaccagttgtggtttgattaaagattagagattacgatattgtagttgagaatggttggagagatataggtgttgtggtttgattaaagattagagattacgatattgagtcatttaaaaacgacttcttagctgacgttgtggtttgattaaagattagagattacgatattagttgttgtgttaacttctaataatcaaaagtttgagtaaaaatatcgtgaaataaaatgcttcttattgggctggaaagactccgtttgaggcatttttctttttctatcaaaaaagttcgagttgagctggaggtggctcttttggaatttctgctttgccccaaaaattaacaatatttccaaattgtttatctgtaattcgtagaatacttactttacccagaggagggagtaaagctttgatccgtttttcgtggacatctgcactttcactacttgcacagtgacgtatataaacagaaaattgtttcattgtaaaaccgtctttcaaaagatgttttctgaattgttgtgcattacgtcgatccttcttcgtctcagtaggtaaatcaaaaaatacaaataaccacataatacgatagccgtttagttccataatttggggtaattgagtttccgagttttaccactaaaacaactttgtaaagattgtgcagtgtaagtaagtccaaccatcaaaggacttttcttatcttcaaaatagactgtttccgttaagacgttaagtaattttgttttgataggaacgattaagtcttcttcatcaaattcatttaatatttccaaaactgttctatctacaaaaggacgataaggctccatgatatcatctgctaggcaaaaagcattgtatttgttgtgatggtgaatccctaaagtgtttagtaaaccaacacctgataatgctctagccatagcagctctcaaaatagtgtatccataattcagaaaaagatttggaaaagcaccataccgttcgcgtttaaactcaaaaggaaaaacgtgtttccagtaatatgcagcagctgccgcttcgcgattatcagtgtcaccacttaaaacttttgattcataatgttttaaaggatgtttgagatggtcttgtagttccagtacttgggcttgattggtgatttttgcttttattgtctgttgccagagttgtttttttaaaggttcagtcgcttgaatttgattttgaaatagctgttgctgcaagtgatgtccttctaaatttagtaacataccagtgggtaggtgcttttcgttacaaaaaataacactaacgttgttacctgttaatttgtttagagcgggaattgaaatatatatttcaggatgctctatgactacaaaaccaatatcctctatgggtattgtggtttccctagtctcagatttgattactaattgttcgtatttggtagttaacgaacttttgttggtaaaaaataaggttcgtttgatcatttcaatttttttttagtgcaaaaggaaaggaatcttcctgattttaagttaaataaaaaaaaatcgctcaatactgacttatatcatattttctactgtgttagggctatatatttgaagtgtaattagcgggtaagctaattcgattatgaagtataagagttctttttagaattcgttttataataataagttcttgtttttagtagtttggagaggctagttgaaatacaattttcagttagcctcttttttttgaacgaaacttaatttttttctcaatactgatttatatcatattttctactgtgttatgatgatatatttgaagtgtaattagcaagtaagctaattcgattatgaagtataggagttctgtttcagaattcgttttataataataagttcttgtttttagtagtttggagaggctaattgaaatacaattttcagttagcctctttttttatgctctaaattcaagtgattgtgtacatttatcttgtaaaaaagattttatgaaatttcgtttctcgtttatactatttgcgactttgttttttgtgacttcctgttcaaaagaaaaagaatacagtaaagtagatacagctaaagatactcaaaaacaatctgcgtttgtaggttcaaatacgtgtaaatcttgtcatgagacagcataccaacattgggaaaaatcgcatcacaaagaggcgatggctgaaccaacggatcaaacagttttgggtgactttgataatgcaacgtttacacacaaaggaattactacaacatttttcaaaaaaggaggtgatttttatgtgaatacccaaagtggtgatggaaccaatcaggattataaaatagcttatactttcggagtaactccacttcaacaatacattatagcgtttccaaatggagcctatcaatgtttgcttacagcatgggatacggaagagaaaaaatggtttcacttacaacctgatttagatattcaccatgaagaatggattcactggacgggaggttcgatgaactggaacaacatgtgtgcagattgccattctacaaatattcataagaattatgatcctaaaacagcggcttataatacaacttttgatgagattaacgtaagctgtgaagcttgtcatgggccagcaagtgaacatgtttcttattatgaaagtggagccaaaaatggggtgcctccatcattttatatggatagtaaaaccgagggtaaagaactggtagaaaagtgtgcacgttgtcactcaaggagaactatgctaacgaataattttgactatgaaggggatttttatgaccattattctccacgaattattatgcctaggttataccatcaagatggacaaattttagatgaggtgtatgtttacggatcttttatacaaagtaaaatgtatcatgagggtgttagttgtaaagactgtcacgatgtacactcattgaaattaaaagcagaaggaaacaatttgtgtttacagtgtcatgaaacgacgaaatacaatgtagaaagtcataccatgcatgatctagctagtgatggaggtcagtgtatcaattgtcacatgacgggtaaggtatacatggggaacgactatcgtagagatcatagttttagagtaccaagaccagatcaaacagtaaaatacggtgtaccaaatgcttgtaatacatgtcatgaagacaaatctccggagtgggctgcgaatcaaatagtgtctcattttggtccaactcgacaagatcatttttcagatcttttattagcaggaaaccatggtgattttgaggcttacaaaaagttgcttgacaatcatgcttatcctgatgtggctagagcttcggctttgttgggctatagtaacaagcgtatgtctcaagatgatgtatatgaattacaacagtaccttagagattcctctgctttggtaaggaatgaagcgattatggcttttgaaaaaatcggggaaaataaagcacaacaacaaatagctccgctattaaaagatgagtacaggatggtacgtataactgcggcgaggtatttcaatatgacagaaggtgttaatatcattgaaacaagtgatttcaacaaagcaaatgatgagtacttgacaatgatgcaaaacaatgctgactttgcttctggtcaacatcaaatcgcattatatcatcaagcaaaaggtgaggtcagtttagcaatagaagcgtataaaagagcaatagaaatagataacttttataaccaatctaggatgaacttagcattgttgtattacaacaatagagatgcaatttcgagtgaaaaagtttataaagaagtgattgagacagaaccagaatttggttattcatattatatgcttgggttattgtatcacgagactgggcaaccagagaagtcattagaatatttagggaaatctataggtaagaagccattaaatattaacgcatactacaattacatcttaaaacttcaagagttgaaaaagaataaagaagcgattgaagtagtgaataaggcgtatcaagaatttggagaaacggagcgttttctatatttagaactgatttcattgatggagatgaaggacaaaaaaaatgctagagtagtttgtcaaaaactaattaccctagcacctcgaaaccaaagttatcgtcagatgttacaacaacttaatcagtagtatacttatctgttgtaacggtttctatttttccatcacggaggtattttactttgaattttttgttgtcaaatagctcgattttctcaatcaatagatcgatagcttctttggagtcaattttgattccagcaatttctaggataatatctcctccaattaacagctcttcatcttcgagagtcgcattgatatatcctcctcgaagtcctaacttgtctccaagaccattttccgttacacttacaacaagtaaaccgctttcttgaggaacgtttaaagcatcagctatcattgggtgtaataactggaattccattccagaccaaatgcttttttgagtcattaagattttgtaagcaacatttgaactagccccaaaaccaataccttcaaaacctccagattgtgtcatgataaaacttgaaataccaatcacttcaccttgcatgttgaacataggccctcctgaatttccaggattaattgcagcatcagtttgaataaattctacaggtaaaaaatcgtgttttaagtttccttgagaaatttttccactaacaacacctcttgatagggtgtgctctattcccaatggtgctccaataataaagatatcttgtccaatttcaaccaaatccgaatttccgatttttgcgacatgcttaccatgtttattaaaatctccagtgattttgatagaagcgacatctgcctgagggcttgagcttacaacgtgagctggataaacttcaccatctgtgaattttacttcaattttatcagcagagtgcactacatgagacgctgtccaaatcaaaccatcttcagaaataagaactccagatcccattccaccagcagtcattactttttgtttgtctcccattccagcactttgtttgctttcagtagttataacaactgttgatgggtttacttttttatacaattcaactaagttctgagcttttacagaaagagtagctccaactcccaaaaataagagtagtaattttttcataaatgatttgttttaggctgtaaaaataacaattagtttttaccttctggaaaaaccgtaagccattcattcttcatatcaacaatggtccactgttttgcatttgcaacatccaatcctttgtctagtttaccgattttagaatctctgtcataagcccattctcgaatactatctgtatggtggatgtaaatttgaagtgttttatgtttgctcattgtactccattgtagcatgtctagatcgccatctgagttaccaacagctactacaggttttttcccaataattttctcgatgttaagtggtttgccttctttatcatcgatgtattctatttcaggtaagcgaataattttaaattgatcctcattttcaataaactgtgtttttatacgactccctataatttgctcttttggaataccgtaaatatcagttagaaaagcacgcataaaatcgacaccacctccagaaacgatatacactttgaagtcatttgcttttaaataatcgatgagttctaacattggttgatagaccagcgcttgaaatgggacatcctttgttgggtgttttgctttttgactccatgctactacactttgttcaaactcttgtgttgtattaccagtatgacttgttaaaactaggcctaataaattattgagctccatttcagatagcgtttcaaaatcatcttctagtacagctttatacggttgtgtttctttccattctggatgttcaggagcgagttccttgatacgatttaaactgaaataaagttgaaaataaaaaggttgttcagcccataacgttccgtcattgtcaaaggttgcaattcgatcctttttaggaataaaagaagagtcatttggattcgttgtttgttcaacaaacttaataatattcagttttgaatcggtatccttccatgaaggaagtgtttcctgaaacgtaggctttttttcgagttttgaattacacgatataatcagtgttgaacaggtgattagtgtaacaaagaatagctttttcatgatttttaaggttaaaataaacttctttctagtagcttaatttcatgtgcataacacaaacactaagtggtgaacttagattaagttgattcatagtaaaatagaatggttatagatattttcacataaaagtaatgaatttggataaactaaatcgtttacttttgtacattataagaattactatgaatcgatctataaagcgttttttatttattacaattttatctaccagtgctattcaaatgaatagtcaggtattactttcacttgtttttggagataagctgaattcagaatctctgcgatttggtcttgagggagggtacaatttctctacaatagatggtatgcaaacgaatagtatgacatctaatttgaatttaggtttctattttgattttgttgtaaagtcaaaccgtcattggtctttttatactggtacattggtcaaatccaattttggtgtagataaactacgacagggtgacttagatcaattaggtatatcagttaggcctgaattgggagactacacgcaagttttaaaatcatttatggttcctgcattgatgaaatatgtctttgatgatggtgtgtatattgaatcaggattacagttgaattggatttatgatgcctttgtagaattcaattcgacaatagatgatattgaaattcgagagcgagagaacaacaaagatgatattaattggtttgattttggtcctgttgttggagcaggttatcaattcaaaaattcaaacggtttagcaattggagctaaatattatttaggattgatggaggtataccaagatattgatggttataaaaacagaagtatttttgtaaaagtcaatatccctattggtgtcaaaaaagcaaaaaagagaagggaagaaaaagccaaagctcagaatgaataattgacgaactaaaaatgactatgaaaatttataaactaaccttaattgctttatgctgttgttcattaaagttgagcgcgcagtatgcatctactaaagttcgttctaaatacgaattgtacactgatagtttaaagcaagttaaatacgataaaatttttccaatttttggtcagggtgcttataaaaaaggatttgatattccttatccagctggtctgatggccaattttatttggatgaagcagaatattgatttggaaaatatgcaacttggttttaaagggaatggtattggaggaaatccagttgatgtgcctttgacgtcagttgattttatcaaattttctgataatgaaaacacgacctatggatacaatttcagaccagatttatggatttttccttttttaaatgtttacggaatctttggttttgggaattctactacagaggtaaatctaattgaaccattgaaattacaatcagtggttgagcaagatattactacaacaggatttggtattatgggagctggaggtataggtcctttctggacttcagtagatgcaaactggacatggaataaaccagaattgttagatgaacctgtaagagtaaatgttcttggaattcgactgggtaaaacgtttacatttaatgatagaccagacagaaatatagcagtttgggtagggggtatgcgtacagagatgaatacttccacgtcaggtcagatcacattaaatcaagccattccaggctttgatcaaaagacagatgaaatctatgccaactatcacgaatggagagatgaaaactatgatgatttgaatcttcagcagaaattggtagtaaacaatgtattagatccaatggcagaagctatcaaagatagagatggtagtgctgttatcaggtatgcaatggataagcaagtggcacaactttggaatggattgataggtgcacaattccaattaaataagcgttggatgcttcgatcagaaggcggtgtgctaggaaatagaaagtcctttttaatgtctattaactacagattcttattctagtgattttttgaataatagttgatgatatatttagactctagtttgtctagattgtcgtggatactatctttagaagttacaatatagatctctgtggatttgtttttcttttggaggtaatccatggttcttttgattaaaagatttgtgtttttaggtagctgtgcagaatcatttgatttgtaaatgagttcaatgaagatgtttttattcttcttttccgttttgactaatttgtttaacaaatcttcttgtttatcgctaagagctacttgatttgtgattaaaggaatttcatcaacaacatctttttttcctactacaatacttgaaacaatattggttggagacgaaactattttgaaaataatattcgtgaaggttctggtaattaatgttgtcacatttacattaggattgtttaaatcaccttctataggtacactgatttcaacatttttgtcggaatttgttgatagataaaatgcgaccttcaaaggaacatcataaagcccttctcctgttgtttctacgtcattatttctaatgaggaatttattactactttttaattttcctttttcaacatctgaatctgaatagtaatataaataccccttgttaaaatgatgtccgatgtagtaattagaataagcattgaaatctgttaaatctacattttccattgaaaatttaagattagatgtcttcaggtcgttaggattaaaagaagtctgaccgtcaaattttcctcttttattcaatcgactgtcaaaatcaatagtaatccatttcgataatgaactgatgtgttttgattttagatgcatgcgatctatttgatatttaaaatccttattggttaaatggtcttcataatcaattttaccattattgatacgaactgatcttattgtatagtaaataggcttttcgatcgctacatcttgttcggttttttgaattgaatccgattgtttctcaacgactaaatttgaaaaactattatatgtagaatcaatgtatacattgatgtagggtttgtttaagatgatgctgtcaagaataaactgattttctttgaggcgaattttattaatctttgtgtgtagtgaatttacactagctagtgtcacattattttttgacaattcaagatcttgaatatctagatttccttcgatatccaactcttgattttgattgtagtttcctacaagtttaagcctactgttaaggctaccgtttaccgatgaaatatttaaaaagcttttgataattggatcgaaatctgaaagattcaattgcttaatttttccattgaattgatattcacccgtttcaatattaatattgaatttattatcgatagtcccagttttgttaagtccaatttgagtatcggttttgatccaatcattagtgctgcttaaactatctgagctaacattaatgt

SEQ ID NO: 2645 - DNA, 23393 bp, synthetic construct
  misc_feature 1..23393: note = Synthetic
  source 1..23393: mol_type = other DNA
caacttaggatttgaattgggctcaagaggaacaaaaaataatggactagttaaagaaaattacatgaattttagtattggattgtctttcaatgacagatggttcatcagaagaaaatatgattaatcaaaaataattttatgaaagctatagggatacttttgtttgggttattgttttttcaattgacatggagtcaaaatgattcttgcaaagaaaatcaaaaacaatgcaaccaatattttaatgataaagagtatcaaaaagcctatgatgcttggctggaattaaaaaaaacatgtgcgaaatcggatgaaagtgttgtgcttttaggggctaaaattctacaatataatgtagaagcttctgacgcttctgaaaaagagaaaaaagttcgagatttgctagccttattcgatttgtatgatcaatattttccacaaaaccaaaatggaaataatgaaaaaagggccatggctcttcatgaaaataaactcggaacacctgatgaaatttttaactatttgaacctagcgtttaaaaatcaaaaaaacacctttacaaacccaagagctatttacctatattttgaactttattacaaccaattcaaagcaaaaggagtatcgtttgctgatttgatgtcaaaatatagtgatattataagtcttatcgaagaaaatagccaaaagcaagtcaatcaaaaatcggaatatgatcgtgttagaatgggaatcgaagcttggatgcaaaatgtcattacttgcgatgatttgaatacttatgtaaaccaaaattttacagccaatcagaagaatcaacagtggttgggcgcggttgcgaatgttttgtatacgaaatgtgttcatgtacccatgtttggaacggtagctcaagcttattatacccttaaagctacctcaaaatcggccttttatatggctacctacaagttaaaatcagccaatcaagaagaagcaattaagttttttacagaatcgattgaattgtcagacaataaattagaaaaagccaatagaagttataccattgcttcaatattggccttgtctgataaagcaaaagcagctgaaatgatccaaaacgcaattgttaatgaccccgctagtggaatttattatgtatttcttgccaatctttatgatgccgctgcacaggaatgtgcttccaatgacaatgaaaaaaaggcaatttataaactagcttcagatacagtgttaaaagcaggtgaggtagagccaagattcaaacaaacagcaaaaaccagctcggatgaatatttgaaaaaagttacttttgaaggaaaaacaaaacccaaaagtataaaagtgggatgctggattaatcagaaagttcagttttaatttagtatgagaatgtgccataaaaagacactctttttttcttttacactcttttttgtggttttatggagttcttgcgaaggtaatttcaaagaagttcagaaatccacattctcagaatttaaccccagtggagaagccgattcaattaatataaagtacaccgattcgggtaagataaaatctattttggttagcccaaaaatgttagattatgcaacggttaaatttccttttactgaatttcctaaaggtgttaacgtaacgctttatgatgatcacgcacgaaaaacatttgttacagcaaattatggagtgtctttcaaagattcgaatataattgatttaagaggaaaggttaaaataactaacgagactggacaggtttttgaaacagaccagttgtattttgataagaaaaatgaatggttttacaccgagaagcgctataaatttaccgatcctaaaggtgtttcctatggggaaggtgtagattttagtaaagattttaaaatcatcaactctcaaagtgtatccggagaagtacaagctaataattaaaatatgaaatatttaaacataacgaaatacctttatttaatcattggaatcatcatgattattgatgccataaccaaatggaatgataaagaaaaaccatggttaagtgtaatacttgctgggttggccatttttacttttttctttagagatcgatttgctaaaaaatttgctgaacgcgataagaagaatcaatccaactaatgtgatatggaaattgtagtaatcatagtatgtttacttctctgcgctttcttttctggaatggaaattgcctttgtgtcttccaataaaatctttctcgagatagaaaaaaaacaggacaatttcgtttctagaatcttagccaaaattaccgaaaaaccatcaaaatttatcgccacaatgttggtgggaaacaatgtttcgatggtaatttatggattttatatgggtaagtttattctccaaatcatggagtcttatgcttttcatttatccaatttttcaagtttgctttttcagacggtgttgtcaacgttagttgttttaattacagccgagtttttacctaaagttttttttcaagtctatgccaatcgtttgatgaagttttttgcactgccaagttatcttttttatattattttcaattacatctcttcatttattatttggatttccgattttattttaaaaaagttcttaaatacagaaggcgattatgtgcctgctttttttagtaagggagaactaggtagctttataagtgaacaaatgagcgcagtagaaaatcatgaagaggttgattctgaaatccaaatatttcaaaacgcactcgaattttctggggttaaagcgcgagagattatgacaccaagaacagaattggtcgccatagatagctatagttctattgatgaattgaaagaactttttgtaagtatgggatattcaaaaatcattgtgtatcaaaattcattggacgatattgtgggatatgtacattcattcgaattgtttaaaaagcctaaaaacataaaggccgtgacgattcctgtagaatttgtacctgagactatttatattaaagatgtgcttaatattctaaccaaaaaaaggaaaagtgtcgcagtggtcttggatgagtatggaggaacctcaggaataataaccgttgaagatattattgaagaacttttcggtgaaatagaagatgaacatgacgatgatatcagtttgatagaacaaagaataaccgaaaatacctttcttttttcagctcgtttagaagtggaataccttaatgaaaactacaaattggatcttccagaagatgattcatatagtactctcgggggctttatagttcatgcttccaaagaaattcctcaaaaaggggaacaagttcgaatcgataattttttatttgaaattgaggccgcatcaaacaataagattgatgtggttaaaatgataatttcggattaaagaaaaaaaatgtaactttttcaataaataattagagttactattgtaattatttcacagataattgtattttcgcaaactaaaataaaaattaacataatagaaatggcagttttacaaaaaattagaaagcgttcaggattacttttactagcgattggatttgctttgttggcttttgttgttcaagatttgattacaaaaggattcaaaagtcaatcaaaagatgtaggaagtattaatggaaaagatatttcttttgatcaatttagaatcaaagtagccaatgttgagaaaaacgctcaaaacgggcagcctatgacgcaaacgcaagcagcaaatcaagtatgggatcaagaagttgcaatcgctttgttgaatgagcaattagaaaaagcaggcattcgttgtagcgaaaatagcattatagaagtgtttaaaaaagatccaaatattggacagaaccctacatttttaaatcaagtaggaaaatttgatttgaacaaatttaaagaatttttcaaaaacaatcctgagcaagccaaagcttttgaggatagacaaaaagatgctgaaattaatgctaaatttcaaatctatagcgctatgatcaaaggagggatgtatgctacaaaagcagatggagagttcaaatacaaattagaatcagataaagtaaattttgattacgtttctgtgttatattctactgttaaggatagtgatgtaaaagtaacagacgctgatgttacggattacatgaagaaaaatgaaaaaagatttaaagcagaggaaactcgtgaaattgaatatgttctcattgaagacaaaccttctgctaaagatgaagaagaagtaaaagctaaagtgaacggattattgtcaggaagcgtggtttacaacagtcaaacgggtaaaaatgatacgttgccaagttttaaatcagcaaccaatgtagctgaatttgtaaatgaaaattctgacaaaccttatgattctacttatgtaaccaaacaagatttgccagctgaacacgccgataagttatttgcgttatctgctggagaaatctatgggccttatatcaatggaaaatactattgtttgtctaaagctatgggaagaaaagcgggtgctaaagctaaagcaagtcatatcttaatcagttgggaaggaacaaaagtgccaaacaaaaaagagaaaagaactaaagaacaagctaaggctaaagctgagtctttgttagctcaagtacaagctaacccaagttcttttatgatgttggctttaacaaattcagatgattcttcagctcaacaaggtggagatctaggatattttcaaccaggacaaatggtaaaaccttttaatgattttgtattcaacaacccagtgggtaaaattggtttagtagaaaccgaatttggatatcacatcatcaatgtaacagataagcaagatgcgattcgtttagcaacaattgctcaaaaaatagaagcttctgatgctacatcaaatgaaatctatacgaaagcgacgcaatttgaaatggatgcgcaaaataaagattttgcagcggttgctaaagcagcaaaacttactattaatcctccagtaaaagcaaaagcaatggatgaagcgtttggggtagctggaaatcaaagacaaatcgttaaatgggcttacagtgaagatacaaatgtgggtgatgtaaagcgttttgaagtagtaaatgtgggtaacattattgcgcgtttgaaaaaaatcaatgaaaaaggattaatgcctgttgaagatgctaaaccaatggttgaaagcattattaaaaataagaaaaaagctgaaaaaataatggctaaaatgaaaggggctacattagaagaaatcgcaaaaactaatgcgactacggttcaaaatgcaccagcggcttcagtagaaaattcagtgttagctaatgttggagctgagcctaaagtagtaggagccgcttttggaacaccaatgaataaagtatctgccccaattgaaggaaactcaggagtgtatgtagtgaaaacaaaaacagttacaaaagcaccaaaacttcctaaatatgatgattacatcaataaagtaaaagcagccaatgctcaagcttctggtagaattttccctgccttgaaaaacgatgctaaaattgatgacaaccgattggaattctattaatggatttctataatctatacaaaaacccgatgttcgcatcgggtttttttataagatcatttcgtggtaaggaatgaccacatcaaatcctttgtctttaaaatacggagtaggattttctttggaaagtgccaaaacaaaatctccaccccaagcccccaaacttttaatgaccccattaaaatcgtcaaataaggcttcttgaaccgtttgaagtctcaaaacggtactcatttcaatttcatgattttgtaaggctacagcaaattctttaaggtcctctgtgcttataaccttttgtgtaattgaattaataaccgtaatggttttagctatggaactttgatgctcgagataggaagcaatagccgtacgactgttttgctttctatttagataaacaaaatatattttttcagtaaaattgggatgaaagcgaacagtggtcacttttggtttttcgttaaccaattgatataaaatggctgtattgttttgagcacatgccaaatcgtagccacttcctccaaagctcctttttaataattcatacgaatcaatttcgagccattgtgcaatattgttgattaaagttgacgaggtccctaatccccaaaagcgtggaaatgtcagttcagtagtaatgtggtatccttcagattgggtcagaaaattagaattcatctgataggcttcatgcaaaatctcaattaaagtgtttttaatttgatgaacttctggatgtgttttttttgctataatagacgaaaatggaatggattcttcaaaccaaagactttggtcataatcataacttttccaatgaattattttgttttgagaaggttcaacgatcaaattttgaccaaattttgtgggcaacgctaaagcttgtgcaccatcaagcacaacatattctccagtgatgagtaattttccattgctgtaaaatgtctttttcatgaggcaaacagctttggtttattttcttaaattttccaacaattctatcacggaagcgtgagtaaccgtatgattttcaaaaaaggcagcaactgcttggcgctcggcgtgtgtggcttgatgctggtttaaaatattgtttaagtgcattttcatgtggccttcttgaattcctgttgtcgttaacgaacgtaaagcggcaaaattttgtgccaatccagttgcggcaacgatttccattagttcgtgtgccgatggtttgcccaagatttctaaagccatttttaccataggatgtaatgaagttagccctccaacagttcctaaggcaagggggatttctagagaaaaatgaaacacatcatgttctatataggcatgcgagaggcttgtatattttccattacgagcggcataggcatgggctcccgcttcaacagctctaaaatcatttccagaggccaatacaacagcatcaataccgttcatgatgcctttattgtgggtgactgctcggtaaggttcaaccgctgcaatctgaacggcttgaacaaatttttcggcaaaaagaacaggattttctatttttttctcggctaaatcagaaacgggacatgaaacagaagcacgaacaaggcaattgggaacataatttgataaaatacacatgataatttgaatctctttttcatcctcagaaaaggagtcatagtaccaagccgcttcttttaaagtttttcctaattgttccaagcacgagttgataaaatttgcacccatgctgtctttagtttcaaaagtaacatgcagttgatagtatcctttcaactcgtgagttttatcgaccaactgaatgtctaaaattccaccacctcttttttgcatgtttttggtaatagattctgtcgcgctatacaattgtgattttatggattgaaaaaacgaatgtagggtattagaatttcctgtgtatttaaaatggacttgtccaattttttcagagctcaagaccttggttttgaatccgccacgcgtactccaatatttagctgatttggccgcagctgcgacaaccgaactttcttcaataaccattggaacggaataataacggtcgttgatgagaaaattgggagcaattcccattggcaaatagaagttggtaatcgtgttttctatgaactcatcgtgaagttgttgcaatttttggttgctgttccaatactgcttgattgtatctagggctgtatcgggattggcaaaatacgtttgagcaatccattgtactttttcttcttttgttaatttagaaaaaccggctatgttcgaattcatgatttctgtttcttgaaggtgcaaagatacgttttttgttgatttcgatgaggttgttccatcaagaaccctcccttttgtttttaagtttttattaagaaggaagtcctatcctttttatatttttactcaaatgaaaaggagatacagatgaaaaccttatggattagtttttttagtttttttgtggggtctgttttggcacaaaccgacgattgcgccacacaaatacatgattatcgaacgttgtttcaagcccaaaaaattgagatcgcgtatcaggtttggcaacaagttaaaaatcaatgcaaacccttatccgaatcgtgttatcaagatggacttcaactcattcaagcgtatagtaatcgcatggaaaacgaagcagagaaagagcatttattgaaagatgccctacgattgctggaagaataccataaaaattatcctcaaatgatagacgatattcaagtagccaaagccatgctaatctatacgaattccgaaaaatcagatttgcaattggaagaggtctatacgttattgaacagcagttttctagatcattataaaaattttaccgatgtcaacgcccttcaggtgtattttgtacttagtgtggcagagtataaaaacaagcaattgacagggggggagctagtcgatcggtttcacaaaattcaagagctttatgaagattcgaaaaagaaatcacccgaacttcaaaagaactttgaaaacctccttaaattagttgaaggagaagctataaaagctataacttgtactgattttacgcattattatgaagcccagttcgacgcacataaaaaccaagtggtatggttgcaaattgccaaccataatctcgtcacaaaatgcaatacgaccgatatcttttttaaaatagctgcgcaatgccatcaattggagcctaccacacaatcgaattatgctatgggtttggctcttctcaaacaacgaaaggtttccgatgcgcttccttttttcgaccaagccattgccatagaacaaaatacctctgagcaggctaaaatttgctacaacaccgctgtgcaattgagtaaactcgacaaaactacatcgtgtcaatatgtgaaaaaggctttagtaattgaccccaaaatgtataaagcctatctactctgggcgcaattgtatgccgatagtgaagattgtgttcaaacaccacttgaaaccaaagctttattttatcttgccattcaaaccgccaataaagccagtgatcttgacccaaaatggaaacctcaagccgataagtttgctgcaaaatatgttgggaaaacctttactgaaaaagaactcaaaaaattaaaaagaaatacacaaaccatctctttaggctgctggattaatgaaacggttgaatttaactaaggtgagagaggcgggttttaagggttttaagggtttatgaggttaagagtttatgaggttaagagtttatgaggtttatgagttataaagtctaaacatccaacattccaacattccaataatccagcaatccaatagcggtaataaagttttacgttattcattcttcaagaggaaaaaaatgaatgttcaagaagaaaaaatgaattcttcctgacaataaaatcaaaagatgtatatctttaataaaaaagatgtacatcttttatttaaaacatgtacatcttttagtcaatagatgcacatcttttataaaattcatcaggaggaaaatttttttgtgtctttaggaataaaaaaagtcatactgataaaagcaaataaatgtagtgcttgtcaaaaaatcttacgagtttgtaaaacgtataagattaattaatgcgtagaaaatttttagggaagggataaaaaaaaagtcccaccgaagcaggactaaaggttttcacctacggcatatagccttattgtgataagattaaagattagaattgttttaatctgatacaaatgtaaagaaaaataattataaataaatgaggtttcccgtaaatgagctatttatttttttcttatttttaaaacttcataaaaggattacaaaatggcaaagattttaggattagatttaggtactaatagtattggatgggctttaatagaagacaaacaaaataaaatacttggtattggaagtagaatatttccaatgggtgttgagaatcttggtgatggtgatggagaagtatctaaaaatgcaagtcgaacaggagcaagaggtgtaagaaggcaattttttagaagaagattaagaaaaaaagttttgctaaaagcactttctgaaaataaaatgtgtccgatagataccaaggattttgatgattggaaaaagactaaacaatttccttcagaaaaattagcaacatggtttgccttaaatccttatgaattacgtcaaaaagcattgcatgaaaaactttctttggaagaaataggaagaattttttatcatctaatacaacgcagaggatttttgagcaacagcagaaaaggcggcagtgatgatggtgctatcttcaaaggaaatgctaaagagggaaaaataggaattgatgatacattagaaagtattgaaggtaaaacattgggttcttacctgtatgaaatatacccaaaagataaccaaccttttcaatatggattggaaagaatcagaaaccggtatactactcgtaaaatgtacgttgatgaatttgaaatgatatggaacaaacaatgtcaatatcattttgttttaaacgatagtttaaaagaattgtttggtggtagaaaacaagatggttacaaagaagatggaatcttatttcatcaacgtcctttgcgttcacaaaaacatttagtgggtaattgttcttttgaaccaagcaaaacaaaatgtcctattagtgctattccagttgagttattccgaatttatcaatgggtgaatactgttgaatataatggaaataaaatcactcaagatgaaaaaagcaaattaattgaacaattgctctcgcatgataaaattgaatttaaaaaattaagaaaagctattggaaaagaaagtgcagagtttaagtttaattataaagacgatgataaaattgtagggactcatacaatctccaacttgtctaataaaaagttttttggcaaacaatggtttgactttacagaaaaagagcaagaagatatctggcatgtgctctatttttttgatagtaaatctaatgtgaaagaatatgctttatcaaaatggaattttactgaagaacaagctgaagctatttctaaatttaatgtaaaagacggttatgcaagtttaagtagaaaagctatcggtaacatattgccttttttaaagcaaggctatacttatgatgtggcagtggtaatggctggtattaaaaatgtttttggtgacaaatggcaaaatgatactgcagaaaacaatcaaaagcaattagatgtaattgataatgtatatgacattgttaggtctaaaatatcgggtggttttatagatgttattaaagaattgttgcgaaaagaatttggcttgaatgaaaaacaattaaaaaaattgtatcatcattcggctactatagatgtaaaagaattacttgataaattacctattggtagagaagcagataaagaaattcaagctattagaaaccctattgttattacagccttgtttgagttgcgaaaattagtaaatgaattaattgaagaacacggacaattagacgaaattaaggtagaaatggcgcgtgatttaaaaatatctaaatcacagcgtaataaaataagaagagatcaaaaacgtttagagcgtgaaaatgatagagtaaaagcagaggttgaaaaatatattaaagttactaacgataacattttaaagttcaaactttgggaagagtgtaaacaaacttgtccttacactggagttgctattcctgtaaataaactctttacaggtgaaatacaaatagaacatattcatccatggagtcgttcgcttaatgatagctttaataataaaacattatgttgggctgacgaaaaccgtcgtaaaggagataaaacaccatttgagttttatggtagtgatgagcaaaattggagtgccatcaaagaacgtgcactcaagttattttcggataccaaagaatatccaaatgcctatcaaaaatttaaacgctttgtacaacaaaagtttgatgatgatttttcatcgagacaattgaatgatactcgatacattagtaaagaagcaaaagaatatttatcgcaaatatgtagcaaagtaactgtttcaccaggacaaatgacggctaatttgcgccaaaagtggggattgaacacggtattaaatgatgaaaatgcaaaaacacgtgaagaccatcgccaccatgctattgatgctttagttatggcttgtggcaaaaccagttatttgcaagagttgtcaaaatggaatcgatacagtagaaactatgatttaaaagattttcctatgccttgggaaacgtttcgatttgatgccgaaaaagcagtagataaaatattgatatcacacaaaaaagtttcaaacgatattacggttcgttataaaacagttgaaaaaaatggtaaaaaatatactaataaaggagttgcggctagaggacaattgcacaaagaatttgtttatggcaaaagaaaagctccttttagtgatgaggcttttcacattagaaaacctattgaaagtttattgacggaaaagcatattgaaaaagttgttgatattacaataagaaatttaatctttaaaagagttaatgaaatgggaggttttgataaagataaaattccagccaatactttttttatagtagacgagaatggagttaagcaaccacaaattttcttgccgaataaaaatggaaaacaagttccaattttgagagtaagaattcaagagacaataaataaagccaaacaattaaagaataattcaaatcagtttgtaaatccaaggaataatgaccatgttttaatttatgaaacaatagaaggaaaactagaaaaggatgtagtaagtttttgggaagtcgttgagaggaaaaagcaaggtatagataaaattaagctacctattgatggtaagaagataattcaaacattcaaagaaaatgacatgttcattttatttaaaaatgaggatgaaattaattgggatgcaaataatgatttatctgataatttatataaagttcaaaaaatagccggagctgattatttcatggagatttgcttcagaaagcacaatgattcaagagatgataaaaatgcaaaagcagattatgtttatataaaaggttttggtgagggaaaaacaggttggtttacatttaatccaataaaagtaaaaatatctgtttcagggaaaatacaaaaagtgtagttttgtcatttcgaccacagggagaaatcacataatctaaaactatatgagattgcttctcctattcgattaagctcttgagtcctccttcgtcgtaatgacaagagtacttaaaaagttctttgacatgagattttcatagtcttaaacagccaaaccacaactggaagttatggcatctgccttgcaaaagatgcagtaatcttttcgttgtggtttgattaaagattagaaaacacgatattatatgtatgaaaatttgtgaacttgtaatgttgtggtttgattaaagattagaaaacacgatatttctcggctcgttatcgttgtcgtatatgtagttgtggtttgattaaagattagaaaacacgatatttcttatccagaattgaaagctatagccacagttgtggtttgattaaagattagaaaacacgatatttcttgttgttctgaaattttagtcattaatgttgtggtttgattaaagattagaaaacacgatattctaccgctgaagcgatatccatgtttaaatgttgtggtttgattaaagattagaaaacacgatattacgtctatttgactagttgaatctaaatatgttgtggtttgattaaagattagaaaacacgatatttacacagacagaaaagacagcgaacgaaatgttgtggtttgattaaagattagaaaacacgatatttatgaattaataatcttgtataggtatatagttgtggtttgattaaagattagaaaacacgatattaaactcaaatattctaaaataaatatctatgttgtggtttgattaaagattagaaaacacgatattttttacaatgggtaaaagcgagagggattgttgtggtttgattaaagattagaaaacacgatattaaaataaaagaaaaaaatgtcaaacaaatagttgtggtttgattaaagattagaaaacacgatattgtgcaacttcaacagttacattaactgaaagttgtggtttgattaaagattagaaaacacgatattgaagctttaaagtacaactagacgtgtttagttgtggtttgattaaagattagaaaacacgatattaaaagatatgtatttttgagaaagttcccgttgtggtttgattaaagattagaaaacacgatattttcacgtattttattaaaaataagcgtatagttgtggtttgattaaagattagaaaacacgatattagttgcggcgttagcttctaatagtcaggtaaataaagtgttatatcgtgataaaaaatgcttcttttttgcagtgataaggcaagattgaagcatttttttatttgtatgaaataaaattgcattaaatgttctatgtttgtaatagaatagtattctattcaaaaatttcaaagccatttaaaattatatcagccatgaagcaaagaaaatccaatcgattaaaaggatatgattattccaagaataatttatatttcgtcacaaattgtgtaaaaaataatctgtgttgtttgggtcgtgtgattcccgtagggacaggtcgcgacctgtccgtacatcatcccgaaattcatcatcccgagaaagaatatataatggaattaaatcaatatggtttaattgttgaagaaagaatccattggttgatgagtcaatatgggtatgtagatattcataattatatagtgatgccaaatcattttcatattattttagagatagattcaagtttgttgaaaaataaaatttcagaaaataattctgaaaggacagctcgagagcagtccgaacaaaaaataaaatcattatcaagtttaataggagcattaaaaacgacttcgtcaaaattaattcatcaagaaaatttcacagattttgcttggcatcgttcttttcatgaccatattattagagacgaaaaatcatatacaaatatttcaaattatatagatttgaatcctgaaaaatggtttaaagatagattttacaataacgattaaaatagttctagttgggtaggttgtggttcttttggaacttctgcttatgatgcaaataatctttaaaataatttcataatgaaaaaaatttattacaaaataatgataagttctatatatgccgctaaaaacaatggtattatgagtgatatatggaagtatgcgtctagtttttattttgcatttgcaacttcaatatatttactttttatgtattcagtagtaaataattatttgttaaatcatcagttagatttttttaaattaaaaattattctcaatggtaaatacaattttatattaaatatggtaatatattttgtagtaccaattatgagtgtaaactatttattgatttttaaagaaaatagatataaggagcttataaaagaatataataatagttataataaaaaactatttgcttggtattttatgatttctattgtttttatgtatgctacgttatttttaaaaaagtaaaatttggagttggtacaggtaatgtccagatagctcggaatgcaattccgagcaacaatgagcttaaaacgcacaaacgacaacgataaaaagaaaccgtttttttatacttttgttttaaaggttgttactgacttggactgcaaatcagagctttcgggtttcaattacccaaaaattccaaaaccaaaccatccaaagtagaatttcttcgaaaaacaaccattaattgtaattttttcactaaaattgaagtcgttttaaaaataagataaaaatgaagtcaattaaacttgttgtgttgtttctattatgtggtttttcgcttgtagctcaacaaaaattatcggttgaagaaatctatgccggagcttttcgtgccaaaggaatggacgaattgcaaaccatgaaaaacaccaatcaatacacggttcttaattcggatagagctactagaacccaacaaatagatttatatgattacgccacattaaaaaaagtagcaacccttgttgataccaaaaatgccactttattgtcggacggtattgatagctacacgtttagtaatgacgagaaaaagcttttgatagccaacaatagtaatgctatttatcgccattcattcactgccgattattatctgtatgacctaataaccaaacaaaccagtaaattgtttgagcaagtgcaagagcctactttttctcccgatgggactaaaattgcttatgcaaaagcaaacaacttatttgtgtatgatattgcttctaaagcgacgactcaaatcactaccgatggaaagaaaaatgccatcatcaacggaattacagattgggtttatgaagaagaatttgcctttgtaagagcgttcgattggagtgccgatagcaaaaaaatagcgtttattcgatttgatgaaagcgaagtgcccgagttttcgatgaatatctacaagaaagatttgtatccaaaggtggagacgttcaagtatcctaaggcgggtgaaaaaaatgcaacggtttcattgtttgtttatgatgtggctagtgcagcctctaaagcaataaacttaggaaattattccgatttttatattgctagaatgaaatggactaatgaggctaatgtgctttgtgctcaagtattgaatcgccatcaagataatctagatttaatttttgtagatggaactacgggtgtggctaaagtggtgatgaatgagaaagatgctgcttatgtagaggtaaccgataatttgacgtttttgaaagacaacagttttatatggacttcagagaaagacggtttcaatcatatttattggtatgacaaaaccggtaagctaaaaaaccaagtgactaaaggcaattgggaagtaacggcttactacggatttgacgaaaaaacaaaaacgattttctatcaatcaacagaaaatggttcgacagtgagagatgtgtataaaatcagtttggatggaaagaaaaaagtaaaattgtcgcaacgagtgggaaccaattcggcaacatttagtccagattttacgtatttcatcagcacatattctagcgcaagtgtaccaacaacctattctttgaacaattctaaagacggaaaacaagtgcaattgattgaagataatgctgctttggctgaaaaggtgaaaaagtataatctacccaccaaagagttttttgaattgactactgaaaaaggcaacaaattgaatgcttggatgatcaaaccgaaagattttgacgcttccaaaaaataccccgtttttatgtatcaatattcgggtccaggttcgcaacaagtagctaatgattggttggatatcaacgattattggttcatgatgttgtcgcaacaagggtatataacagtatgtgtagatggaagaggcaccggatttaaaggagcagcattcaaaaaatgcacgcaaaaagaattaggaaaatatgaagtagaagatcaaattgatgccgcaaaagtaattggaaattatgcgtatgtggataaatctagaattggtatctttggctggtcgtttggtggatttatggcaagtaattgtatcatgaaaggtgctgaggtgtttaaaatggcgattgcggtagctccggtgaccaattggaggttttatgacagcatttacacagagcgctacatgcaaaccccacaggaaaatgcaagtgggtatgatgacaattcgccaatcaatcatgtgagcaaattaaaagggaactttttgttaattcacggaacggcagatgataacgtacatgttcagaattccatgcaaatgattgaagctttggttcaagcgaataaacaatttgattgggcgatttatcccgacaaaaaccatggcatttatggaggtaaaacgagaatacagttgtttaataaaatgaccaattttatcaaagataaactataatcaaactaaataaactaaaacaataattatgagtgaacaagtaaaaacaggacatccaaaggggcttttcttccttttctttacagagatgtgggagcgattcagttattatggaatgagggccatctttattctatttatgaccaaaattttattgatgaaagatgcagatgcatctcaaatctatggaagttatactggattagtatatcttacaccacttttaggagggtacttgtgtgataaatttttaggaaaccgaagaagtatcgttatcggaggtttgttaatggctttggggcaattctttatgtttttgagtgcttcagcaggagccaatggcggagtttcattaatgtggttgggattaacagcaattattattggtaatggattcttcaaacccaatatttcaacgatggtaggacaactgtatcctgcaaacgatagaagaattgatagtgcctttactattttctatatgggaatcaacttgggcgctttcttttcacctttagtgtgtggttctatggatttcaaatggggcttcttggcagcttgtatagggatgttattaggattagtagcatttatttttggtcaaaagaaattccttatttctgaagaagggaaacacattggtttacctgttaagaaattggatgccacaagtattgcgatgattgttggttctattggaattatcttctttatgttgaatttcaagcaaatgttcaatagtgatacagatattattggatattttatttatggtgctatggtggccatgcctgtattaattttgactgacaaaagtttgtctaaaattgaattacaaagaatcacagtgatttttattttagcgttcttcgtgattttcttctggggagcgtttgaacaagctggagcttctttgacattgtttgcagatagacaaacaaacagaactttatttggatgggaaatgccagcttcatattttcaatctgtaaatccattagcagttatttctttggcaccaatcatgactattgtatggggctttttatatgctagaaaattggaaccttcttctcccaaaaaaatggcgataggtcttggtatggtggctatggggtatgtagttattgctattgcggtgaaaggattgggaattggtgaaaaagtatcgatgtggtggttgattgggttgtatgtaattcatactattggagaattatgtttgtcaccaatcgggttatcaatggtttctaaattagcgccgttacgattatcttctttaatgatgggaacttggttcttggctaatgctgcggcgaataaatttgcaggaacattaagtgccttgattcctggaggagaggatggaacgggaggagcgactcatttcttaggattccaaattactaatttatatgagttcttcgtattgtttatcatcatgtcgggttctgcttcagccattttgtttttcttaagctcatggttggaaaaaagaatgcacaacgatcatgtagaaggggtagatttagaagtagaaaaccgataaatcttttcaaaatattttatatctttcaaacctgtaactcaattgttgcaggttttttaattcaaaacttatggcagaaaaattaaccttagagcaaattcaaaactttaaaggaaaatatccaaagcaaatttggagtcttttcttttcggaaatgtgggaacgtttttgcttttatggcatgcgcggcatgttggtgttttttatgatatctcaattaaattttcaaaaaacagaggctaacttgcaatatggtgctacccaagcatttgtatatgcttttacgtttatcggtggtcttttcgcggataaaattttaggttttagaaagtcgttgttttggggcggaatattgatgattgtagggagtatgattttggctaccgacccacaccaatatttctttttgggaatatcatttaccatcattggaacaggtttttttaaacctaatatatccacaatggtagggaaattatataaagcaggagactctagaaccgatgctggattttctttattttatgccggaatcaatcttggtgcgttgctaggaggatatttgtgtattgcaataggaaaaggcgaaatgttagccacaacgattcccgctgataaacgatggaatgtcgcttttggtttggctgctgttgttatggttattagtttgattaattttgtttttacacaacgttctcttgggagtattggagtacagccagggcatccagattcagaagctcctcatcaaaaagtgtctaaatttctcgaatatggggtatatgttgggacattacttttaattcccgtaataaaaataatggtttcaaagactcaattcaccgattatttcatgtggaccattggccctcttacactatgttaccttttttatgagatgacaaaagtaacatcagccgaacgaaaaaaactttgggcggctttagtgttcattcttttttcaatagttttttggggaatctatgaacaaagtggcggttcgctgagtatttttgcagctgaaaatttagataaaaacttactaggcatgaaacttgatcctaatggggttaataattctgcgggagctttctttattatatttttagcccctatattagggctgttgtggatttggttgagtgaaagaaagatagaacccaacacgattattaagtttggtttaggatttattttgttggggtttggatattatgttttattcgctaccaagttttttgcaacattagcagggataacctcactaaatgtgtttacattggcattacttgtgattacctttggagagctttgtttgtcgccaattgggttgtctatcatgacaaaactttctactaaaaatttgcagggaatgatgatgggtatgtggtttttggcaagtgcttatggtcagtatgttgcaggattaattggcgcttttttgtcggaggcaaaagcaggagcaagcaagtatgaagttttgaatacgtacaccgaaggttataaagaattgggttggtttgctttaattgctggaatcttattaatcaccatttcgccatttgtaaaaaaacttatgcaagaagtaaaataaaattcataaatttcgacactattttaaagcaaaacatttatagagatgaaaaaaatatttattgtgatgttgtttgtagcagtaagtgcttcttcctatgcacaagaggggcttacatggtataatgatatgaccaaggccgtagcaatttctcaaaaagaacaaaaaccaatgtttcttttctttactggaagtgattggtgtggttggtgtatgagattgcaaaatgaagtgttcaaaacccctgaatttatttcttgggcaaaagaacatgtcgtgttggtcgaattggattatccaagaagaacggaacaaccagaacagataaaaatgcaaaatgctcaaatgcaacagatgtttcaagtacaaggatatccaacagtatggtttgtaaaaccaacggttaaagaagacggaaaaatcaatttggagcaattaggaagtacaggatatgtagcaggcggtccatcaaaatggcttgaaggagccaatcaaatcattgctaaatacattcctctagaagagccgccaatagttaaagaaactcccatcaaaaaaacaagtgccaagaaaagtgccaagaaaaaataaacctaaattttaaaatatcccatttctgaaatatcgtgaaatgggatattttctttactacaagttgctttccattgggtaacatagcttttaaaatttgtagtcccaaaaacaaccattttaggtttccaaaaacggaagagtcgctcgatatttacttttggagcatcgattagaatcaaaatgtcgggatgaatattttttaaatagacacccgatttatcgatgatcataatcttataagtttgaaaagagtagaaattttttaaggtcgaggttttgcttattctacagccattttctgtaatataattttgaagagccgcttcttctttccaattttttggagtgacatcattactgtgaagtactacatttgtgccatgtctctcagagataatattttttttctttccactaaaaacgatgaactcgttcgttttttgagaagttaccttcgaatcaatccatataatttgaaacacaattaagctgattaaaaaagctattgccttctgatagttgggtttctttagccaaataatcaaactgaaaatcagaagataggttcccaacatcatcccaatactgcaaaaaatattcttgaacacaaatgaatctaatgaggctacccatgaaatgattttgtttaggatatagatgctttcttctaatgtgttgtacaaaaaagaataatgtgaatcacataatgcgatgagcatgacaatcacgccaagtcctaatatgaaagacatgcctgggagcacgataagattcgttacaaaaaacaaactcggaaattgatgaaaatagtaaatgcttatagggaatgttccaatctgtgcggcaaaagatacggaaacaatatcccaaaaatacttactaatcttgtttttgggtgtccaaagggatgaaatgagagggtgcagccaaacaataaagaagagcgcaatatagctgagttgaaatccgacatcaaacaagaaagcaggttgaaataaaaggatgataaaaatagatatagctagggtgttatatatgttgatgcttctttttaagaaatttccaagggcaacaaatgaaaacatggctactgaacgcaatactgatggagccaatcctgccaaaacaccgaaaccccataggcatagaatggtaatgatgcattttaccaaagcagcatttttggtattgggaaatagttttaaaagaaaggtgatgaagagtaaaataaatcctacatggagaccagaaacggataaaatatgtacggcaccagcatattggtagtctttgataaggtctggagaaatgtcttgttgt

SEQ ID NO: 2646 - DNA, 23393 bp, synthetic construct
  source 1..23393: mol_type = other DNA
  misc_feature 1..23393: note = Synthetic
gtaatgtcttcggcaatttcgatattatcgattccaaataaataacagagtaccgaaactatttttcggtactctgttctgaataaatgtggtaaaagctgactttcttccatagaattgttttttgccacgaatttcacgaattttcactaattctatttgctatttttttgctacagattaaagagattttctggattattgcttgtgtaaaattattgctgcaatttcgtgctattgcaaataaacaatggtattacagtaatttaccatatttttaattcgtgtaaattagtgaaatttgtggcgaaaaaaagcagtaaataattctatgtattagaattaaagcaatatttagaaattagtatgttccggtaacggccatacgtatttcaacatttccgccctgatctaatatcgggcatccgtttgcaattgcaacagcttcgtcgtaatctgtggcttttatcatgattaatccaccaattgcttctttgatttcagcataaggtccgttgattacgcttttgtttgtagttacaatttttccttctccatcccaacgttgcaaaggttttgccagtttgtcctgagcagcgattccgcccagccaatcttgccataattttaatgaatcctgtaattcctgaggtgaaggctgtgtttcttttgtgatataatctctgcgaaatattaatacaaattcgttcataatgctatttttttaatgttataattttcgtttttaattaaccaaataacccaactttgtaagttccgggttcgtttggaaaagcaagattaatacggttccaggtattaatgtttgtgattgctaaagttaaatcaattaattcttgttctgaaaattcttttgctgtttcgttgtaaactgcgtctgtaacgtcacacgctgttaaagcttctgcccatgcaaatgcagctctttcgcggttgctgtagtaggaagtttctctccaggcacttaatccgtataaacgttgttccgtttcgcctttgtgtcttgcatctttataatgcatgtctaaacaataggcacatttgttgatttgtgaaactctaaaaagaaccaattcgataagagattgctctagtggagatttttttaaatatcctccaactgggtaaagtgtttttattgcttcttgtccttttacgtgaatgttaattcgattttccattttgtttaaatttaatgtttataaatgttgttataatggaataacaatcgaagtttcagaattggacaaaatgttttactttttttgaaattattttagcttttattttaaaaaacttgtaaagccttgtaaatgttggagttttttgaaattatttttttataaagttaatgtccaataaaataaatggacaatagaaatgattctttattccggttttggatcgtttatacctgtttttttgacaatccacggaagtgtaagtccttgtcccacgattgttattagtacaaccataaccgaaataaagagtatagcgtttcgttgcggaaaaggcgttccgtccggaagtagttttggcaaacctaaagcgatggctagagaaacaataccacgcattcctgaccaacttataataagactgtttttagtgtctaataaagcgtgttcactaacttttcgttttttggtatttgtgctgagaaaatttttctgcagatttgatttttgaaaaaagattctgaccattctcgttagtaatgcaactatcgtgataataaatgcatagccaatataaggcaagatcatatggtcatcaatatctttgaggatgtatctgaaattgagtccgattaggataaagattaatccgtttaggataaaaataatgacgtcccaaaggttttttgaattgttttttaagctttcgggaaagatttttttactgaaacgtgaaatagataatcctaaaaacacaactgcaattactcctgaaacatgcaaatgttctgctattaaataggttacaaatggcattaataacataaaactaacagttacgtttatgtttttacggacttttgtaaggataaaagctaagatttttgccattagaaagcctactaaaaatccgcctcctaataagagtacaaattgtagtgttgctttccagattataaaggctgaacccattgcagttgcaacggcaaaacgataagcaactaatgctgaggcatcattaatgaggctttctccttcgagtatggtaatcgttttttcgggtattccgaggccctttgtgacgcttactgcagcaactgcgtctgtagcagaaagtatggcaccaagtgtaaaggataaggaccaggtcataccgggaatcatataatgtgacactacagcaatccagaatgtggtcaggaagacaagtggtattgctaacgtgcttattgtactaagattggttttgaagtgtttgtgcgaaatattgaacgaggcatcatataataatggaggcaggaaaatcaggaagatgatttcgggattaatttctatttcggtcattgtgggaataaaaccaattgcgattccaacaattacaaggagaattggataaggtaatttggctttatctgcaaaagcagaaagtccgatcacgatggcgagtataaaaataatgatgctgtagttttccattaaaataaaatttgaagtagctaatatagctatttagggttttagttgaaagcattgagagacattaaactgtcaaattaggatgattttctgatggaaacaattgccctagccctgataggaacggcatccttttgtggtggggttcaccacaaaagatatagtgaagagcaggaaaaagctcctgataatgacacgtaacgtactgatatgccacagatgtcaggttttaaaaatgtcatgttgtcagattgtttttagagtctcgacatgaaaactgacaatttactttggttttttatattggcacaaagattgacttatgccacctgagttataaaatgtatatcaaaaattaaatatataaaaaatgggtaaaataatcggaattgatttagggacgacgaactcttgtgtttctgtaatggaaggtaacgaagcagttgttattcctaatgcagaaggaaaaagaacaacaccatctatcatcgcttttgttgaaggtggagaaattaaagtgggtgatcctgcaaaaagacaagcggtaacgaatcctactaaaacgattgcttctattaaacgttttatgggacacacttttgctgagactacaaacgaagcaaaaagagtatcttacaaagtagtaaaaggtgacaacaatacgccacgtgtggatattgatggtcgtttatatactgctcaggaattgtcagcaatgactcttcaaaaaatgaaaaaaactgctgaagactatttaggtcaaactgtaactgaagcggttattactgttcctgcttactttaacgatgcacaacgtcaagctactaaagaagctggagaaattgctggtcttaaagttatgcgtatcatcaatgagccaactgctgcggcacttgcttacggattagataaaaaaggaactgatcaaaaaattgctgtttacgatttaggtggaggtacttttgatatctctgttcttgaattaggagacggtgtatttgaagtattgtctacaaacggtgatactcacttaggtggagatgattttgaccacgaaattattgactggttagctaatgaatttttagctgaagaaggtattgatttacgtcttgatccaatgtcattgcaacgtttgaaagaagctgcagagaaagcaaaaattgaattatcatcttctgctgaaactgaaatcaacttaccttacgtaactgctacagcttcaggaccaaaacacttagtaaaaaaattatcaagagctcaatttgaaaaattaactgactctttagtaaaacgttctatggagccagttgctaaagcattaaaagatgcaggtttatctgtttctgatattgacgaagttattcttgttggaggttctactcgtatgccaagaattgctgacgaagtggagaaattctttggtaaaaaagcatctaaaggagttaatcctgatgaggttgttgctattggagcagctattcaaggtggagttttatctggagatgtaaaagatgtattgttacttgacgttacacctttatctttaggtatcgaaactatgggtggtgttatgactatcttaattgaggctaacacaactattccaactaaaaaatctcaagtattctctactgcttctgattctcaaccatctgttgagcttcacgtattacaaggagctagagcaatggctgttgataacaaaactatcggtcgtttccacttagatggtattccaccagcaccaagaggagttcctcaaattgaagttgcttttgatattgatgctaatggtatcatcaaagtaactgctactgataaaggaactggtaaatctcacgatattcgtatcgaagcttcttctggattaacatctgaagaaatcgaaaaaatgaaacaagatgctgaagctaatgctgaatctgacaaaatcgcaagagaaagagctgagaaattaaacgaagcagacggtatgatcttccaaactgaatctcaattgaaagagttaggaagcaaattagctgacgatcataaagttgctgttgagtacgctttaactgagttgagaatggcttaccaatctcaagacattccagctattcaaactgctcttgacaacatcaatgcagcttggaaaacagctacagaagctatgtatgctcaaggtgaacaaggtcaacaagcagctccacaacaagagcaatcgcaaggtgacaatgttgaagacgttgaattcgaagaagtcaaataattactgattaatatcagttaacaataagtactaaaccgctgtaaacgaaatgtttacagcggtttttcttttttagtcttttttgtttctgctgttttttaatcattttttgccatatatttgtaccatatttgtaccggcacttaaaaggcgataatgtggcacttatgtatacttatggcacttaaattggggataaaggcgatgaaaagaataaataaacaatgtcttgtctgtggggaagtgtttctgcccaagaccgtaacttctgtctactgctcacaaaaatgcagtaaaaaagcatacaagcagaagatgaagcagcttaaaaatgaagcagaaatcaaagcgatgatagagaaaataccgcaggacagggcatttctttccgtctctgaggctggcatgctttttggcattgccaaaagaaccctctataggcttgtcggccagggaaaagttccgtcagttaatcttggaacccgccttgtaaggatagaccgcaccgtcatggaagggatgttcggccctgagcgcagcctgccgcaggctgagagtataccgaagaaaaaattatacagccttgaaaaagaagactgctattccatcggtgaaatagctcagagatttcagatatcagaaggttctgtctacagccatatcaggaaatattcaatcccaaccagacagatcggaaagcatgtatatgcccccaaaacggaaattgataatttgtataacggaaatgattttatatgaaacaattagcaaaaaccaaggtgactgtgcgtctccgaaaggcagaagaccgaaaggaatggtatgtttacatagaaagctatcctgtagaggtttcaggaaagaaagcgccccagagaatccgtgaatatttaaacagatccgtaacaacagtggagtgggacaagaaaagaactgcccgcacagatgcagagggtataaaatcctataaacccagacgcagcgataacggaataataatctgcagcagcgaaagcgaccgcgagataatgctctatgcggatgcagtgcgtaaaatccggcagaaagaatacgataatacagatctgtacagtgatgctgagaacctattggctcaacagaaagaaaaagggaaagaggattttattaaatacattgctgctacagcggctaaaagacacgcccgaagttcaaaatccattcagatcaattggcagcggaccagagaatttttaaaaagctattccaaaggcagccttatattttcccagattgacagcagaatggcggaagattttaaactgtttctgctggctgcgccgctcggaggaggcaaaaagggaaccatttcccgcaacactgcgggaacgtatttttccatatttaaagccgctttgaaacaggcttttattgatggatatttaaccgttgatttatcttcaaaaataagaggcatacctgagcaggaatcaagacgcgaatatcttaccattgaagaattgaacgggttggcccaaacgccctgcgaaaaagacgtccttaaaagagccgcgcttttctcagcgcttacaggtctgaggcattccgacattcagaagctccgctggaaagagataagtctggaagacggcagggccaaactgcatttcacgcagaaaaagacaaagggtgtcgaatacatgcctatttctgagcaggctttagatctctgcggagaaccgagacttcccggacagcttgtctttgaggatctgccggacccgtcgtggatttcacgccctctgaaaaaatgggttgaatctgcaggcgttaaaaaaaatattaccttccactgcttccgccatacatttgcaacactgcagctatcaagcgggacagacatttatacggtcagcaaaatgctggggcataccaacgtaaaaactactgaaatctacgctaaagtaatagatgagaagaaaaacagagcttcgcaggcaatacaattggaatctttaaagaaataagcgcaatgaaaattaaatactttgaatatatcacagtttacctgtctgtttttttagtctgcgtctttgtcggtgtaatcggaagattggtgctgctggaaaaaggtgcggatgaatatacggccggcgtttttttctggatcagcactggatttggaattttaatgtttgcaattctaagtttatttcttaatgatttggctgagagattactgaatcggtttttgagtgcaaaaaaaaatgaatcgcctgaaagccggattccaaatgaagaccttgaaaaaatagaagaggagttgcaggatgctttaattaagcccgaaatgcctgaaaatagaaatgcagccatcgatattcagcagttaagggagcagcagcaaaatacaatcaaaaatcaaaaacaagccagaattgatattgccatccgttatgcacagcaggagtttgcgctgtatgcgtcggatgatgatttgaagcaattgggcaggaatataatcatatatgctgaaggcataaattttgaaaagattaaaccgataaaagttaaagatctgtccaatctggatctgtatcattttggctggaatatctggaattgttttaaagtcagcagacaggacggagccgcacaatttttaaagctgacttttgctgacgctttaaaagatgttgaagagaaaagcattaaaacgcatctcaaagatgatgaacagaaaggtcttataaaaattatggaagattttaccgatttttaaatgccaataactataaagcactgtgtttttcaagtgtttttgctgtgaagaaggacccagcagaaacacttttttcatttgcaccataactgttaaaaacgatagctatggacacaaacgaaatctcttttgagaacctgcccaaagcagtagcacacttagtgaaagaaattgccgagattaaacttatgattcagaatgtacaggtatatgaatcgaaagaaaaaagtattcctattggtattgaagaagcaagccggctcataggaaaagcaaagtctacaatttacactcttgtaaggcagagaaaaataccgtgctataagtacggtaaaaagctgtacttttttgaagaagaacttttagaatggatttctaaaggcaaaaagaaaacaatacatgaaatcgaatcagaagcgatgaaatctaatcataaccggaagaaatagccagcaggaatacttatatcactctattggataatcaaaaggcatttaatggaaagcgatattttatctaaataaaaatacagtgttttttgctgtaacacgatttcaaatgtttcaaagagtgcaggattctaactttatcgctgaagtcttgtctatactggattttataaaatgtctttgaacaaagtgcaccgattctgcacccaaattcaaatttttactatttcaatattaaataattacaaaaaacttcaaaactaactaataaaaagacaatagtattattcttttttgtattacaaataatttaaaatattgaatatttctaaataagaaattaaaagctctattgcacagtcgcaaaaaaggtatcaactccagttctcccaactgagtttttcttttagatattagcacaaccttgacttctctaaatttgtgttaaagtttttggtggaggcttgtaatacagtaaatttgaactcgagaattctatccaaaaattaacttctcaatttttgccacccaaatgaagtgtcttaaaattttttacattattctgttttggatttcagtttgtggaaatgcttttggtaaggcagcagaacctgtatgtgaaaactttactgcagaaaatactttcgtaaaggaaaagtttttagggactgaactttgttttttcgaagtggtcaaaaaaataaactatcgtaacgatcatacactagataaaattgaggtattgcatctattagcccccaaagctatcaatagaaaggcaattcctgaagataatttagacaattacctgttatcggatttatattccagtgactggattactttaaaatctctatatgataccagaagatgtgagggtattttaaaaaaatatacttcgagaaacaattacctgcatctttaccagctcttctagcacaatcgtattactttacagattctatttgtgatgtgctcacttagcgcggagttttagttaaggacaaaatcttaactgtagaccatgaaagaaaatctcaaaaattacaaccgcattttccaaagagaaagcagttcaattaagttatgaaagagataatatctctcaactttctaaggaacttgagataacaactgttttgcgttataagtggcgccaaaattatcaagaatttagaacgggaagttttcctggaaaaggcaataagcattttttccaagggaggtcgattatttatcttttcataaaagaccatgaaaaaatatattcgattgaaagaggtgcaaagttttagaaataattaacagccgttactataaatggaaaaacaagttatttcaggaatagataaaggagtaattttaataaaagcaacaataacctccgtctattttactgctaaacagtgatatgggagccctaggattactttagagctgcaaaatattgggtatcaaatatccagaataacggtagccaaatacatgaagcaattaggtttatacagtaaattgagtaagaaatttaaagtaacaaccaattcaaaacataatcatttcgttgttccaaatattttaaaaagagaatttacagtgaaagaaccttctaaggcttgggtttcagctttacccatatcaaaaatagtagaggtagtacaacatagagacataataaaaaagtcctaccgaagcaggactaaagattttcatctacggcatatagccttattgtgataagattaaagattagaaattttaatcagttacaaatgtatagaaaaaataaattggtttgaataaggaaaacagtaattactttatttttttttaatggtaaaatccatgcagattaattttaatgactatggcaagaattttaggattagatttagggacaaactcaataggttgggcattaattgacgataagttaaataagattttagcgataggaagtagaatatttccaatgggagttgaaaatcttggcgatggtgataatgaaatttctaaaaatgcaagtagaactggtgcaagaggagttagacgtcaattttttaggagaagattaagaaagaaaattttacttcaaaaactttctgaaaataatatgtgtccaatggatgctcaagattttgaagattggaaaaagacaaaattatttccaacagctaagctagtaaaatggtttgcattaaacccatacgaacttcgacacaaagccttaaacgaaaaattatcattagaggaaattggcagaattttttatcatttgattcagagacgtggatttttgagtaatagcagaaaggggggtattgatgacggagccatttttaaaggaaatcaaaaagaaggaaaaataggaattgatgatacattagcgagtatagaagataaaacattgggtgcatatctatttgaaatatatccaaaagaaaaccgcccttttcaaaatggtttggaaagaattagaaatagatatacaacacggaaaatgtatgtagatgaatttgaactaatatggagtaaacaagcacaattccatacaaatttaaatgaagaattgaaaattttatttggtggaaggaaattagatggttacaaagaagacggaattttatttcatcagcgacctttgcgctctcaaaaacatttggttggtaaatgttcttttgagccaactaaaactaaatgcccaattaatgcaattccttttgaaatgttcagcatttatcaatgggtaaatacagttgaatataatggaaagaaagtatctaaagaagaacaagaaaaattaattgaacaactattatcatttgaaaaaatagaatttaaaaaattgcgaaaagcaattggcaaagaaagtgctgaatttaaatttaattataaagatgatgataaaattgttggaacatacactatttctaatttatcaaataaaaaattctttggtaaaaaatggtttgagttttcagataaacagcaagaagatatctggcatgttttgtatttttttgacagtaaatcgaatcttagagaatatgcggttaaaaattggagttttacagaagagcaagctgatacaatatcaaagttcaatgtaaaagatggttatgcgagtttaagcagaaaagctattggtaatattttgccatttatgcgacaaggatatacctatgatgttgcagttgtaatgggaggcgttaaaaatgcttttggagataaatggcaaaacgatactgttgaaaataatcaaaggcaattagatttaattgagaatattgaaggaactatcagatcaaaaaactctggaagctttatagatacagtaaaagatttgcttcgtaaagaatttgagtttgatgacaaacaactaaaaaaactctatcaacattctgtagcagatgatgtaacatcattgttcgagaaattaccaattggaaaaaaagcggacaaggaaattcaagctattagaaatcctattgttattactgcgttgtttgaattgcgtaggctcgttaatgaattaattgatgaccacggacaacttgacgaaataaaagtcgaaatggctcgcgatttaaaaatatctaaatcacaacgaaataaaattcgcagggatcaaaaacggttagaaagagaaaacgatagagttaaagcggaagttgaaaaatatacaagagtttctcatgataacattctaaaatttaagctttgggaggagtgcaaacaaacatgtgcgtatactggaattccaattcctattactaaattatttacaggtgaaattcaaatagtacatattcacccttggagtcgctcattaaatgatagctttaataataagacattatgttatgctgatgaaaacatacttaaaggagacagaacaccctttgagttttatggaaatgatgagtctaattggccaagtattaaagaaagggcattaaaattattttctgacacaaaggagtatccaaatgcatatcaaaaatttaaaagatttgtgcagcaaaaatttgatgatgatttttcatcttaccagttaaatgatactcaccatataagcaaggaagctaaagattatttgtcactagtttgtaaaaaagtaaatgtatcacccggacaactgacttctaatctacgtcaaaagtggggattgaaccatatattaaatacagataacgatgctaaatctcgtgaagatcaccgtcatcatgctattgatgcattagttatggcatgtgtaaagacaagttatttgcaagaattgtcgagatggaatcgatatgacaggaaatcagaattaaagaacttcccactgccttgggttggctttaattttgatgcagaaaaagctgttgacaaaatattgatttcacacaaaaaactcaataatattgtaactattaaggcacacagagttaaaaaaaatggagttgtttttaaaaatattggagtagcagcaagaggacaattgcataaagaaactgtttttggaaagcgaaactttaatggagaggaagcatttcatgttagaaaggcaattgatagtttaacaactgaaaagcaattagaaaaagtagttgaccaaacgattaaaaaattaatacataaaagaattcaagaattaggtggatttgtaaaaggctctattccttcaaatacattttttaacgttgatgaaaatggaattaaacatccacaaatatttttgcctaataaaaatggaagcccagttcctattttaaaaataagaatgaaagaaaatattggtggagccgagcagttaaaagatgatctaaatcaatgggtaaatcccagaaataatcatcatgtattaatttacaaagatgaaaaagggattttaaaagaagaggtagttacattttggacagttacagaaagaaaaagaaaagggcttccaatctatcaattaccagcagatggcagtgaaataattaccactttgcatattaatgatatgtttttactccgtttaaatgaagaggcaattgattgggaatatccggattatgaaaatttgaaagagaatctatttagggtgcaaaagttatcgtctaaattttatgaatttagattaagttcggagtcatctatacagaataattttcaacctttttatgttagaattcaaagttttggtgatggaaaaacgggatgggaaacttttaaaccaattaaagtaaaagtttcagtttctggaaagattcaaaaagtataatttaaaaacagttttttaatgctattttctgtcttaaacatccaaaccacaactataatcgatattcgattttggttctaaccatttacgttttctgatttgattaaagattagaaaacacgatatttcttagctaaaccacttgttatagaatctagttgtggtttgattaaagattagaaaacacgatattaaaccaaaagaaatagataaagaaaggtcagttgtggtttgattaaagattagaaaacacgatattgaaccaaaagaaatagataaagaaagatcagttgtggtttgattaaagattataaaaacacgatattaattgatttgttatttagggttttggttgtgaatgtcgttcagaaaaatgcctcttttatggattgataacccataattgcggcattttttctattgtaaggtttagtaaataagctttgggacgttgatatattattgataattgtaaatgcagcagcagtaaaataattccagttgtgtggatagaggtgctgatggtaatgctgatttccctcaaaaaaaataaaatattgccaaattgtttattggttattcgaagtacacttacttttcctaaaggtggcagaagtttgtggattctcttttcatgaacatcggctctttcacaacttgcgtaatttggatctgctaactttgtttaaaatccaaattaaaccattttaaataaaagcagtcttattaaaataatcttaaaatacataaaaaatgaagaccccaattttatttgttatctcttttttctattattatcctgtttaaaaaatgacgcagatgagtcaaatcaagattctgcatatatagatgatgatttggcagggcctatttccatgccaaaaacagaatatggttcggacggtaattatcaggtagcaaaaattagttttccaagcccattatacagtgggaaaaatgttgaaatattttatccaaaagatattacttcaccaaaacctgttattttttattcgcacccttacggaggtgaagaaagtgcatataatataggcctgtatgagtttattgtaaagaaagggtatgtggtagtatttgctccatatccaaccacgggtgcaacggtcgattaacaatacgagacactatgggaaagttttaaaaaagctgttacaggttatcctgctataattgacacaaaaaaagtaggtttaatgggccattcttttggtgcaggcacctcctttgctttggctcagagaggatttattgaccaaggctggggggagaacggacattttatttttgcaatggcacaatggtattcttaccaaattacgcaggaggaattagaaagtttcccggaaaacacaaaattaattactcaggtctatgacgatgacgtaacaaatgatcataggctggcaattaatatttttaaaaatataaatattccaaactctgaaaaagattttattttaataaaaaaatcagttttaccgacttttacttacacagctgagcataatagtggaggattttaaatggtttaggttttaaaaattttgaatctgcaaagagaactttaagcggtattgaggttgttaatacgcttagaaagaatcagatggttaatcctgagaaaactatgtttaaatccttttgtaaattggcgagctaattattaaattacttaaaatcttatatttgattctgacagatgcgacagaacctattaaataatacaaaatgcatgtgaggtaaatataagataaaagtttacagattgttaatgggcgtaaaaaaaagacactttaagttttgtggcaaaatcgtggcataagtaattttggaaaattagaattgcggtaaatgcgtggcctacagaatttgggttctaaactgtggctggaaatatatctctcagcacgaaaagtagcaatttcaaatcgaaagtgtatacttggaataaacttgaagtaatataaaaatctcacaaagcactaaaaataaacccgccaaacactaaatgcttgacgggctgtccattaaacataatcttccagtatatgtttaactacaaaattcataaatttctaaaatcaattgaatcgcagaatcatttttgaatctgctttttgtaaaaaataaagtttcaagattttaagccatattaagaaaatgatcttattgatttaaataacagctttttctaatcagtttttaaaataattcataatctacgatttaacgtaaaatttaaattattattgaaactaaaaaaatactttacagttacaaaatatataactatgatatcatgtagcaaatttcaaagatgattatattaattataatttgtttcttttcggttatagatgaatatttcaacttaattacattttttagcaattttctatgcaaaaaatacgtttcttaaatatttaattcatgaagatttgtttgatttttacattattaaatatgtaagtgttattttattataatgaaatatataagttatatattataaattatttaattgtaattgtcatattaggaactacaatacttccattgcttcctgtataacgctgcgcataaacttctatataatcgttagttaacatttcagttgtagcatttaaaggaagaaccacaatatcatttgtagatgcgcccttaccataaattttatattgacttaaaagtgtaccattttttgctatataaacaatgtaagtacctgctgctggaacctgaaaagagatggaacccgatatttgaaaaattcttttcttttttcctatgtatcttaatctatttggggaatcagttgaaaatctgaataaattggaataagttgttgacggtgtacctgaccctacttttacaatatcgctcggatttgaattgttaaaagcaactcccagaccacttcctactgcataatccattgcaaaatctgcactggcatttgcatctgtctcagttggaattccagcagatcgaacgttccagctattattaaaattgtatcctgtataactacccgttgtatatggcttaacataatttgcaggagttggtcctgtaaaaacaactgactctaaaacagcatcacttgtgatagtaagccctgtcgtagaaacatcaagaccaaaagctccggtattgacatttgagaaaccgccttgcttttctatcaaattgaacgttcctgtaaatttttcataagtacctgaattattgctaaaccatgcctggttactcaatagcaattgaccgatattattataggtaattccattggtgtttcctgaaaaattaacaatacttagaaaagctaaaccataaccagatatagtccctatattattggaattggcgataatacaatctctaagcaaaaaagtttgagccgccgtaccgcttagattgaaaactgtagctcctggtgtcgtaatggtaagattccttatgcttccgcctgttgttccatcaaaaagatttcctgatgttttcacaataatatcttcattagcatccaaaccgtcaagataagcactgtttaaatctattggaaaattaaatacaatctgaccattaatttcatacaaagtattcgatgtcaaaacatatttagcaccaccacctgccgcaagttcagtggctaatacagttgctaaattgtcgccagctctaatacgcttaaaatttaatcgcggtagtgcaccacttataggtaaccatgatgatgaagacgatatataagaataaaacaatttaaaatctgtatcatagaccatcaacccgtccgctggagcagctatagcatttctttgtccagtagtcatacgtggtgttaacaagccctgggtagtagaagttatatctaaaatagagcttgcagccggagttacggtacctataccgatttgtgcatttcctaaaaatgataataagaaaaaaaagagcagcaatattttatgctgtctctgagtgtatttatttaccataatttttattattaattagtttttgaagattaagatattttatcagcaacatagggcattaagaattcaggaatagtacttattttttgcccgaatttgatataataattttttgggttattttttcattgtcagaagttagaaaagtggcaatgtaaattccagaacttaagcccgaagttgaaaaattataattttgttcaactcccaaatcacttttgtttaatacagcctttccaagaatatcaaacaaaacaaatgattcaaaagctatgttatttggatttgaagcttttaagacttcattaatattgtcttgaactattaagaattgactttttatttcttcattaataccgagggtctgatttgtaaaagttattttaaatcggtcagaataaacgccaggtgcaataacaacctgataagttccatttttaatatcatgataagatgaatctaattcgtcatataagtaaatattttgtgaagaatcaaaattaacaatctcaggaatataaaatttcagagtagtaccagcagtggctttaacggttaaaggtattttctttgagagttcaaaattaactccttggattacatagttggaattttccaaccaaaatgaaatatcactaggaaggctttgatccatgtttaaagcatcaatcccaacatcaatcccatctgtcgcttcgggtataaatgccaaagcaagttgcctggtaaattgattatttataattgtgtttattttaaagtgagacacaggagtatttttctcctctggagtatataaagctttatcttttgttaattttgcaaattgagataaaccagtaccttctttataaaatgcacggtgcgaatttttaaaagtaaccgaaccgttagctgcaccattaattagaaaaccttgtccaataggactgtattttcgctctattattaagccagaagatgtgccggtagtgtttaaactgccattactattatagctattaaatgtggctgcaacatatagtcctgtggatcctaatgctaccggtgaataagtaccataacctcctctataagcagatagataatgggaatttaccgttttatcttgctcccaaaagtaagcaaccccagtgcaggctgcatttgagggatctaataggaaagcatttaaatgaagtgccgaagggtaaggattccctgtaagtgttgctgcatttccagctcctacggctactgttatatttccatcattgggcttacctctgaaatcatatctttgagctccagttccaggattattgagtatgccggttccttctggatcacttgtatcggtaccacttgtgcctttcattgtaaacccttctccagctgctattgttgtagcgcctccaacctgaacccattgcgagtagttattggcattggttaacttataaatccaatatgacgctattgcaagtgggcttgctgatccatcataatttgtaagtggaagtatcgttgcaggcaccacagcagttgaagtagttggcctatttagcagtgaaattccaaaaggtgtattacctgttgatgcaatagggtttccaacaggggaacaccaataattatattcaaagttgtctgaagtaccttcctgataaacagatacaatacctgtcccgctattgttggatactcccgtagtaccctggaccaactgagagttatttcttaaatatagatttgaatttgttgctaaatctatattctgatttacatacaatacttcatttttaacatataaaggagaatttgcaccaatatatatttgtgaaaatgtttgaatagaaataaaaacaaaaaataatggtaatatttttttcatgattttttctttatttttaatactaaaggataaggacttctcttgataggaaacacttatagcttacttttttttcttttacctataatataaaacccaaaaataattccaagtgcaaataatacatagacaaatgaatctattggtgccgctactggatcatcaggcaatcccggaggtggtggattctgagcaaaagcgatgttttgaataagtaaaattgctgaaaaaaaaatagtataaaaaagtgactttttcatttttgaggtgcaggtttaaattaaatttatctgtctcccttctgatttgtttttaaactttcattttcaatcttagtattgttaatttgctgtaagctagagagtagaaaaagcattaaaaaaagtttgtaattattgtattacaatatcaaatctgggtcattacaaagtagactctaatatttggctttcctcttacataatttttagttaaatgttacataattcccacatctaaaaacaaaaaaacttaatatattgaatctaaaaaaaataagatttaatttaatcttgatagaataaaaaaagtatcaaatcaaaatattaaaatccgaattaaaccattttaaataaaagcagtcttattaaaataatcttaaaatacataaaaaatgaagaccccaattttatttgttatctctttttttctattattatcctgctcaaaaaatgacgcagatgagtcaaatcaagattctgcatatatagatgatgatttggcagggcctatttccaggccaaaaacaggatatggttcggacggcaattatcaggtagcaaaaattagttttccaagccccttatacagtggaaaaaatgttgaaatattttatccaaaggatattacttcaccgaaacctgttattttttattcgcacccttacggaggtgaagaaagtgcatataatataggcctgtatgagtttattgcaaagaaagggtacgtggtagtatttgcgccatatccaaccgcgggtgtaacggttgatgaacgatacgagacactatgggaaagtttcaaaaaagctgttacagattatcctggtataattgacacaaaaaaagtaggttttatggggcattcctttggtgcaggcgcctcctttgctttggctcacagaggatttattgacgaaggatgggggcagaacggacgttttattttcgcaatggcacaatggtattcttaccaaattacacaggctgaattacaggaattcccggaaaatacaaaattaataacccaggtctataatgatgacgtaacaaatgatcataggctggcaattgatatttttaaaaatataaatattccaaactctgaaaaagattttattttaataaaaaaatcagttttaccgacttttacttacacggctgagcataatcttcccaatacgcaaagttcgtatgatgcatatgactattatggtatttacagattacttgatgccatgatcgattatagttttaatggaaatttgactgccaaaaatacagcccttggcaatggatctaaagagcaggtaacaatgccgagctataatgggcaggcattgtctccactcgaagtaaccgataatccttctccattatatccacagagtaaatattctttccagtgtggtgcattaaataatccccggattacaaattgtaattaaagatcaccatatcgtattttctgtttccggatctggttaaaataataagaaccctaaataataaagtaagtattattatatagggttcctatcgctgttgtttattttgtagtattaatttttaccagctttatcccgatattgttttaacaattttcggttaaaatcattttcagattttttaagctttaatattttttttgccggaagtattttttgaagactgctgatataattttttttcaataaatataattccctattggtattttctatttgtgacaatagtattgctgcttctttttctgaaattgaattgatattatcatcattgagttttcgtaaatatgttttcattttttcatgacgcagcttatattgtttatcgtcatacgtattataaataggccaaaatttctccgcttctgccgaagtaagttcaagatctgctgttaaaaaggaaactttataagctttaattttctcgagtttttcgtttgttttttcattttgtgcataaaatgagaaactggtcaaaaatagaagtatcggcagtatgtttttgattttcatttttttagtttttgttgtgaaattaaatttctaatatttgggttatctgctgttttcctgctcttgattgaattttcgaggttttccatcattacattatttaagtgcagctgcagcttacatccttttacatattataagatatgttttacagtaaaaggtttaaacagtaaaaggtttaatttgagcaagcaaataatttatttttttattaagggatcagcggaagctgacagccataaatttatgttaaagtttatggtttagccttgtaatgcagtaaatttgatcccgagaattctatccaaaaactaacttctcattttgacgcccaaatgaaatgtcttaaaattatttacattattctgttttggatttccgtttgtggaaatgcttttgctaatgcggcagaacctgtatctgtaaattttactgcagagagtacatttgtaaaaaaaatgtttttagggactgaactttgttttttagaaggagtccaaaaaatagattattctaactatcatgcactggataaaattgaagtatttcatccactagttgccaaagggatcaatagaaaggcaattcccgcagatagcctggacaattacctgttatcggatttatattccagtgaatggattactttaaaatccttttatgatacccaaaaatgtgagggtattgtaaaaaaatacgcatcaagaaacaattacctgcatctttaccagctattctagcacaactgtaccattttacagattcctgattatcactttctttaacctcttgagttattaagcttttgctttttttactttatgttttatatgctgatgctttacatattctgtaaaatttccaattcctcttacatcgcctatcctgatttacagattgcagtttatgtgtctggaccttgtattgcgttttcgtaaaattttatgagattgaaaacggcacagattcttctgcgcacatttccatgtatgcttttttcttatatggattcaatgggatcaaggtgcaatagaataaagacaataactgttttctcttgcaggataaggtatgtgatagctatagggcgttaagatccgttcccttgtgcttaaaggaaaatctttttatcccataatctttaatatatcatcatgatgcattatctaaaacaaagcgcatttattgcgttatgcctttttgcagccataaccagtcatgcacagcagcacattaccttaaaagagctccttagtaacgtctataaaaaagctccaggcttaattgctgactcagcttcgattgctattgtacaggcaagatccaatgagacccgcgccagctggctgcctactttaaagcttaattaccaggctgatataggcacaaacaataatacaccggggccttattttggttttggtattgtcccgtccaactcacgcggtgtgcgtactgaaagcaacacaagtgctgtacttacaaatttaggaattgctgcattagactgggaaatctataatttcggggcttatcgggcgcagaataacttagccagatcggacatcgaagttgaaaaaaataaattccagcaggccaaatataaactcgaggcctataccataggcaattacctgcaactgctgcgtttagaggattttcgctctatacagtcccacgctataaaacgcaacgaggagatagtgcgatccattaaatcccttgtcaaaagcggtgtgcggccggctgtagaaagcagtattgccgaagcggagctttccaaagcacgcttaacctatattgaactcgataatgagttaaaacaaaccc

SEQ ID NO: 2647 - DNA, 23393 bp, synthetic construct
  source 1..23393: mol_type = other DNA
  misc_feature 1..23393: note = Synthetic
tgtttattatctctttctattactcctggaagtaattctgcttgtgcaaaatctcttgctgcatctctaatcattatatgctcttcggtaaggctaaagtccattatataaattggttttgaattgttttttgtatttttcaaagatagtgtttttgagggtaaaataataatagataagttctaatatgatttgtatttttactgaatgagttttgataaaagatttgcaataggtatgatgagtggaacatcgttagatggtgtagatttagtatatgtatcctttgaaaaaagagaaaattattcttttgaaataattcaaactaaaacgtattcttatactgatgaatggaaatataaacttaaagccgcattcaatcaatcagaaataaaaatcagacaattaaatgttgagtatggtaactatttagggaggctaataaattcatttatttctgattatcagataggtgaaattgattttgttgcatctcatggtcatacaatatttcataaaccagatgaaggaatcaccttacagattggaaatggaagtgagatttctaacatgactaatcaaaaagttgtatgtgattttagaacacaagacgtgaaatttggaggtcaaggagcaccacttgttccgataggagataagttactttttgctgattataaatactgtttgaatcttggaggttttgccaatatttcttttgaaaataatgaggaacgcatagcatttgacatttgtcctgtaaatatagttatgaatcattatgtgcaaaaaattgggttggaatatgatgataaagggaaattggcatcacaaggagatattaattttcagttgttaaaagaattaaacaaccttaagttttatgatgatgataagccaaaatcattgggttacgaatttgttgttgatgttatttttccattgattgataattacaatttgtcagaaaaagatatactaagaacatttgtagagcatattgttattcaaatttcgagtaaaataaaatttaaaggagaattgttgattactggaggaggaacttttaatacttttttgatagatgaattgaggaaaaaaacaagcaatcaaatagttattccaaaaaaagaaattattgattttaaagaagccttaatttttgcttttctaggactgttacgtattgataatcagattaattgcttaaaaagtgtgacgggagcaaaaaaagaccatagtagcggtcaaatttatgtgccttaatttgatatatttgtgcaacttaattttatagatgaaccgagcatgttaaaatcatttacataaaaaagatgattagcagcgaacacatgtgacaattaaaaaacaatatagacacacacacacatgaaagaattacttaaaaaatacgaaaataaaaaaccagaaatagtttttcattggcaagatcaagaaactgatgccgaaggttggacagttattaactcacttcgtggaggagctgctggaggtggaacaagaatgagaaaagggttggatatgaatgaggttttatcacttgctaaaacgatggaagtgaaatttaccgtttcaggaccagcaattggaggagcaaagtcaggaattaattttgatccaaatgacccaagaaaaagaggtgtgttagaacgttggtataaagcagttacacctttattaaaacattattatggtacaggaggagatttaaatgtagacgcagataaagacgtaattcctattacagaaagttgtggagtttggcatcctcaagagggaatttttaacggtcattttaagccaacagaagcggataaaataaatagaattggtcaattgcgtttaggtgtaattaaagttatcgaaaacaaagaattttctcctgacttatcaagaaaatatacagttgcagatatgctaactggatatggagttgctgaagccgtgaaacattattataacatttatggagggaaaattgctggcaaaagagcaatagttcaaggttttggaaatgttggctctgcagcagccttttatttaactcaattaggcgctaaagttgtcggaattatagatagagaaggtggagttattaatgaaaaaggattttctatggaagaaatgactgctttgtttttagcaaaagacggaaacaaattagttgacgataatatgatgtcttttgaaaaaattaataataaaatttggagtttatctgcagaaatatttgttcctgcagcagcttcaagattggtaaccaaagatcaaatcagtcaaatgattgaaacaggtttagaggtgatttctccaggtgcaaatgtaccatttgcagataaagaaatctttttcggaccaattatggagtatacagatgatcaagttagtttacttcctgattttatttctaattgtggaattgcaagagtttttgcttacttgatggaatctagagttgaattgccaatgaaagataaagcgatttttgaagatacatctaatacaataaaaaaagcattggaaaaaacatatcagaaaaaaaacagcaaacaaaatatatgtaaaaccgcttttgaaatagcattgaatcaactaatataactttataaaacttatggaaactcttattatcataatattcgttttaggatatttagcaatagcattagaacacaatacaaaattagataaacttataccagcattggcaatgatggctattctatgggcattagtagcctttggtattgaagcatatccaaattggtttgattcaggagcccatgagttgattaatggagaaggcgggtttttaggtatagaaagtgaagagaaacatcatttacttgaagagacattattacaccatttaggtaaaaccgccgagattctattcttcttattaggagcgatgactattgttgaaattattgattattttgatggatttgcaacgtttaagaattatatagtaactagaaaaaagaaaaaattgttatggatttttgcttttttagcatttgttctatcagcaattatagataatttaacagcaacgattgttttaatttcaatacttcaaaaaattattaaagaccgtaacacacgtttgtggtttgcaggtttaatcattatcgctgcaaatgcaggaggagcattttctcctattggcgatgtaaccacaacaatgctttggatcggtggtaaagtatctgctttgatgctggttaaatatttatttattccatctttaatatgtatggttgttccggtaactatagcgtcatttatgaagccttttaaagggaaaattgataaagttgacgatatagaaagccaaaaatctaaaagtaaatatggatcaacaatgttatatattggattaggagcgattatttttgtgccatttttcaaagtaattacacatttacctccttatgttggtatgatgctttcgttgtctgttgtaggactctttgcagagctgtatagtcgttcagaatttagtatttctcatgttgttgatcaagaaggagatgattctcaagggcatcacagtccagtacacgcttcattatcaaaaattgaaatgccaagcgttttatttttcttcggaatattaatggctgtagcagcacttgaatctttaggtatattatttattggcgccgaatctttaaaacaaataattccaaatacagatattgtagtgatgttattaggtgttggttcagcaatcgttgacaatgtgcctttggttgcagcaagtatgggtatgttccaagaacctatggacaaccctttatggcatttcgtagcattctctgcaggtactggaggaagtatgttaatcatcggttcagcagcaggagttgttgccatgggaatggagaggataaattttatgtggtatttgagaaaaatagcatggcttgcggcagttgggtttattgctggctcactcgcttttataggaatgagagcaattttagcataataaaaaagaatagaaactgtcattttgagcgaagccgaaaaatcttacaaactaatttagttttaaattcttcatttcattcagaatgacagtttttaattttatataatacaacaattacaatttctaaacattaatttcgttacagtaacgtatataaaataagaaaatcaatgcaacaagaagcacaagaagttttagacgaagccttatcagaagagaaaacactatctatctataatttaattatggatggcggtataggaggacaagtagtaattgctattttattaatcttattgataacagcactatacatttattttgaaagagtttttgcaatcaatgctacctctaaaaccgatgataattttatgaatcaaataaaagatcaggtttcaaacggaaaattagatgcagcaaaagtactgtgtgcacaaacgaattctcctgaagcaagattgatagaaaaaggaatttcaagaataggaaaaccgttggatgacattaatactgccattgaaagtgccggaactctcgaagtctataaactcgaaaagaatgtaagtattttagcaacagttgcaggagcagcgccaatgattggtttcttgggaactgtaattggtatgattttggcattccatgaaatggcaactagtggcggacaagcagatatgggagcattggcaggaggaattaatacagcaatgacaacaactgttgcaggattagttgttgggattattgcatatattgcttacaatcatattgttgttaaaaccaataaagtggtgcatcaaatggaagcaaaagcagttgaatttttagatttattaaacgaaccagtttagttttgtcattcctgcgaaatcgaagattcacgaatacattattaaaaataagtctagaagagtaaggcaggaatccattcattataaaaattatgaaatttaaaggaagaaataaagtaagtccagaattcagtatgagttcaatgacagatattgtattcttgttattggtgttttttatgctgacatctaatgcgccaaatgcgttggacatgattttgccaacagccaaaggaaagtctaccaacacaaaaactgtttcggtaagtattaagaagaactctcggttttatataaatggctcgaaagtgaaaaaatcagaaatagaaggacaattaagaaatttattggcaaatagcgaaagtaaaacagttcttttaagagcagaagaaggtgtgccaatcgaacaagcagtttcggtaatggatatcgcaaatagaaatagatttaaagtgattttggcagtaaagcctaaataaatgaaaggtttaaatactatacataaacgaaagtcagcaactataactacaataatagtattgttgttattgctgtgtattttctttttcggattaaaatatatggatccgccaatagaatctggaattgctgttaatttcggaacttcaaatgttggtagtggaaacattcagcctttagaaccagttaaaacacaaccaaatccagaagttacagaagaagtttctcaagaagaagttgtagaggaagttgttgaggaatctacaccagataactcgccaaccgaagatgtggttacgcaagaatcagaagaatctatcaaaatcagaaaagaaaaagaagcagaacggaaagagcaagctgaggctgatagagttgcaaaagtaaaggctgaagcaaaacgtgtagctaaagccgaagcagcgcgtaagaaaaagatagaagacgataaaagacgtaagttggatgaacttatgggaggattaaatacttctgatggtacaactacaggaggcgaaggagatgacaatacagcaggagataaaggaaatgaaaatggagacccaaatgctgatggctactatggaaatggtggaactggaggtggcggagactatcaattaggaagtaggaaagcaacatatagaccaaaacctaagtatgattgtggtaatgttgaaggtttagttgtaattgaggttatggtagatagaacaggaaaagttataaacgcaacacaaaatcttaaaaaatctaaaacttctaatcagtgtttagttaatagagctatagaggcagctaagaaaactacttgggatgcagattctaaggctggagcgaaacaagttgggacaataagatataatttttctttatctaattaatgacatatcaagaaactttagactggatgttttctcagttacctatgtatcaaaatcaaggcaaaaccgcctttaaaaaagacttaactaatagtattttattttcagaacatcttcattctcctgaacagaaatttaaatctgttcacgttgcaggaacaaacggaaaaggctcaacaagccacatgattgcatctatattacaagaagcaggttataaagttggtctatacacatcacctcatttaaaagattttagagagcgaatcaaaattaatggtcaaccaatttcagaaagcgaagttgtcgattttattgcagataataaaccgttttttaataagaacaacctatcattttttgaaatgactgttggattggcatttcatagttttgcgaaacacactattgatgttgctattattgaagttggtcttgggggacgtttagattcaacaaatatcattacaccattggtttcggtggttacaaatattggttttgaccatacacaaatgcttggaaataccttaccagaaatagcatttgaaaaagcaggaattattaaaaatgaagttccagttgttgtcggtgaatatcaagcagccattcattccgttttttatcagaaagcgatagaaacacattctaatttatttttggctgataaaaatatcaaggaagattatatttcggatttaaaaggaagttatcaatcaaagaatatcaaaacagcagtacaaactataaaggtattgcaagatagtttttcaatttctgaagaaaatatcagtaaaggattgcaaaatgttatcaaaaacacagaattgttaggtcgatggcaactattgagtgaaaaaccattgactatttgtgatacagcacacaataaagaaggtttgacctatgtgatggaacaagtgaaggcacaagaatttgatatgttacatattgtattgggagttgtaaatgacaaagatttagattccattttaccactatttccaacaaaagcaacatattatttttgcaaaccagctattccacgaggtttagaagcctcaattttaaaaaagaaatctgctgaatataatttgaaaggtaaggagtattcttctgtaaataaagcacttgaaaacgctatgaggaactcgtcagatacagatttaatttttattggaggaagtacatttgtagttgcagaaatagtttaatattttttatcaaaaactttgtgagaataaaaaactcacttatatttgcatccgcttagggcaattagctcagttggttcagagcacctcgtttacaccgagggggtcgggggttcgaatccctcattgcccacatcaattacaatcctgatgatttttcatcaggattttttgttttcaaaaaaaaagaggaatgtattcattattttttttgaaaataaaaaatataattgtgcaaagcacaaaaggattgtatttgcagtagcggtttcattgtagggaacataaaataatccctcattgcccaccaaagtaaaatcctgatgaaattttcatcaggattttttgttttcaaaaatttttgaaaaattacttttacccatcgtgaagaattaaacttatgcagcttagaaattaactaaagacctgcgtacagtatctaaaataaattatttaataaaaatagacaatatttagtctaaatataaatataaaacgtatatttagacaatatttagtctattatgaataatttttcaatacaaaaaacaccaaaaaatattgcgaaagagattgctgcaaagtttaaaaaactccgtaaacaaacaaaattgtctcgaaaagaacttgcagaacgttctggagtgtcagaaagtagtattaaacgttttgagactacaggtcaaatagcattcgtgtcattgttgaaagtaagtcaaactattgaacgaatagatgattttggaactattttcttaattaatgatagtgaatcggtaatagatttatttagtgataaaatgaaactataatggcgttgttagaaagacttaccgttgtgttaaattttggaacctctttaatagaggttggagaaatagtaacaaataaaaagaaatatttttttaagtattacccaagttttttagagcggaaaatagaaatatcaccatttaaacttcctttaaattcaaaaattcaaactccaagtgaattattttttgatggtctttttggcgtttttaatgatagtttgccagatggttggggacgtttattggtcgataggcatcttttaaaaaatggctttcaattgcaacaaattactgcccttgataggttatcacttattaacaataatggtttaggtgcattagaatataagcctcaagaaaaaattgtatcagaaaaatacaatagcattcagttagatactattgcgcaagacatgcaagttgtattgcaaggagaaagtaatgttgtaatagaagaattgtataatttaggaggatcttctggtggtgcaagacctaaaataatggtaggttataatgagaaaacaaataaattggtacatgataaggctatattgcccaaagattttgaacattggattataaaatttccttctagtacagatatgcaagacattgctcaaatagaatatgcttactatttaatggcggtaaatgctggtatttctatgagcaagtcacaactttttaaaagtaaaaaaaatgattatttttttggaacaaaaaggtttgatagagataaaaataacaaactacatttgcattctgcaagtggtttattacatgataattttaggttgagtagtttagattatggtcatataatgaatgcggcttttcaattagaaaatcacataaatgggtatgaaaaagtttttcgtttggcatgttttaatatgcttgcacacaatagagatgatcatagtaaaaattttgcatttttgatgaatgaaaaaggcaagtggcaatttgcacctgcttatgatcttactttttcatcatcatcacatgggcaacacagtacaactattaatggagaaggagtaaatcctactcaaaaacatttattaaaattggcagaaaattttgatatgaaaaatgcagtacatattttagaagaagtaaaacaatcaataaataattggactacttttgctaatcaagcaaatgtgagtaaagcatcaacaaaattaatagagaaggtcatagaaaatcaattaaaaaactattaatacaaatacactgcacaagtgctaattatctttacatctgtaagataataaagtgcgtttgctatgatataaatttttaatcacttaataaaaaaagcaatgagaaatattatattaattgttgatacaattaatcaaaatgtcattgcataatttttaaagtaatgggcattcaaatagaaataacagtttttttgtttaagacttttttaattattggatttgatttttatatgagttagtttgccttaattaaaggtgaaaagcagtttcgtagaataataatttagcaagttgacttgccagagcaccaatttatttcctcaaaaaaaagtcctaccgaagcaggactaaagattttcatctacggcatatagccttattgtgataagattaaagattagaataatttttttcacatatcaaatgtacaaatttattgtttaataaaaaacttttcttaaatttatagtacttataaaaattgctaaacaatatataatatgtcaaaaattttaggattagatttaggtaccaactctattggttgggctttaatcgatgatgggaataaaaaaatacttggaatggggagtcgtatatttcctgaaggagttgttaatttgggagaaggcgaaggacgtgaaacttcaaaaaatgctagtagaactgaagcaagaggaattaggcgtcaaatttttagaaggcgattacgcaaacgttatcttctacgagaacttgctaaaaatggtctatgtcccttagattataccttagttaaagtgtggaatgaaaaagaaatatttaaaaacactcaattgcaagaatggtttaaattaaatccttatgacttacgctcaaaagcaattaaagaaaaaatttctttagttgaattaggcagaattttttaccacatgattcagcgtagaggatttcaaagtaatagccgaagtgctggaactgacaataacgaaaagagtgtcatttttaatggagattccaaaatcggtaaaattggtattgctgaaactgctcaaagtataaaaagcaacaaaacacttgggtcctatctccattcaatttctccgaaagaaaacacaccttattcaggtgaattagaacgtatcagaaacagatacacaactcgtcagatgtacattgatgagtttgaaactatttgggagtatcaaaaaaagtatcattctgtattaacacaaaatctaaaaacaatctttggaggtagaaaaaaagatggatatgcagaagatggagtgctgtttcatcaaagacctttacgctctcaaaaacatttagttgggtattgtgcttttgagtctaaaaaaacaaaatgtcctattagtgccattccaaacgagttaagaagagtttatgaatgggtaaataatttaaagtgtgatattgctggggaatcagtaaaatttacatcagaagaaagaaaaaaaattatcgatttattgctatctaaagagaaagtaaggtttaaacagattagaaaaacaatcaataaattagaaagttaccatcaatttaattataaagatgatgattatataataggtacacatactattagtaatttatctaataaaaaattttttggagaaaaatggtttgattttacagaaaaggaacaagaagatatttggcatatactttccttttttgaggatagagaaaaactaaagcaatatgctattgaaaaatggggatttgatgaggaaaaagccacattgatttctaaattcaatttaaaagatgaatatgccaatttaagcagaaaagcaattagtaatattttgccttttttaaaattagggtttcaatacgatgttgctgttggtcttggcggagttaaaaatactttaggtagtaaatgggaggaaaacaaacaattcatattagataatgtcccagaaatagtacgttctaatttaaaaggaggttatatcgagcctctaaaaatgatgcttaaaaatgaatttcacctttctgataaacagtttggtaaattatatcatcatagtagttcgattaaaacggttaaattattagataaattaccagttaatttaaaagcagatacagaaattcaaagtataaaaaatcctgttgtaattacagcactatttgagattagaaagttggtaaatgaactaattgatacttatggaaagtctgatgcaataaaagttgaattggcaagagacttgaaagcatctaaaaaaaacaggtatgaaacaagaagaaaacaacagcaattagaaaaacaaaatgatagagtaaaagacgaattagaaaaattaggacagcgaataaatcatacaactattttaaaatacaagttgtgggaagaatgtgataaaagatgtccttttacaggaaaaaatattgaagtaaatgagttgttttctggagaaatacaaatagagcatattttcccttggagtaggtcattaaacgatagttttatgaacaaaacactttgttttgctgatgaaaatagagcgaaaggtaatttgactccctatgaattctatagcaaactaggagaagaaaaatgggaagaaataaaattacaagcattaagttgttttaaaacgaaacctaattatcctaatgcttatcataaattcaaacaatttgttaagaaaaagcatgacgatgattttataagtcgtcagttaaatgatactcgttacataagtaaagaagcaaaaaattatttaagtaaaatttgtaataatgtgcaagttgctccaggacaaatgactgcaactttacgccatcattggggtttaaattctattttgaataaagatgatgatactaaatcaagagatgaccatcgccatcatgcagtagatgctttggtaatggcatgttctacaagaagtcatttacaagaattaacaaaaagaaatagatatcaaaaaaatcatgaacttaaagattttgagatgccttggctatattttaggcaagatgcagaaaaatctgttgagcaaatattagtgtctcataaaaaaacaaataatgtgttaacgataagaacacataaaacaaagaaacatggaatagtatataaaaatacaggtgttgcggctcgagggcaattacataaagaaactgtatatggtaaaaggactgctccagatggtgttgaagcatttcatgtacgaaaaccaattgacagtttgacaaccaaaaaacagattgataaagtagttgatgaaacaatacgcttccttattttaaaaagggttgatgaattgggtggcttcataaaaggaaaggttcctgatggtgctttttatgctgtagatgaaggaggtaataaactagcacaattatttttaccaaataagaatgggaatccagtgccaattaaaaaggtacgtatgcgagaaaatattggaggagcagaaccattaaaagagactataaatcaacatgtaaaccctcgtaataatcatcatgtacttatttataaagattttgatgataatttgagagagcaggtagttacattttggactgctgttgaacgtaaaagacaaaaacaatccgtatttcaattgcctgaagatggtaaagaagttgttactactttacaaattaatgatatatttctattaggattaaaaagtgatgatattgattgggaacaacctaattatgaaatactgaagaagcatttgtatagagttcagaaattaacatctaaagattatttctttagaaagcataattcatcaactattacagatgatgattataagcaaataagaggttttggagaagggaaaacaggttggcttacctttaatccaataaaagtcaaaatttcagtttcgggtaaaattgaaaaaatatgaagcgcaaagagtttttaaaaagtttaggaataggagcattaggcttaagtgctttttcttttcaagaaattatagatagaagacctgtaataatatatgataattatttgcgagggacttttacatacaatttagagaccatttataagcaattaaatgttgggcaagaattaattttacagcgagaaataaacaatgaatacgacaagtatgctattgcagttttctataataagcataaattaggatatattgctgcttatgaaaatattgttttagcaaacatgttagacgcaaatgtaaatttaacttcagtaataagctatttaaataagggtgaaaataaaaatagagaaattgcaatacaagttttttgtaatttaatatctccaacacctttgctaattactgaacttgaaaagcgttctgacgatgaagatgacttgtacagaaagaaaatctattttgataataattaatacacaaatttagttctttgacatatttcttaaccttgattaaagattagaaaaaacgatatttatttctaaaaaactcttttgtactattccgttgtggtttgattaaagattagaaaaaacgatattcttaatagagcagggaagaggaataacggtgttgtggtttgattaaagattagaaaaaacgatattcttgcgcatcttttatataagcttctcttggttgtggtttgattaaagattagaaaaaacgatattagcctctgctccaggtttaagtagtgcactgttgtggtttgattaaagattagaaaaaacgatattggttgatgatggacaaataaccaaacaagggttgtggtttgattaaagattagaaaaaacgatattcttacctgaaaagattagaaacagagcattgttgtggtttgattaaagattagaaaaaacgatattttccgcaggaaaaaacaagcatatagatagttgtggtttgattaaagattagaaaaaacgatattaaagcaacaaattacgccaaagcaaaaacagttgtggtttgattaaagattagaaaaaacgatatttcgtaaagcacaataataaaatgacaataagttgtggtttgattaaagattagaaaaaacgatattatgcgaattagatagatacccagagttccgttgtggtttgattaaagattagaaaaaacgatattcaaggaactggtattatagcctctgatttgttgtggtttgattaaagattagaaaaaacgatattctccttgaaacataccattccacatatatgttgtggtttgattaaagattagaaaaaacgatatttcaaaagttgttggatgtattgtaacacatgttgtggtttgattaaagattagaaaaaacgatattctttatctgttccaacaataatatcttcttgttgtggtttgattaaagattagaaaaaacgatattttattaggagcatcaacttacgtgaagtaagttgtggtttgattaaagattagaaaaaacgatattaccatctgccctaattgttcgcatacacgtgttgtggtttgattaaagattagaaaaaacgatattattgggtcctggagaatgctgttttgtatggttgtggtttgattaaagattagaaaaaacgatatttatatagactgcttcttttacatcgtatttgttgtggtttgattaaagattagaaaaaacgatattactacagaacctaataatgtaaaggagattgttgtggtttgattaaagattagaaaaaacgatattatggttttccttttacatagtctaccaattgttgtggtttgattaaagattagaaaaaacgatattagcaatctccttagatgctatatatcaattgattatttaaaaatgtcgtgtaaaaaaatgctccttataaagacataattgctttatttggagcattttttgatttctatcaaaataattctaactgcaaaggtggcggttcctttggtgtctcaactctaccccaaaagttcataatattaccatattgtttatcagtaattcttagtacacttacctttcctaatggtggcaacaagtgtttaattcttttttcatgagcatcagcactttcactacttgcacaatgcctcatatacacagagtactgcatcattgtaaacccattttttaataggtttttacgaaattgttgagcatttcgtctatctttttttgtttcagttggtaaatcaaaaaatacaaataaccacataatacgataaccgtttaattccataatttgggataaattattttccttgttttgcccataaaacactgctgtaaactacttgtggttctagatatgccaaccattaaagggcttttgtatccatcaaaatacacagtttctgtaagtacgtttaataattctgttttaatcggtgtgattaaatcctgctcatcatatcgttgcataatttcaattactttagcatctactaatggtctaaagggttccataatatcatcagccaaacaaaaggcattgtatttattatgatgatgaataccaagagtagttaataaaccacttccagataatgctcttgccacagcagctctcaaaacaatgtacccatagtttaaaaataagtttggatatttaccatagcgttctcgtttaaaattaaaatcaaataaatgcttccaataataggcggctgcaacaccctctctattatcagtatcaccacttaaaacttttgaagcgtaataatccatagggttattttcgcagttcattctgttcaataattcagattgattttcaatttttgacttaacaatttgttgccataattgcttttttaaaggttcagaagcgttaatttgatttctaaataattcttgttgaatgtggtgactgtctaaattcaataacatactttgtggcatgtgcttattatcgcaaaaaatgacactagtattatttgatgataattttgataaagcaggtatggaaatataagactcttgatgctcaatgacaataaatccaatatcttctattggcactgttgtttctctttcagaagtttttataactagttgctcatatttagtagttaatgagcatttatttccaaagaataaagttctttttatcatagtttttttaataaagatataaaaaatgatactaagatgaagtaatcacaagaatatttagcaatgagaaagatataagaaatagtatttctaattaattgtatatttacaattcaatcgtaaaaagaatattcatggaaactcaaaattataaaaatcacagaaaaatggttactggatttcactacgtaacatttgcaataacggttatattattaataggcactgttataaacattataaaatcatcagcagataatatatattcagcatctttactcgtcttagtgcctcttttgtttttaatttttggttactatatgcgttcgtttgcattaagagcacaagatagagcaatacgagcagaagaaaattttaggcattatttattagcaggaaaaccatttagtaaagacttaaaaatgcgtcaaattattggtttacgctttgcatcagatgatgaatttttagaacttgcaaaaagagcggtttcggaaaatttatcagaaaataaaataaaaaaatctatcaaaaattggaaaaccgatacttatagagtataaattaaatttattggactttatgtttcctgtaatatttaattttaaattgcgacttataaaatctaacgaaacttaatgtttaattctaagcaaaaatttacttataaagtagtatattctactaaggatataaatttaacagattggaattcattttcaactgataatatttttcttgatttagattacctagaaacagttgaagaaacggttagtgacgtacatcagtttatatatgctttgtattatgatgagaaaggaaaaccaattggaaaatcaatttttcaagtattaaagtatgatgctagtacgtttaattttgatagtgttccttgtaggtttcaaaataaaattttaagaaaatttttaaacaaacagctaaccatacttatagcaggaaatatttttgcaacaggagaaaatgttttttattttcaaaaaaacattgaagatgatattatttttgaaaatataaataatgttataaatcaattgcttcaaaaaaataaatctattaattatattgttttcaaagaattttatccagagaataattcggttaaaactatattagaaaatcaacaatttttaaactttaatatagatgcgaatatggtttttgatttaaagaatcactggaatgattttgatgatataatgcaagactatcgaactaaatatagatctagatttaataaagtattaattaattctaaacatttagttgttaaagattttaatgtgagtgatataaaaaaacattcagaaagatttcaaaatttatataatcaagttttgaaaaactcaaactttaatttggggatttttaatatcaacacgtttatagggcttaaagaaaagttatcagataagtataagatttttggctattttgttgatgataagttaataggatttagatcttcatttgttaagaatagtacattagaaacgagttttgttgggattgactatgaatatagtttgaaatataaattgtatccaaaaatgcttgttgattttataaacgatggcttaaaaaataacgctacttctattggttttggtagaactgcagaaaccatgaagagtgcttttggagcaaaaccactaaatatgaatttatttattagaccacgatctaaagctggtaagtttttattgcgattaattgtccagaatatcaatccatctgaatttaaattgcggcaaccatttaaaagagagtttaatacagatcaaaatacacttgctgacagtagtacaataaaaattaaggaacatcgtaatagttttatgaattttaacttttatccttttaatagaaacaaaatttcaaagatttagtaaaattaaatggattcattaacacaaatagttttaggagcagcagttggagaagttattttaggtaaaaaacttgggaatagagccgtgttttggggagccattgcaggaacaattccagattttgatgtttttctaaattttatagtctcagataaattgtctgcaacattaatgcatcgcgcattttcacattcctttttatttgtaattaccattgcacctcttttgggttatttgttcactaaaatgtttaagaaaagcaaagccacttttcgagattggtcaatactttttttctggggatttctgactcatattttattggatgtacaaacaacttatggcacgcaattactttggcctttccataatcgattggcaataagtaatgtttttgttgtcgacccgttttatacgttgccctttttgatttttgtgattgtaacgatgttctataaacgtacaaatccaaagagagcaagaattaataggattggattatatgtaagttcaggttatttaatactaacactagtattcaaaatgtttacctatcaaaaatttacaaaaaatttagaaagtcaacaaatagattataatcgtattgaaactggtccaactcctctaaacgcaatactttggtatgcaaatgttgaaacagataatcattattatgttggatattattcgctattggataaagatgataacattcaatttaaaaagtttgacaagaatcatcaattgagaaatcaactaaaagagtataataattttaaacggatgaatcgtttttctaaggattggtattttctaagtgaagcaaatgatattatttattataacaatatacgttttggaactttcggatttaaaaatgaagatagacaatttgtatttaatcaacaggtgaaaattattggtgacgatattcagtttgtggaaagggatagaaacccaaaatcacttgctgataataaagatgaaaagaatgaagattccttttttaaactattttttaatagtttgatcaaaagggttttggggaataaataaaaaacgctttaaaatatattttaaagcgtttttgtaaatatgtttatgaaaagaattctacatataagcgcaaataactccacccattaatccaagtgttacaatccaatatcctgagtttattagaatgtttttaaacccttttcgttcaaacattgcgtttgttgctatcactggcattgcaaaaaagaaaccagcaagtactccatgtaaaactccatgtttaaatgttctgaagtttgtgccatatttagccataaagtctgcaaaatattgagtagaactttcatctaattcagatccaccgagagtagataaaactccaaattgatgaatagacatttgcataattaccgacgcaatcaaaatgctaaatacgtaacttagaaagaatataagaggcatatttgctcctttcattttttcttctgtaagtcctgttgagttcatccaagcagtaccaaatacttttgggttgtaccaaataaagcccatgattaacggtattaatgccgctattaataagatgtaataatttaattccatgataaaaagttttttagttacatttcaaatataacgattttattttgcatggataaatttactatgttgttatatagtgatatagaatacggaaagagaataaaatcattaaaattccagagactttataaatcaaaaatatttttttagaattcaataaaggagttaatttttttgccaagataactttaacaatatcaattgttaaaattccaaatactagagagaataagaaataagaaccgttttcttgatatttttcaaaaccatatttagcaattaaaacccaaaaccctaaaacaaatgggttgaagaaattaacactaaatccttttataaagttttgaaagtgagtaaggttagaaactttatttttcaattcaatatttttagttttaagtatataggagactccaaatccaaataaaataaggaaaccaatgattccaagatattcatttaaaaaatgattttctaataatatattaactccaaagaatgaaatgattgatgtgtaaataatatcacctaaaaaaattccaagacttactccaaaaccagatttaaaaccatttctaattgtagcgttgattaaaataaaaacaacaggaccaattatgaaaagcgttgttaaaccgataagaaaaccttctagtatatccatcaaattatgcttcagtaaaaaaacaatgtatgtctttttttgtaatttaaaactaataactaaggatataaaataatttcattcaatatctaaaaaattagattttgagtggttttaattagttgtatatttacatttcacttttttatttattatgaagaaaatactattttatacactttgttgttttgcatttatttcttgcaacacaaaagagaggaagccacagaatataattgaaaaaaacacagaagttactgttgaaaatgacactattgaagttcccaatatatttgttgtaaaaacgagatttccttcagcggatggcttactcatttcggctgatttgtatgaagtgaatggtaaaaagccaatagttctattatgtcaccaagcaggatttagtaggggtgaatataaagatactgctataaaattaaattatttaggctattcttgtttagctattgaccaacggtcaggagaaatagcaaacgaaatatcaaacgaaactgctcaacgagcaaaagaaaaaggcttgccaacaagttatttagatgcacgtcaagatattgaatctgcaattgattatttgtatgacatgaatggaaatcaaccgatactattagttggtagttcgtattcagcatctctagtgttgctgataggtaaagaaaatgagaaagttaaggcagttgcagcatttagtcctggagaatatttgaaaggaattaaaatgagtgataaacttcaagattataagaagtctgtttttgtgacttcatctaaaaatgaaattcaacaaatcaaaggcttgaaaataggtgtaacgaaagggaaactagttcattttgaaccattaactgacggtatacacggttcaagagcgctttggaaatctactaaaggcaatgataaatactgggaagcatttgaagggttcttagatatgtttgatcagaaaatagaagagtaaagacaaatctatttttctctttagtgtttttcgaatccttattaattgtcttcatttattcaaaataatttacttaaaacaccttttttatagattgtatatttatgaaatcgatgtgatcgaattacgctaaaaacataggaaactaagcctacaaatcgtaaatttgtaatactatatattttaaaatgaataaagttaataaaatagcagttttaacttcaggaggagattctccagggatgaatgctgcaattagatcagtagttagagcatgtgcatactataatattgaaagtgttggaatatatcgaggatatcaaggaatgattgaaggagattttaaagaattgaatgctcgaagcgtaaataatattattaataaaggaggaactatcttaaaaacagctcgttcagaggagtttagaacagttgaagggcgcaaaaaggcttttgaaaatcttaaaaagaagaatattgatgcttttgttgttattggtggtgatggaagttttacaggagcagagatatttaatgaagaatttaatttcccagtaattggaattcctggaactatagataatgatatttttggaactaattttacacttggttatgatactgccctaaatacggctgtagaggctatagataaaattagagacactgcaagttcacataataggttgttttttgttgaagttatgggtcgtgatgttggacatattgcattgaatgtaggtgtaggagctggagcagaagagatattaattcctgaagaagatttaggtttagatagattgttggagtcgcttaaaaaaagtcgaaaatctggaaaaacatcaagtattgtagtagtagcagaaggagataagacaggagagaatgtttttgaattggcaaagtatgtagaagaaaacatgcctaattatgaagttagagtgtccgttttagggcacatgcagcgaggaggtgcgccatcttgttttgatagggtattggcaagtagaatgggagtaaaagcagtagaagttttattagaaggaaaatcaaattttatggttggtattcatgataatgaaataacattaacatcattagaccttgcaataaaaggagaaactaaaataaacacagaactaataaaggtttctgatataatgacaacataaaagaaaaaaaatagaatggcaaaaacaaaaattggaattaatggatttggtagaataggaagaattgcttttagaatagcaatgaaaaatccaaaagttcaagttgtaggaattaatgatttattagatatagatcatttagcatatttattaaaatacgattcagttcatggtaaatttgatggtgatatttctgtaaaaaaaggaaatttagttatagacggaaatgaaattagagtttctgcggaaagaaatccagaagatttaaaatgggatgaagtaggagttgaagttgttttagattgtacaggaatttttaaaacattagagagtgcaggaactcatttaaaagcaggagcaaagaaagtgataatttcagcaccttctgctgatgcaccaatgtttgttatgggagttaatcatgataaagttaaggcgtcagatacagtagtttcaaacgcttcatgtactacaaactgtttagcaccaattgttaaagtg

SEQ ID NO: 2648 - DNA, 23393 bp, synthetic construct
  source 1..23393: mol_type = other DNA
  misc_feature 1..23393: note = Synthetic
ttcgctagaattaattacggaagcttcaaaaagaattgttcctaatgccactcatgttttggatattggctgcggtgccggaaattatactttaatgatgttgtctaaattgccaaatttaaactgcacgttggtcgatttgagtttaccaatgctggataaagctttagaaagagtttcggcagaaacaaatggtaaagttgaaattaaacaaggagatattcgggaagttgatttaccagaaaatggttttgatattattttggcaggagctgttttgcatcatttaagagatgacggagattgggaaactacttttacaaagttgtttaaattattaaaaccaagcggctgttttatgatttcagatttaatcacgcaggatatcgatttgctgaatgaatatacctggcagagatatggggaatatttagaaggaataggaggggcagaatatcgccaaaatgtatttgattatattgctaaagaagatacgccaagatctatgaattaccaattggatttgatgaaaaaagtgggtttcaaaagcgtagagattttacacaagaatatgtgttttggtgcttttggcggaattaaataaaaaagatttgccacgaattgcacgaatttttacgaattattttttatttaaactgttttaatcagaacaaaaaattagtgaaaattagcgaaattcgtggcaaaagctttaaataatatctacaacaatttttccaattgcagaattatcactaacggctttgtgggcttctatagcattgtctaaagtgaatgttctaggatcaattagtggttttagttttccttctttaattaattttgtggtttcttttaagatatcgccgtgatgttttcttccttcgttaccaatcattgggcgtaaaacaaaaacaccgtgaatacttgcagaatgaagtgaacttattgctaaagtatgggttccaaatgcataacagctgctaatttgaccgtaatgacgaatggctttaaatgaatcatcaagagattgacctccaacggtatcataaataatatcaaaaccttttccgtcagtatatttattcacgtaatcttcaacagtttcggttttataatcaataggagttgctccatacgattttacaatttctgctttttgagaagaaaccgttgcgtaaacatcagcaccaaaaattttagccagttgtacaaccatgtgtccaacgcctcctgcgcctgcgtgtaccaaaactttgtcccctttttgaacttttgctctgtcaattaaaccttcccaggctgtaagcaataccagcggaatccctgctgcttctttcatggttaggttttttggttttatagctaataaatcagcatcaacggcagtatattctgctaaagttccctgaagaccaagaacaccaccggcaagtccgtatacttcgtcaccaactttaaactccgttacgccttcgccaatttcttcaataactccggcaagatctgttcctaaaacagcaggtaaaacaggcgatgcataaggcgaaagtccaagtcggattttgttatcgattgggtttacgccgcttgcgtgtattttaactaaaacttctccttttttaggagctggtttttcaatctcagtttttacgaattcagattcgtatgtatttgtgaaaagtgctttcatagctttacttaattaaagtatttgggttgttttgtaaacctgaattggtgcagaagttaatgcttcgcttttgctgatgaaatcctgtaaatgtgattgattgttgtgaagatctaggccagtttggtctttccattcttcccaaataataaatacgttttcagaattgtgaagatcatagcgtacacaagcagcttcttttcttgtttcggtaaccaagttattcaataagctttgaagttgttgaatgttttcttttttacttttaataatggctgtaatagatatcatgattataaggttttaaaggtttcttctaaatgtttggtataattttctttgaagatgacaatgttttctgcagttgcacctttttcaacgtcgtggaaatggaacccgtttaatttttccattcctacaaatttattcattttatggaaaccaaacataactccttcgtctacagatgtttcttcgaagaattctcccggaagtgtaaaggctgttgcaggtgcattccaacttgtggtcagcatatatttgcgtccgtgtaacattccgccagttccgtaattgatgtcagggtttactcggcttcttccgtcgcttttgtaaattcctttttggtgtccggctgtaaaaacgtcgtcgatgtattttttgaaaagatttggcaattgaaaccaccaaactggtgtgtgatatactacaacatctgcccaaacgaatttttctacttcttcgtctaaatcaaaatcttgtttgatgtcggttgttttaatctcgaatttgttactgttttttaagtattcgattgtccaatctgtaacggtttcattgaattttccacctgaatgtgcaaaattctgacttccgttgatgataaatattttcttcattttactttttgttctgatgaatctgggttgcgtgagggataggagtggaaatccttttgtgccggggttcggcacaaaagattggaacggatagcccggcccttgggacacgcccgaattctaattatttaattttttgagattttttttttgaaacacatagagacataaatttttttttaagatagttgaaagaaactagtttctaacacatagcctatgtatgttaatgcaagtgaaacgtctttaacgacattgtaaatctatgtttctatgtgtttaaatattatttaagtttcgaaatcgcctgattaatgaaatccaattctgaagctgataaatcgaaatccattgtttttgcgtttgagattgcttgttctgcgtttctggctccggctaaaacaattgtaattcctttttgtaaagttgtccagcgtaaaactaattgcgaaattgaaatgtgttttgcatttgccaatgaacttaattcttctaccaatgtttttactttttgaagatcgaattgaccaaaatagccatttctatggtcgttatcttttaatttactgttggtgaaatattttccggttaacaaacctctttccatcggactgtaagcaatgattccgatattttcctgaatcgtaagcggcactaaatcggtttgaattgcctgattcagcatactaaaaggaacttgatttgaagctaactgaattgttttttgtgcttctttaatttgttctgcattgtaattactaactccggctgctctgatttttccttgttgaataaggatttctaaagcttccatagtttcctgaattggagtagtggagtctggccagtgaatttgcaataagtcgatataatcagtttgaagacgttttaagctttcttcaacttcttttattatgttgttttttgaagcgtatttatagattggtaatttttttccgttgtcatcggcatcaaaaaagaaatcgccttttccgttattgcttccgtcccaaaccaaaccaaatttggttaacaattgtacttttgaacgatcttgagattttaaagcttcgccaatcatttcttcacttaaaccaaatccgtaaaaaggagcggtgtcgattgtggttacgccatgagcgattgaagcgtgaatggagtcgattgaatctttcttttcgtttccgccccacatgtttccgccaatggcaaatgcaccgtaagttatggttgataattcaagttctgagttgcctaattttctatattccatgatgttaaaattgatgtcttaaaattatttgacaaaattataccatttttttaactgttaaattgtataaatttgtcttttttaggtatatttgcatactgaattaattgctgcagattatgaaaaaagaaaatctatatgaaccgtttacagtatcttttgaaacattggatgaatatccggatgttggagatcgtcataatttctttgaattggtttacattttgggcggaacaggaacgcagtgtatcaacaaaaatatttttgaatatgatgccggacatatgtttttattaacgcctgaggattgtcataattttacaattgaaaccgaaacgaagtttttctttttaaggtttaatgatatttacttgaagaattccagtctgcaaaacgaaaatattcagcgtttagaatatattctgcaaaatgctaatcatcagccgggttgtattttgaaaaatgatgccgataaatgtttggtgaaagtgatggtggaagcgattattcgtgaacatcaggataaggatgtttacaaccaggaattgattcagcaattggtcaatacgttgattattattgtagcacgaaacattgcgaagtatttaccggagcaggtaaatataggttctgaggcaagagcgatggatattttacaatatattcaaactaatatttattatccggagaaaattaaagcggaatctataagtgattatttcggaatttcgaatacgtatctaggccgttattttaagaaacatgccagcgaaacgatgcagcaatatatcagcaattataaaacgaagttgattgagcatcgtttacaattcagtgataagcgtattaacgaaattgcgtatgaatttggttttacggatgaaagccattttaataaattctttaaaaaacagagagggaatagtccttcggagtttagaaaaacgattcgtattagtgcgtgatatgatggcacgcggatgacgctgatttagacagatttttttatttttttgccacagatttagaggattaaaatgattttttaatctgtattatttggttttaaatcttgaatcaaaagccattctggctgtacttaagactttaatttttgatgcgtctttatgttgcggatttatcaaataattaaattcctgcggtacaatactgcttggaacttttagaactgcggcttcgttataatctataaagtcgtcgccaattgtctgggttattaaaataggtggtttagaatcccagtcttcgggtaaatcttccagatgcacttcttgaatagtgatttcgtccgggatttcaatttctacataaaaacgatcgacaggtaagtcttcacttaaatctaaatgaactgaaacttcgagtgttgccagggctctgctttctgctgcatataccattcgggtattaaggctgttccagcgataaccttcagacattgatgcgccaattccctttaaagttgctgccaagtatttttctctttcaattctaaatactatcattatgccaggtttccgaattccaatcgattcaagctgaattttacttcgttaattcctgtaattgtatctagcatattttctggtgtatttcctccaatagacagatttggtttttttagccatcgttgaaatttttcttcttcatcattgaaaacctccaaaccgtaatctattaattcattaattaaaatcaccaattcgctgtctctgctgtctaaaagaagatgctcacttttctttttgttataagttgtctgcggaattccaacaattgtcaaaactgattttacaggattgtttaatcttctgctgatgacttcaatagaatcatagggaatgcctgatcttatgacttcaacgcgctcaagtttattgccccagctgtattctttacctccagagtttaaggtagatctcttaattgagattacttttcctgatgcattttcaatacttcttttagtatcaaaaggttctgttttttgttttatatttttcataagacaacttatttgctgtaaagatacaacaattttgttgcacgatcagaaagttgttgaaaaatgtaagcgtaatagtccttcggagttagaaaaacgattcgtattagtgcgtaaacacgaattacacgaattacacgaatttgcactaattttttttacccacagattaaaaggatttttaatttgtgctaattcgtggaatttgtgttttaaataattttcttgattacgcgtagtttgtgagtgtgtttgtttaattctggattgtaaattcctgtgtgatctaaacggtcaatacgtacttttccacttgcgtgaatgatgtaattattctccataatgattccaacgtggatgatgttaccttcgtcgttgtcaaaaaaggctaaatcaccaacttcactttcttcaataaaacttaaagattctccttcgagtgcctgctgtgacgcatcgcgatgaattttatatccgtttagtttgtaaaccatttgtgtaaaaccggaacaatcgattccgaatggcgtttttccgccccataaatacggagcattcaaatacatgaaagcggtatttattaatgcactttttggttttataccgctagtttttgttccttcaaaatcaaaattagaagtattgatttcgttgttgttcagaaatgataaagatgctccaagcggaattggaagtaataggttgttaggtgcagtgatgtagtcaatcaaatctgcattcaaaataatggcttctttgcttaactgattatactgttcctcagaaattatctgatattgtttagaatctacccagcctatataatcatcaaactgaatttttattcgtgcccactgattttggcgttctaaaatttcgatgtgttcgccaaacaaaagttgtgtaacgatttcacttctgtcactaggctcagatcgaacgggtactatggcaagattgcagattccgaacatttagataatgtattagttaaaaattaggagttattaatttttaataactcctaatgaaatattatttaagctctttcgataacaattgcagatgcgccgccgccgccattgcagattgcagcagctccggttttagcattgttttgttctaaaacgtttagtaaagttacaataatacgagctcctgaacaacccagaggatgtcctaatgaaactgcaccaccatttacgtttactttatcgttatctagatttaagatttttgaattggcaagtccaacaactgaaaatgcttcgttgaattcgaaataatcaacatcgccaattgcaattcctgctttgtttaaagcttttggtaatgcttttgccgggcttgtagtgaaccattttggttcttgtgcagcatcggcataaccttttatgtaagctaaaggttttagacctaaagcagtcgctttttcttcagacattaaaactaaagcagcagcaccgtcattgattgttgaagcgtttgcagccgtaactgttccgtcttttgtaaaaacagcacttaacgaagggattttatccaattttacattggtatattcttcgtctttagaaacaataattggttctccgcgtctttgcggaacttcaactggaacaacttcattgtcaaattttccggcatcccaggcttttgcgcttctttcataagactgaatagcgaaattatcttgttcttcacggctgatgttgtattcagttgcacataaatcagcgcaaactcccattgcgttattatcgtaagcatctgtcaaaccatctttttgcattccgtcgagcattgttgcagggccaaatttgtttccggcacgcatttgtacgtagtgtggaattaagctcatgctttccattccgccggcaactacaatttctgcatcaccgcaggcgattgcctgtgcgccaaacattacagctttcatcccagaggcgcagactttgtttactgttgtggcagcaacttctactgataatcctgcaaaaagggcagcctgacgagccggagcttgtccaacgcctgcctggattacgttccccatgaaaacttcatcaactaattttgggtctaggttaatttttgaaagggctccttttatggcagcagctcctaattttggtgcgggtacggtagataaccctcccatgaaacttccgataggtgttctaacggcagaaacgataacaactcttttgttcattttctgtttaatattagttaatgtagcaaatttactctttatttgaataaattcaaattttgcgtcaattcgaatggattttaaatttaagatcaattttttgttaattctatttgtttgattgtgaagtgttttaaaaaaaagtttgaaaaaagataaaaaaaagcacaaaaatagttgtgagaaatagaatgttgttctacatttgcaaccgcaaaataggacacgtttccttgagcttggagaggtgccagagcggtaatggagcagattgctaatctgtcgacgggtaaccgtcgccagggttcgagtccctgtctctccgcttaatttttgcctcggggtgtagcgtagcccggttatcgtgtcccgattgagatcgggaagaccacagatacaaatctatgtctaattcggggtgtagcgtagcccggttatcgcgcctgctttgggagcaggaggccgcaggttcgaatcctgccaccccgactaaaactttaagcgataaagttttaaaataaatggacgcatagctcagctggatagagcacctgccttctaagcaggcggtcgaaggttcgaatccttctgcgttcacgaaaagccactcatatcgagtggcttttttgtttttatacaatccatcaattttataaaaattttactgaggagtttgttttttggtaacttgtttattttgttgattttagaattgtatttttatactgcaaattaaaatcttaatcaatggaatctcttatattaaaatataaaagtttaggaatagctgatgtattgcattatgagaaattcaatttaatttccataagtcatcattctaccaaaattgaaggttctactttaacagaattagaaactcaaattctgctagatgacggtttgactccaaagggaaagcctgttaatgatactttaatggtcactgattattttaaggcactacattttattgttgataaagcaagaaataaaacagcagttacaaaaaagttaataaaagatattaattcttttgtgatgaaaagtacaggaggaatctacaatactattcttggagaaattgatgctagtaaggggatgtttcgaaaaggaaatgttacagccgggatttcttattttccaaattatgataagtttgaaagactgacgaatgaattggtcttgtctattaattcacgaatgaatactgatttatcaatagatgaaaaattaaatttatcttttgatgcccactttaatcttgtaagcattcatccattttatgatggaaatggtagaacttctcgtttgataatgaattatattcaggctttttatgagcttcctttagcaattgtaaatagtgaggataaacaagaatatattcaggttttgattgatacaagagaaaaagaagatattaaaatttttagaaacttcatgaaaaagcaatatgaagaatatcttttaaatgaaataaaaaaattcgaagacagcttttcatcaaaatcaaataaaggatttagttttcttttttaaaatgaatttatagaatatctgttttgattgggatagtcgaaggttcgaattcttctgcgtttacgaaaagctactcaaatcgagtggcttttttgttttggtatatttacttaaaagtgctttttgtataaaaatttgtacatatttttaatagtataagcaaaaaagtcccaccgaagcaggactaaagattttcatctacggcatatagccttattgtgataagattaaagattagaaattttaatcagtcacaaatatatagaaaaaatattctggttagaaaaaggaaaaccgtaattgtcttaattttttttatagtaaattccatgcagattaaattttaataactatggcaaaaattttaggattagatttagggactaactcaataggttgggcgttaattgatgataagttaaataagattttaggaataggaagtagaatatttccaatgggtgtagaaaatcttggcgatggtgataacgaaatgtctaaaaatgctagtagaactggagcaagaggagtccgacgccaattttttagaagaagattaagaaagaaaattttacttcaaaaactttctgaaaataagatgtgtccaatggatgctaaagattttgaagattggaaaaaaacaaaattatttccaactgaaaagctggcaaaatggtttgcattaaatccgtatgaacttcgacaaaaagctttaaatgaaaaattatcattagaagaaattggcaggattttttatcatttaattcaaagacgtggatttttgagtaatagcagaaaaggaggtaatgacgatggggctatttttaaagggaatgcaaaggaaggaaaaataggaattgatgatacgttagaaagtattgaagggaaaacattaggttcttatttatatgaaatatacccaaaacagaaccaaccttttcaggatggcttggaaagaattagaaatagatatacaactcgtaaaatgtatgttgacgaatttgaattgatatggagtaaacaagcacaattctattcaaatttaaatgaagaattgaaaactttatttggaggaagaaaactggatggttacaaagaagatggagttttatttcatcaacggccattgcgctcgcaaaaacatttggttggcaattgttcttttgagccaacgaaaactaaatgtccaataagtgctattccttttgaaatgttcagaatttatcaatgggtaaatacagttgaatataatggaaagaagattgctcaggaagaaaaagataaaataattgagcaattattatcatccgataaaattgagtttaaaaaattacgaaaagcgattggtaaagaaagtgctgagttcaaattcaattataaagatgatgataaaattgttggaacatatactatttctaatctgtcaaataaaaaattcttcggtaaaaaatggtttgatttttcagataaagaacaagaagatatttggcatgttttatatttttttgacagtaaatcaaatcttaaagaatatgctgttaaaaattggaattttacagaagaacaagctgttgcaatatcaaaatttaatgtaaaagatggttatgcaagtttgagcagaaaagcaataggaagtattttgccatttatgcaacaaggatatatgtatgatgttgctgttgtaatgggaggaattaaaaatgcttttggcgatagttggcaaaatgatactgttgaaaataatcaaaagcaattagatttaattgataatgttgaaggaattgtcagatcaaaaacttctggaggttttatagatatagtaaaagatttacttcgtaaagagtttggatttaacgaaaaacaattaaaaaaactctatcatcattctgcgacaattgatgtagcagcattgttagaaaaattgcctgttggcaaagaagccgataaggaaattcaagctattagaaatcctatagttattactgcattgtttgaattgcggaagcttgttaatgaattaattgatgaatatgggcaatttgatgaaataaaagtagaaatggctcgtgatttaaaaatatctaaatcacaacgaaataaaattcgcagagatcaaaaacgattggaacgagaaaatgatagagtaaaaaaggaagtagaaaaatacacaagagtttctcacgataatattttgaaatttaaactttgggaagagtgtaaacagacttgtgcatatacaggtattccaattcctattgctaaattatttacaggtgaagttcaaatagagcatatccatccttggagtcgttcgctaaacgatagtttcaataataaaacattgtgttatgcggatgaaaatagacgaaaaggagataaaacaccttttgaattttatggaaatgatgaatctaattggtcaagtattaaagaaagagcattgaaattattttctgatacaaaagaatatccaaatgcatatcaaaaattcaaacgatttgtacaacaaaagtttgatgatgacttttcttcaagacaattaaatgatacacgatttataagcaaggaagctaaaaattatttgactcaaatatgtaataaagtatcagtttttccagggcaaatgactgcaaatctgcgtcagaaatggggtttaaatactgttttaaatgatgagaatgctaaaacgcgtgaagatcatcgtcatcatgcaatagatgctttggttatggcttgtggcaaggccagttatttgcaagaattatcaaaatggaatcgttataatagaaattatgatttaaaagattttcctatgccatgggaaacatttcgttttgatgcggaaaaagcagttgataaaatattgatttctcataaaagactaaataatattgtaaccattagaacacataaagtagaaaaaaatggaaaaacatatatcaataaaggagttgctgcacgaggtcaattacataaagaaacggtttttggaaaacgaaactttaatggagaagaagcatttcacgttagaaaaacaatagatagtttaaccaccgaaaagcaattagaaaaggtagttgatgaaaccattaaagaattaatacataaaagaattcaagaattaggaggatttgtaaaaggatccattcctttaaatacattttttattgttgatgaaaatggaattaaacaaccgcaaatatttttgtctaacaaaaatggaagtccagttcctgttttaaaaataagaatgaaagaaaatataggtggtgctgagcagttaaaagataatctaaatcaatgggtaaatccaagaaataatcatcatgtattaatttataaagatgaaaaaggaaatttaaaagaagaggtagttacattttggactgttgtagaaagaaaaagaaaaggatttccaacttatcaattgccagcagatggaagtaaaataattaccactttgcatattaatgatatgtttttattaggattaaatgaagatgaaattaattgggagaatcctgattttgatttactaaaagaacatttgtatcgagtgcagaaattgtcatctaagttctatgaatttcgacaaggttcacaagcatcgattcaaaataattttttgccattttacagaagaatcactggttatggagaaggaataggaggttggttaactcacaatccgataaaagtaaaaatttcagtttcaggaaaaatttcaaaatataattttatttaaaaatttggtgtaaatttacaccaattgaaattattgttatgacacgacaaagtatatccttaactgcacctaatgaagagtggttaaaaaatcaggttagtaaagaagaatttagtagtaaaagtgaagctattaactatttgattaagcaagctcgttcacaagatgaatattatgagtttgtgagggctaaaatagataaaggagaaaaaagcggttttgtaaaaaaacaaactagagaagaaatgttatcagaattcaaaaaagatctgcctaatgtatagctattatttaagtagcgaagccaaagaagatttaagaagaatttattattatggggttggtaagtttggcgttaatcaagcggataactattttaatatgttttatgattgttttgatagaatagagggaaatccttttttatttccatcagccgaccacatcaagaaaggatatcggtattgtgtttgtggtgttgatactatttactatcaaatcaatgggaataaaaggatagagattattaccattattggaagacaagattttgatagtagttctttgacataagcaattcaaatcttaaacatccaaaccacaacggaaaggtatggcattcacccagtaggaataccatacctttccgttgtggtttgattaaagattagaaaacacgatatttctatagccattttaaggtaatttcattatgttgtggtttgattaaagattagaaaacacgatattaacatttattggatatatttttaatcaaaagttgtggtttgattaaagattagaaaacacgatatttcaatcaatttattaaattctgtccagtctgttgtggtttgattaaagattagaaaacacgatattaattgaaacagtattattttatcaaagcggttgtggtttgattaaagattagaaaacacgatattaggatccgggacacacgacatgtaatactgttgtggtttgattaaagattagaaaacacgatatttatcctataaagtaatgttcgagatagacagttgtggtttgattaaagattagaaaacacgatattcccttttacttttaaagtttcaggatcacagttgtggtttgattaaagattagaaaacacgatattcaaacgtaactgaatttatgctttgggatggttgtggtttgattaaagattagaaaacacgatattggaacaatgcaattagttgaagaaactatgttgtggtttgattaaagattagaaaacacgatatttatcgaataacattccaattcttatagatggttgtggtttgattaaagattagaaaacacgatatttgaacttgcacaacttattactaaaaacagttgtggtttgattaaagattagaaaacacgatattcaaaaggccttacaccaaaactttctttatgttgtggtttgattaaagattagaaaacacgatatttcgttgttttttattgatgttctcattgttgttgtggtttgattaaagattagaaaacacgatattgcttacaaagaattacgcttacaacaacatgttgtggtttgattaaagattagaaaacacgatatttggaatatttttataattttacagtctaacgttgtggtttgattaaagattagaaaacacgatatttattttatcatttatccaaccgtatttattgttgtggtttgattaaagattagaaaacacgatattaaaaatcaaagtcaaacttttgattatatggttgtggtttgattaaagattagaaaacacgatattcctccataaattatgaagcataaaacaatagttgtggtttgattaaagattagaaaacacgatatttaacttaaaaaatgcaacataacctattagttgtggtttgattaaagattagaaaacacgatattgataaatcattaaagtattcatcccagtcagttgtggtttgattaaagattagaaaacacgatattgacgatataatgctccgtcatgcacgtatagttgtggtttgattaaagattagaaaacacgatattgaaaaatataaatcccttgacctgagtctgttgtggtttgattaaagattagaaaacacgatattcagattcaaaaaccacttgaagagggatctgttgtggtttgattaaagattagaaaacacgatattatagtttaattagtgcttaaatcggttattgttgtggtttgattaaagattagaaaacacgatattcttttcgtactttatatcatacaattcaggcgttgtggtttgattaaagattagaaaacacgatatttgagcggcttatttaatctatcatagaaatgttgtggtttgattaaagattagaaaacacgatattctgttgattaattcccgtagccccggccgtgttgtggtttgattaaagattagaaaacacgatattctagatatagattacttatacctttatctagttgtggtttgattaaagattagaaaacacgatattaagcaaaaccgataaaacaaaccacaaacggttgtggtttgattaaagattagaaaacacgatattacaggtttgttgttggtgtaatcccatattgttgtggtttgattaaagattagaaaacacgatatttcttccggcaaatgagagccattctcaaggttgtggtttgattaaagattagaaaacacgatatttttctttgtttgaaaatttatcaccagccagttgtggtttgattaaagattagaaaacacgatatttgtggaatttttaacgtcttttgctgttatgttgtggtttgattaaagattagaaaacacgatattataacctgctatttcgatacgatagtcttagttgtggtttgattaaagattagaaaacacgatattaagataaaacgaacattatcgccttttcctgttgtggtttgattaaagattagaaaacacgatattaaatgaaaaaatatataaatgaagctgaaagttgtggtttgattaaagattagaaaacacgatattattttaccgtcgtgtttcattttgatcttagttgtggtttgattaaagattagaaaacacgatatttttgttctgccatctgaactaacacccgaacgttgtggtttgattaaagattagaaaacacgatattagttggcttgtttccttctgatatataatggtttagattcgaatatcgtttaaaaaaatgtctcttttatggtttgataacccataattgaggcattttttctattacagggtttagtgaataaggttttagtctatgagacttattgaagattataaagcaatattaaaataactctaattgtgtaggttgaggtgcagaaggtaaggctgcttttccccaaaaattcaaaatattaccaaattgtttatcagttattcgaagtacacttacttttcctaaaggtggtaatagtttgtggattctcttttcatggacatcagcgctttcactgcttgcacagtggcgtacataaacagaatattgcatcattgaaaatccatctttcaataaattgtttctaaatccagatgcatttcgtctgtctttttttgtttctgtggggaggtcaaaaaaaacaaacagccacattattcgatatccgttaagctccataatgcaggatatttaattttttttcgatttcctgtaaaacattgttggagtgaactggcagtcttttgtaaagcaaccattaaaggacttttctcatctttaaaataaaccgttctggttaatatttgtaataactctgccttaataacagtgtttaattcttgttcatcaaaacgctgcatgatatcaaagactttttcatctacgataggacgaaaaggttccataatatcgtcggcaagggcaaaagcattgtatttacttttgtgatggattcctaatgtattcagcagcccgcttccagaaagagctcttgcagttgcagctcttaaaattgcataaccataattcagaaaattattagggtagtcaccatatcgttctcgttttatcccatcaaattctaaatttggctgagggaaatatttccagtattgctgcgctgcaactccttccatattagatgaatccccgcttaatactttactggccagaaatacaaaactatttttggaattagttattttttcgagtaattggccttggtttttaattttttcaattatagtttgctgccataactgcttttttaacggtatagaagcatcaatttgatttttgaatatttcctgttgaatatgatgactgttaagatttaaaagcattccgttagggaggtgattctttccgcagataataatagaagtattgttatcaacaagtaaattcatagcaggaatactgaggtagatttcattatgatcaagtataagaaagccaatatcctcaataggaatagtgctctctttcatttctgattttagtactaattgattattttttacagttatcgaaaacttgttttcaattaaaatagatttttttagcataaatttaatttgaaattataaataatcgtttcctctgcctaaatatgcatatttaaattatttgtataaagttcggctttaaagaaatgttgtttttacggttttccataatttacgattttagtttcaatattaatagaaacaaaacctggcgataaagaagaaaaattcgtctttgtaactttagcagcaattgaaaaaaggaacgagagttaagtgatatgaaagaaaacttactgtaattaaacaaaattgaataggcaaatgaaataaaaaagacagttttaaattacatattgatacatttcttagatttgtataaccactcaaaaacttttaatcatgccggtaattgaacaatcagaatataattttccttctattattcatcgcaacaggcacgtttcgactatttatgctgcgttgtttaaaaagtttgatgttccaggatacacaagggaaaaactggaattgaatgacggtgattttatcaatattgattttcttataaatgatccaaaaaaagcagtaattctgtgtcatggtttagaaggtgattcccgaagaacgtataataatagctgcgcggcttattttcagcaaaaaggattttctgttttcgcatggaataaccgtacctgcggaggagaaatgaaccgccttccgagactgtatcatcacggagcagttgatgatctggatgaggtggttcagtttgttttgcgaaaaggatttgaagatgtttatatgattggatattcaatgggaggtgttcagcttctgaattattttggatggacaaaaatcgatgaacgcataaaagccggagtttctatttctgtgccaacgcatattgcaacaagtgccgagatattgaaacaaggctttaacagggtatatttaaagaattttacaattgatattaagaaaaagctgaaatacaaagcggcacaatttcctgattttataaaccgtgatcaaattgataaaattacttcttttgatgaggttgaccaatattttacagcaccgctgcacggatttgcaagtcgtgacgattattaccagcgagtttctcctgaattttcacttaaaaatattactactccggttttaattattaattctttagatgatccttttttaggtgaaagatgttatccaagagccatagcgcaagaaagcgaatatgtttatctggaaacgccaaagtatggcgggcactgtgcttttccgctgcgaaactcaacgtattcttatgcagaaaaaagagcgtataagttttttaaatcttatagaactacggagaatagtaaaacggaatattagtaatttcttttttgagtcatttccagtaaattttccatactatccggaatcatatataataacagattgtctgaagttgttggaagcccctcataggaaacggcgcccaaatactgctcggcaaaatcaaaactatatacctgccagttctgcgtgttttttaccagtttaaattctaaattgtgctgtccgtctgtgcagggaatatatttaaaatcttcatcaattccttttcctaatgctttcacaaaagcttctttgcgtgtccataacgtataaaacatggtttttttatcatcagcattctgaatcattgacctttcgtgatcgtcaaagatatccggaagcaggtttgtgaatttaaaatcgttagataaaaattcaatatccagccccacttttttatgtgaaaccgctatcgccgcataatcttccgaatgcgagatattgaagtgcagccacgggtgtgaggctagatatggttttttattaaagtcataatcaagatgaatattttttatatctgattttgtgtaagctcctaaaataagttttaaaatcgatctgtatataatgaatcggtcccggtctatttccttataaaaacgttttgcttttttgagttcaggtgaatttagaaactgcgataaattagatttaagctcaatgaaactgggcagataaatactgtaaatgatgatgtcactagtatctaaagaatattctttaccagaaaccaatgtagcgccctttatatccgaaaaagagataaagagcttagatgttttcatttttttcatctaagatgtcttgaagtaatctcgctaaaaatatatcatttggcggggctacaatgtctaaatgattcccagagatattatgaatagttacgcctcccagcgcagcctttttccagccaagatgtgtagggtcaagtctgtaattaatgtcatctttagagcgaaataaatcgacttcaaagttttgcggtttaaggtgataacgatctacaatttttttaaccatgctgtcagcttctataaactctttaagcgccagttcttcttgttcggtcatttcatcttttttaccaaaatgtcttttcaggatatattctttttttccgttaatacgcattttaaaagctttccagctcaataacatttcttttaaaaaatctaaccttctatgcgtaatatcaaagtatctaacgagttgtttacgtctgtaacttccataataataagaagagtccacataagaatccagtaatgctgttaagcttacttttcgtccttgttcctttaattgacgcgtcatttcgaaagccacaattccgccaaaagaaaaaccagccaaagcataaggcccttttggatttacttttataatagcatcaatataatgagcagccatagcttcaatggattcgtaccaaccatcaaaacctttgggtttaataccctgaatggcataaataggctgatcttcatcaaagtgtttactcaaattgataaaatttaaaacattaagcccagctccgtgaatgataaaaagaggcactttatttccgcttgggcttataggaactaaacaatcagaataaatttcggtacccgtattcagcagttttgcaaatttctcaacagtcgaatatttaaataatgccgatagaggaattcgtataccagtatatttctctatttcgatcatgacttttactcctttaatggaatgtcctcccatttcgaagaaatcactaaaaatatcgatattctctaaaccaaggctttctttccaaatagcagccacaatattttcttcttctgtgcggggagcagtatattcaagtattttgcttgttttatattgtgataatgctttacgatctattttgccgttaagcgttgttggtattttatccaataaattaaaatcatgcggcattaattgtgcaggcaaacgtgcagccaaagtttcgcgccataaagggatttgaatttcggcatcctctatacgggaatcaggaacaacatgagctataagaaagttttcattagctaatacaacagcatattttataccgtcaagctgcagcaatgcgtgttctacctcaccgggttcaatacgctgtcctctaattttaacctgttgatccagacgtcctaaacattctatttcattgcttggaagtaatcttcctaaatcacctgtacgataaatgatgtcgtctttattagtagaaaaaccgtttttaataaatttttctgaggtaagttcaggtctgttccaatatccttttgcaacaccatcaccgcctatggcaatttcaccaaccttacccggagccacaagctgtccttgttcatcaatgatataaatttgtgtattggcaataggcttaccaatagttattaaagtatcatcggcttttacttgttttacagcagaatatatcgtggtttccgttggcccataaacattccacagtgtattacatttacttgtaagttctctggcaagatctgctggcattgcctcaccgccgcataatgccttaagcggtaaaggttcatcccagccagaatccaaaagcatggaccaggttgtgggagtagcttgcagaaaactaatatttcccttttttactaattcaagtaaaagtcgtccatctctggcagtttcctgatccgcaagtattaaagttgcacctatagtgagcggtaaatacagttccagaccagcaatatcaaaagagatagtagtaatcgaaagcaatctgtcgtttttactaataccgggttctaaagtcatactacaaagtaggttaactaagtttttatgcgttataggaacgccttttggattacccgttgatccagaggtgtagagtatatacgccatattatcaggactcacaacagaagataacggcgatgcatcataatggtttaaggattccatagcatcttctataaaaagcgtttgcggccatgatggcaaggatgcaaataatgttttactggtcaataaaacttttgctccagaatcagtaagcataaattctaaacggcctttaggatattcaggatccagcggaagataagccgcaccacactgcattatggctaacaaactataaagcagttccggactgcgcgaaacagaaacagcaataatatctccggactgaacgccttgtgcttttaaataatgggctaattgatttactttttggtgtaactccagataagtagtttttgtttcatgaaattctaaggctatgttggttggcgtaagttcagcttgtttttttaataactcggttatggaaacatccggataagatatttcagtattatttagagcttcataatcagctaaataatgacttccaaggatgtctgataaaggcttatctgcaccagttattaatttatggatgatatcttcaaaggtatgcatcatttgattgatcgtttccggcttgaataaagtagtattataagaccattgaaatataggcccttttttggttctaaaaatatgaagctgaatttcaaaagttgcatattctctcgggttaaccttaaattcatgggaaagttccgcaaatgaaaaatcgctttctatatcccgattcatatcggctgttaatacagctggcaccaaaggaattctggaagaatctctggcaatagccaaacttttaagaagatgtccaaaacttacctgctgattttcgtaggcatcaaataattgtgaatttctttgttttaagtattctaagaaagtaatatcgggattaattttactgcgtaaaggaagcaggtttgcacaatccccaatcaattgtttcatgccatataatgtatttcccgatgaaggaaacccaacaactaaatcattctgacccgtgattttgcataaaaaaacttcaaacgcagcaagcaaagtggtaactaaactgcaattaacacttatgcctatattttttaaggaatcggtcatggtattatcaaaaggaaaatcaatacgattgctattataagttcgcaaagaaggtcttggataatccagtggtaattcgattgtagga

SEQ ID NO: 2649 - DNA, 23390 bp, synthetic construct
  misc_feature 1..23390: note = Synthetic
  source 1..23390: mol_type = other DNA
ttcccttttttaccatgtctttgtaatctaatttttacaggcataataattaattatttgaggttctcgacctcggttattaataagggcgcaaagataattaataattaacaattaacaattaataattggacttttcttaaaacaataaacaaacaggactgggcacttttacctcatttaaaaaagagagttttcctgttggggtatcaactttaaaaacagtgatattctgacttctttgattggctaccagtaaaaatttcccggttgggtctaacgtaaaatttcttggccaatcaccatgaacaggcatggtttgaattttttcaatagtgccatctattttatttcttttatagacgacaatggaattttcgcctctgtttgagccgtataagtaaagttcattttttgacaaatgaatatcggcgcacgaatttttccctttatagttttcatctagggttgaatcgtaatcaatctgttcaaaaccagtatctgttcttttaactgaagttactgaacttccatattcatttataatatagataaattgacctgtttttgttatggcgaaatgtcgagggcctggatttccttccatctgaacaatgtctggtaaggctaattcatacgtgtcattttttaatttgtattgatacaaggcattcatacctaaatcggcaataaataattcgtctttaaaaaattgtgccgaatgtgcatgcgattttctatctgccgtattataatcaaaaacctgtgacgcttcattgagttttccgtcccttgcaatgttataaatggaagcagtacctccaccatagttggatactacggctttgtttccttgtctgtttaaagaaatatgacaaggccctttgccattactatctactttatttaaaaattgcaactgaccattttcttgaattttgtatgcggaaacgaagccctcaagactttcgttgacggcatacaaatactttttgtttggtgaataggctataaatgatgggctttgagtaattcctgctaattgtaaattactaagttccccagttgctgggttaaattctaatttgtaaatgccttcactagtgccatcggtataggtgccaatgtacagtggaatattttgtgctttactgcttaaaaacgacatcgctaagcctaatgttaaaagtttaatgctcatggtattttgtttgatagtttcaaaaatagggtattttaatttaaaaaagtatttggtctttgttcaaaactcttaataacttcaattcaaaaaagcataaattctatgtaattttataaacttcgtttaaaatctctaaacgacttaacaacaagcatctaaaccaaaaaatgtatttaattttcgataccgaaaccacaggattgccaaaacgatgggatgcgcctattaccgatgttgataattggccgcgctgtattcaaatagcatggcaattacatgatgctatgggtaattgtattgaacatcaagattatttggtgcaaccagacggatttaatatcccttatgatgccgaaaaagtgcatggtatttcaaccgaattagcccaagaacaaggtattccactagctgaggttttagaaaaatttaatgaagctttaagcaaaaccaaatttgtggtcggacaaaatgtgacattcgacttgaatattatgggggccgaatttgtacgtgaaaatgttgcaaacccactacaagaactccctgttttagatacttgtaccgaacataccgcgagtttatgccaaattccaggcggacgctatggaaagtttaaattgccaactttaacggaattacatgagtttttatttaatgagccttttgctgaagcacataatgccacagccgatgtggaggcaaccacacgttgctttttggagttggttcgtttaggggaatataccaaagaacagctcgatgttcaaccaaattattttaaggattttaatgaagcaaatccgaaaacgattcaacttatcggattaaagcatattaacctaaaacaagaaagtgctaaaattaaagagcgtcttaaaaacgttaaggttgaaactatttctactgaggacataaaacaaaatatatctgatttagctgatgttgattttgttcatcttcacaaccattcccagttttcggttttgcagtcaaccataagtattgatgatttggttgcggctgctgcagaacacaacatgccagcggtagccttaaccgatcatgccaatatgatgggggcgtttcactttgttaaatccgtcagtaatcataatagagcagtaaaagcaaaaaatgatgccgctatagaaaaagcagaaacgccaacagctaaagaaatcaagcccattttaggttgtgagttttttgtctgtgaagaccataccgataaaaccagaaaggacaatgggtatcaaatcgtatttttggcaaaaagcaaaaagggatatcacaatctggctaaattgtcatcacatgcttttgtagatgggttttattatttacctagaatcgatagaaatctcattcagcaatacaaagaagacctgattgttttaacaggaaatttatatggcgaagtacccagcaaagttttaaacgttggcgaaaatcaagctgaagaagccttgctttggtggaaagaacagtttggcgatgatttgtatattgaacttatgcgccataaacaagaagatgaaaatagagtgaattcggtgctcatagagttttcaaaaaagcatgctattaaattagttgcgacaaacaatacctattatcgcaaaaaagaagatgccaacgcccatgatattttactatgtgtaaaagatggcgaaaaacaagctacacctattggtcgcggtcgcggataccgatatggtttgccaaaccaagattattattttaagtcttcggaagagatgaaagccttattcaaggatttgcccgaagcaattacaaatattcaggaagtcgttgataaaatcgaaacgtatagtttggctagagaagtcttactgccggcctttgacattcccgaatcgtttaaaaataaagaagatttggttgatggcggtaagcgtggtgaaaatgcttatttacgtcatttaacctatcaaggagccaaaaaaaggtatggtgaagactttcctgatgatattaaggaacgtattgattttgaactcgatgttattcaaaatacaggttatcccgggtatttcttgattgtagaagattttattcgtgaagcccgcaatatggatgtttcggtggggccagggcgtggttctgcggcaggttcggtggttgcttattgcctatggattactaatattgatccgcttaagtacgatttgctttttgagagattccttaaccccgaccgtatcagcatgcccgatattgacatcgattttgatgatgaaggtcgaagcagggttatggattacgttatcaaaaaatatggaagtaatcaggtagcgcagatcattacttatggtacgatggctgctaaatcgtctattcgtgataccgcacgtgtattggatttaccattatttgatgccgatagaattgccaaattaattccgaccatgtccaaactagatcggatttttggtttaaccgaaaaggaattgaacagcaagtttcggtctgaagacttagataaaatcaatcaattattaaacatttctgaaggcgatggtttggaagccgaaactgtaaatctggcacgcatacttgaaggttctgttagaaatacaggtattcatgcctgcggcgttattattacaccagacgatattaccaaattcgtcccagttgccaccgcaaaggattccgatttatatgttacccaatttgataactcggtcgttgaagaagccggattgttaaaaatggatttcttaggactgaaaacattgaccttaattaaggacacggttaaaatagtcaaggcaaaacacggcattacattagaccctgataattttccgttggatgatgataaaacctatgagttattccaaaaaggtgaaactgttggtgtgttccaatacgagtcgcccggtatgcaaaaacatcttaaagatttaaaacctaccgtttttgaagatttaattgcgatgaatgcactctatcgcccgggacccatggagtatattcccagttttgtccgaagaaaacatggtgctgaggtgattgaatacgatttacctgccatggaagaatacctaaaggaaacctatggtattacggtgtatcaagagcaggtgatgcttctgtcgcaaaaacttgctggatttacaaaaggtgaagcggatgtattacgtaaagccatgggaaaaaagcaaatttcggtactcgataaaatgaagccaaaatttgtagaacaagccagcgcgaatggtcatgatgccaaaattttggaaaaagtttggaaagattgggaagcctttgcgagttatgcgtttaataaatcgcattccacctgttatgcatggatagcctatcaaacagcatatttaaaagcgcattatcctgcggagtatatggcagcggtgttatccaataacatgaacgatattaagcaagtcactttctttatggaagaatgtaagcgtatgaagttacccgtgcttggtccagatgtcaatgaatcttattacaagttttcggtaaataaagatggtgctgtgcgttttggcatgggtgcaattaaaggagtgggtcacggtgccgtagtaaccattgtggaaaatagaaaaaaagaagggccctataaatccattttcgactttgctaagcgtatcgatttacgggctgctaataaaaaggcttttgaaaacttggctttagctgggggttttgatggatttaaaataacacatcgcgcccaatattttcatgatgatggcgatggcattacctttttagaaaaggcgattcgctatggcgccaagcatcaagacaacgaaaactcggcgcaggtcagtttgtttggtgatgccagtgatgtgcaaatagcagagccacaagtgccaccatgcgaagaatggggcacaatggaaaaattggctagggaaaaagaagtggttggtatttatatttctggtcacccgctagatgattttaaaattgaaatgaataccttctgtaatgctagtttggctttgtttaaggatttaaatgcatttgtaaatagagaactggtttttgggggcgtagttaccgatgtgcaataccgagtgagcaaacaaggtaaaggttgggcatcatttactgttgaagattataccgatagttttgagttccgcattttcggagaagaatatctaaaattcagacactttttaatgaaaaacaattttgtgttcgttaaaacattgattcgtgaaggttggataaacaaagaaacaggtaacatgagtgaaccccgtttgcagtttaatagtttccaattgctgcacgatgtgatggaaaattatgctaaaaaattatccattcaacttaatattgaagatttaaaagcggataaaatagcgcaattaaaagatttaatgcacatgcatccgggtaatcacatgcttaattttgtaatctatgatcataaagaacaaataaagttacaaatgcccagtagaaaacaaaaagtgaaaatctcacaagaattacttagtgaattggagaatcaagaggtgtattttaagcttaattaattttatcctcaaattcatgacaatcaattctaatttcagagtttaataattctttttctaaaagattgcaatagtgggagtttaagttgttgttatagaatttacatgcataacatgttctttgtacggttaaaataccatgtctattaagctgataaataaaagtgctcaacgctttaaaaagggtttccagatcagatggatgaatgctacttaattgtttttttaatggatatgcaaagttttcggtattggaaactatgtttactcctgaatcggataacttaatggtataacttctgttgtctgatgatgaatggtccttttcaataaatccttttttatccaaagatctaatggcatcgctaatggtaggttttgatacattaaattcttttgctaaatgactcacattgcacaatgccggtttatggtaagcaataaaaataagtatttgtatctgtatagggcttatgcccaatgcagtcgctttttcccatagtaataccttgaaagcttcagaaatgcgttctaagccagcaactattttgcttgaaaggtctgtttcttgattctgtgggtcaaacacattattttccataaaaaatgcctgccaacttaataatattgacaggcaaagttagtaatcctaactttaaaaagcaaaaattaaccttttacagcctccatagaagccccaaaattgagatgtaacacatttccttttggtgtaagcaaagcgggaaccgatttaacacctactttttcagcttcagcaatttttgaattgttctctcctagatggataatttcaacgttatcggcacctattaattcaacaatgtcatgttctgcactaatacatacaggacaacctgcatgataaaaaatggattttttcattttaataaaatttaatttgttgcattattgcattacaaatatagtaaggaatcctaactataaaaatattttttttgtttttttgatctcattatttaagcttttctgatttacctaatacagaaaactcattctttgcaaaaaagaaaagtataaaactaacagtctgatatatttataaaaaagggatccccaaattagcataacgctaaacaatgcggttataagtaaaacaaattgttagcttgtaagctttagagttttttttgactaaatttgtgttttaaaattaaaagtcgaacacgtaaaatataaatattatggcattagaaataacagatgcaacatttgaggaaacagtattaaaaagtagtaagccggtattggttgatttttgggcagcttggtgtgggccatgtagaatggttgggccaatcattgaacaaattagtgaagaatacgaaggcaaagcggttgttggaaaagtagatgtagatgccaaccaagaatttgctgcaaagtacggggtgcgtaacataccaaccgttttggtgtttcaaaatggagaagttgttggtcgccaggtaggtgtagcaccaaaggcggcttatacagaagctattgattcgcttttataatataaatgaaaaaagaaaattgaaaaggtttgccattatggtaaacctttttttattttagttaaaaattaatagattatgagtaataaagtaaaagttcaaaacgctatagacagtaagttattagaacaacgtaaaatattcctttggggtcaagtagatgataaatcggctaaacatgtgatagatagattaatgtatttagatgctttagaaacaaaagatattcatttatacatcaatagcccgggtggttacgtgacctcaggcttttcagtatatgattgtattaaatcattaaacagtgatatttctaccatttgtacaggatttgccgcatctatgggttccattctcttgtctgccggaacaaaaggcaaacggtttattcagcctcatgcccgagtgatgattcaccaaccaagtggcggggcacgtggacaagctagtgatattgaaattacagcaaaagaaattatactaaccaaagaattaagtgcgagactattggctgaaaattgcggacaatcttttgaaaaaatcatgaaggattttaatagggaccattggatgggcgcacaagaatctgtaacatatggtatcgttgatggaataatttaagtctagcctaaaacgttataattaaggactaaacatacgaattaatggttgctcctcccctcaggggaggctgggtggggcttatgaatatacaaaacgaacttaataaagctgaaggatttaaaaacttggaattacttgcaaaacaagtggttgaaggttttatctctggcatgcataaaagtccgtttcatgggttttctgctgaatttgctgaacacaaaatgtacaatcaaggcgaaagcacgcgccatatcgattggaagttatatgccaaaacagataagctttataccaaacgctatgatgatgaaaccaatttgcgttgccacatcatcatcgataatagcagttccatgcattaccccgaactctcaaatttttcgatacagcatctaaacaaaattgcgttttccgctctagcatctgcatcattaatgtacttgtttaaaaaacaacgcgatgccattggtttaagtatctatagcgatgaatacgatttttatgcaccagaaagagggagcgaacgccatcatcaaatgttgcttaataggttgtccaatgtggtagtttcaaaacccataaataagcaaacggacacgtataagtaccttcatgaaatcgcggagaaaatccacaagcgctccatgatttttttatttaccgatatgttccaaaccactcaagaggaaaccaagctttttgaggcgcttaggcatttaaagtacaataagcatgaggttattttatttcatgtatttgataaagaaaaagaattcacttttaattttgataataccccaaaacgctttgtagatgtggagaccggcgactatatcaacctgtatgccgataccattaaggaaaattacacaactgcggtgagcacctattttaatgcattgcgtttaaaatgtgcacaatataaaattaattatgtagaggccgatatcaataaggatttcaataccatattgacgacgtatatgatagaacgccaaaaatttgtttagaagccccgcctagcctttccaaaggggagggataacaaactattggttttaaagttgtttattttatggtaaaagattataacatagcgcttaattaaaataaaattaaaaaacacaaaaaaacatttgccatataaaaaaaggcatgtatatttgcacccgcctgaacgattaagatgaacaatattttagtcgggcaggaccgcaataaagcaacggtctggtagttcagttggttagaatgtcgccctgtcacggcgaaggtcgcgggttcgagtcccgtccagaccgctaaaattgctaaagagctctgagaaattagggctttttttggcactttaaagaagttgtgttgtcccagtaaaatggggtggttgagatgctgaaataaattcagcacaagccgatggaaagctttccttttttcttttagaaaattgggatgcttttttgttttatggcatttccttttattttcctaaaaatataatgcaaaaaaaagtcccaccgaagcaggactaaagattttcatctacggcatatagccttatcatgggaagtttaatattaatacaactcacgactactcattacaatgatataaattcatatacttgtcataagttctacaaatgtaaaaaattaatttaaaaatattctactcattacatattaatttgtaatattgtgaaataaaattgaggataatgaattataatttaatagctgttatgatttttattgttgttttaataattctttactggataatacccagtagaaaaggagataaaataactcagaatataacctctttatttcaagtattgcctatatcaaaaatagttgaagtatttgtatcattgaaagaacaaaaaaaagccccaccgaagcgggactaaagattttcatctacggcatatagccttattgtgataagattaaagattagaaagtttaatctgtggtaaatataacaaaatttcatagaaaataaaacacttacttgtaggtatttttttatttaaatattctagttatatttaaatttttaaacgaagaattatggcaaagattttaggattggatttggggactaattcgattggttgggcattaattgaagatgctgaaaacaagattttgggtataggaagcagaatatttccaatgggtgttgagaatttaggggaaggtgaaggacgagaaatgtctaaaaatgctggaagaacaggagcaagaggagttagaagacaatttttcagaaaaagattgagaaagaaaattttattgaaggcactttccgaaaataaaatgtgcccaatgctgactactgattttgaagattggaaaaaaaccaagcaatttccatctgaaaaattagcaaattggtttgctttaaatccttatgaattacgccaaaaagctttgaatgaaaaattatctttagaagaaattggtagaattttttatcatttaattcaaagacgtggatttttgagtaatagtagaaaaggtggaaatgatgatggagcaatttttaaaggaaacgaaaaagaaggtaaaatcggaattactaaaacacaagaaagcattcaagataaaactttagggtcttatttatttgaaatttatccaaaagaaaatcaaccttttcaagatggtttggaaagaattcggaataggtataccacacgtaaaatgtacgttgatgagtttgaattgatttggaataaacaagctcaattccattctagcttaaatgaagatttaaaaacattatttggtggcagaaaattagatggttataaagaagatggtattttatttcatcaacgaccattgcgttcacagaaacatttagttggtaattgttcttttgaaccaaccaaaaccaaatgtccaattagtgccattccatttgaacaatttagagtttggcaatgggtaaatacagttgaatataacggaaagaaaatctcgcaagaagaaaaagagaaaatggtagaatttctatacgccaatgaaaagcctgaatttaagaagattagaaaagttattgggaaagaaagtgctgaattcaaattcaattataaagatgatgataaaattgtaggaacgcatactatttcaaatttatataacaaaaaattctttggtaaacgatggtttgaattttcagaaaaggaacaagaagatatttggcatgtattgtatttttttgatagcaaatctaatttaaaagaatatgccattaagaattgggattttactgaagaacaggcaaatgatatttcaaaattcaatgttaaagatggttattccagtttgagccgtaaagcaatatttaatattttgccttttcttaagcaaggatatacttatgatgttgccgtggttatgggtggaatcaaaaatgtttttggttctaagtggcaaaatgattccgacacaaataatcaaaaacaattagaaataattgataatgtggaaggaattattcgttccaaaactaaaggcggatttattgatattataaaagacattcttcgtaatgattataatgtttcagataatcaattacgcaaattataccatcattcagcaaccattgatgtaactgaattgttagaaaaattgccgctaggaaaggaagcggacaaagagattcaagcgataagaaatccaattgtaataacagctttatttgaattacgaaaattggtcaatgaactaattgaggagcatgggaaaattgatgaaataaatgttgaaatggctcgtgatttgaaaatttcaaagtcacagcgaaataaaatcagaaaagagcaaaatagattagaacgtgaaaatgataggataaaagcaagactattagaagaaggtcaaagaattacacatgataatatcttactttacaaactatgggaagaatgtaagcatgtttgtccttacacaggaaaaacaatttctgtacatcaattgttttctggagaagttcaaatcgaacatatccatccttggagtcgttctttaaatgatagtttttcaaataaaactttatgttacgctaaagaaaatactttaaaaggaaataaaacaccctttgaatattatggaaatgacgaagcccattggtcagccataaaagaaagagctttaaaattgttttctgacactaaagaatatccaaatgcgtatcaaaaattcaaacgttttgtacaacaaaaatttgatgatgatttttcttctagacagttaaacgatacaagatatataagtaaagaagctaaaaattatctttctaagatttgtaataaagtaatcgtttcaccagggcaagccacttctaatctttgccaaaaatggggattgaattctgttttaaatgttgaaaacgctaaaacccgtgaagaccacaggcatcatgccgttgatgcattggttatggcttgtacaaaagtgacgtatgttcaagaattgtcaaagtggaataggtataatagaaaaccagaattaaaagaatttccaatgccatggcaaaccttcaggtatgatgctgaaaaagctgttgaaaacatattggtctcacataagcgtgtttcaaatgatattacggttagaacccatataacagaaaagaatggaaaaaagcatataaatctaggaatagctgctcgtgggcagttacataaggaaaccgtttttggaaagcgaacgttcaatggagaagaagcttttcatgttagaaaaccaatagacagtctgactaacgaaaaacaattggaaaaagtagtagacgaaaccattaaattacttattataaaacgaatacaagttttaggcggttttgtaaaaggagttattcccaacaatactttctttattgttgatgaaaatggtataaagcaaccacaaattttcttgcctaataaaaacggtgaaccagtacctatattaaaagtaagggttaaagaaaatattggtggtgctgaaaaactaaaagacaatgtcaaccaatgggtgaatccaagaaataatcatcatgttttaatttataaagatgaaaaaggaaacttaaaagaagaagtggtcactttttggactgttgtagaacggaagcgaacaggagaatctgtatataaattaccaattgacggaaaagaaattataaccactttacatatcaatgatatgtttttgttgggtttaaaagaggaagaaattaattgggaaaatccagattatgaagttttgaaagaacatttgtataggatacaaaagttgtcttctaaattttatgaatttaggttaaatacagaagcatcaattcagaataattttcaacctttttatgtaagaatccaaagctttggagaaggaaaaacaggttgggacacttttaaccctttgagagttaaagtttcagtttcaggaaaaattaaaagagcataatttgtcattttaatgactatataaaaagttcattgacataagattttcataatcttaaacatctcaaaccacaacggaaaatctcccgattttctgccaacggattttacgttgtggtttgattaaagattagaaaacacgatattttaattttaattcgtttaaaatactgctatgttgtggtttgattaaagattagaaaacacgatatttagtaacctatgaaaccgtacaactattatgttgtggtttgattaaagattagaaaacacgatattaagatttattcacacaaatgagggaagtcggttgtggtttgattaaagattagaaaacacgatattatcaaactgtaattcagtaacattattaccgttgtggtttgattaaagattagaaaacacgatattggaatataggatagggctgttcaacgaatggttgtggtttgattaaagattagaaaacacgatattaatagccttgcgttgccacttgtatataacgttgtggtttgattaaagattagaaaacacgatattttatagttgctaattggctttcataaacatgttgtggtttgattaaagattagaaaacacgatattttattgaggataatattaacgaataaaatagttgtggtttgattaaagattagaaaacacgatattacaatgaattttattatcagatgatattggttgtggtttgattaaagattagaaaacacgatattactgctatgtaaaactttttaacatctgttgttgtggtttgattaaagattagaaaacacgatatttcgtggcgaaaacaatagttttatagaatagttgtggtttgattaaagattagaaaacacgatatttatatggtagttcgttattaggcaataactgttgtggtttgattaaagattagaaaacacgatattaacgccatcacatcggtataaccttccactgttgtggtttgattaaagattagaaaacacgatattgacatagaacagcaacgattgacaggggcgttgtggtttgattaaagattagaaaacacgatatttttgtcgtagtcatgtgtatatctccaggtgttgtggtttgattaaagattagaaaacacgatatttttataaatatctattaatggcatatcttagttgtggtttgattaaagattagaaaacacgatattagggcaggagttaataatatatctagtgctgttgtggtttgattaaagattagaaaacacgatattattgtaccttgtatttacaatgtccttgaagttgtggtttgattaaagattagaaaacacgatattatgcaccgaatatgcggtgatattagaccagttgtggtttgattaaagattagaaaacacgatattacatactcatccaaaggaatcattacacctgttgtggtttgattaaagattagaaaacacgatattcaaagcctctaacatttgttcgtccgttagttgtggtttgattaaagattagaaaacacgatattatgataagagccaaaacaggtacatttctagttgtggtttgattaaagattagaaaacacgatatttagatacacacacgcaaaacaaagctaatagttgtggtttgattaaagattagaaaacacgatattttttttcggtcttataacttaacctatttagttgtggtttgattaaagattagaaaacacgatatttgtcaagaataacaaatttagaattatatagttgtggtttgattaaagattagaaaacacgatattcattttgaagcacaccacgaagcattaaccgttgtggtttgattaaagattagaaaacacgatattgaatggaatggcgtaccaatgaacgctggagttgtggtttgattaaagattagaaaacacgatattattcctggtttacgctatgatgtgtatcatgttgtggtttgattaaagattagaaaacacgatattatgatgctggaatagaaaaataccctaacggttgtggtttgattaaagattagaaaacacgatattttttttttgaaatagtaaaaccaacttttagttgtggtttgattaaagattagaaaacacgatattttgttttctacaaatatgagtgatgcgtttgttgtggtttgattaaagattagaaaacacgatattgtgtgtgctattggtacagtgtagtgtacgttgtggtttgattaaagattagaaaacacgatattaaataaagtaaatattgaaggtgcaaacttgttgtggtttgattaaagattagaaaacacgatattgatactttcttgaaggatggtgcgatgtttgttgtggtttgattaaagattagaaaacacgatatttgttatcaataaagacacaggtgagctgtagttgtggtttgattaaagattagaaaacacgatattagaacttcaaacagatgttattcagtatttgttgtggtttgattaaagattagaaaacacgatattaaggctatattaaacaatgatatttcatccgttgtggtttgattaaagattagaaaacacgatattaattacacgatgaccttaaaggcagaccccgttgtggtttgattaaagattagaaaacacgatattattctgtggtttatacaacagcattgcctcgttgtggtttgattaaagattagaaaacacgatattagttggctcgttaccttctaataatcaatataatatcgtaatatatcgtaataaaaaatgcttcttttttgcagtgataaggcaagattgaggcattttttttattttaaaacaattccaattgtgtgggctgtggttctttgggtacttcagaacgaccccaaaagttcataatattaccaaattgtttatcggttattcttaaaacgcttactttacctaatgggggtaataattttttaagccgtttttcgtgtacatcggcactttcgctactggcacaatggcgcatgtaaacagaatattgcatcatggtaaatccgtctttcataatgttttttctaaaacctgcggcgtttttgcggtcttttgccgtatcggttggtaaatcaaaaaatacaaataaccacataagcctgtaaccatttagttccataattttggatattttatttttttgcgttcgccactatagcattgttgtaaagagctggcggttttttgcaaagccaccattaacggacttttttcgcttttaaaataaacggttcgggttaatatttgtagtagttctgcttttatttcagttgttaaatcctgttcatcataatgttgcataacataatgtacagcttcatcaactatcggcctgaaaggttccataatatcatccgccaaagcaaaagcattgtatttacttttatgatgaatccctaaagtattgagcaatccgcttcctgacaacgctctagcagttgcggctcgtaaaatagcatagccataattcaggaaattattaggataatcgccaaaacgttcacgtttaaaatctatgtcaaaaaatgatttccaataaaagttggcagcaacaccttccatatttgaggtgtcgccactcaatactttacttgataagtattcaaacttgtttttgttttgtgttatcttttctaataaaagtccttggtttttaattttttcaacaacggtttgttgccataattgtttttttaatggcgcactagcttcaatttgggttttaaatacttcttgttgaatgtggtggctatttaaatttaggaacatgccgtttggtacgtgggaattattgcaaataataacagatgcattattttcaacaagcaaatttagcgcaggaatactgatataaatttcaggattgtctataacaataaagccaatatcttcaatgggaatggttttgttggtgttttcagaatttataacaagctgttccaattttgaagttatggagcatttgtttgaaaatagcaatgttttttttagcatagttgattgattagtttaaacataaccgctattaatcaggtgctaaagagagaaattaaatataatgaatttagagagtaggtagctatttactcgataatcagttgttttgctatataaaaggcatctcttttcttcaatctgctgaaaaattgggatgcttttttgttttatacaagttttaaatgactcattctaattatcccttgcccgaacttattatatgctcaggaatttaaaaattcaaaagacttcttgatgaaataatgattacaaaaaagtttggcatctaaaccaaaatcaaataataatcgtaaatttatgatgtattaacccaaatccttaccctatgaaatacctatttttagttgtttttacattcaatttttatttggtttcagctcagatatcctttaacagcggcaatgtgcagttggattctgatctaaatattataaatactcaagcccgttcagatttaagttcttttagaaaagatcttatcttgtcttataatgtctcagaaaaaaaacttgattatatgggtgtgaatttaggcatggttcctggcgatatgtatttatctttagaaatctctagaatagcaagagttccattagatgacgttttaattgtttaccggaaacataaagcaaaaggttggggagtgatagcaaaacagcttggcataaaacccggttcggctgagtttcaccagttaaaaaatagagctagttcgaaaaaaggtaaaagccaagtaaaaaaacctaaaaaacaagtaaaagctaatacatagtttttctgccaaaattagttgcgttgttttttccggcgctttaaagcctgttaaatgcagtgaagttgaggttttcaattttataaaatagaaagctttcctttcttctttatagaagattgggatgctttattattttgtgcgataaaatataaatattattcatccaagtcagttaaataatagcatccatcttcaatctaaataatgtccaattaaaatacggatatattcaaatttgttaaaagttaattaaactttaaactatccactaaggctactattaaatataattttttgtatttttaacctctttcaaaatgtcaatttcagataaattaatgaaaaaatggaattttaatattttgagttcttaataaataagcaaaacataaaactaatataaaactaaaataaatgagtaatcaaagtacattttatgcaataaacgcggctactaacgaggagttagaagggccatttgaaaatgcaaccttagagcatatagattcggttgtaaatatggctacagaagctttcgatatttataaaaaagtagataataagaagaaagctgcttttttagatcaaatagcagatgaaatattaaacttaggagatgcgcttatagaacgatgtcatttagaaacaggtcttcctattgctagattgcaaggtgagagaggccgaaccatgagtcagctaaaactgtttgcttccttggtaagagaagggtcttgggttgacgcaagaattgataccgccattcctgatagagcgcctttacctaaagcggacattagacatatgttaataccattagggcctgtagttgtttttggagcaagtaatttccctttggcgttttcaactgcaggaggtgatacagcttctgctttagctgcgggttgcccggttattgttaaaggacataaagcacatcctggaacttctaaaatggtagctgatgctattgcaaaagctatagatatttgtggtatgccaaaaggaacgttttccctaattcttgggaatgctagatctgtaggagaaactttagtaaaacacccaggtgtgaaagcggttggatttacagggtcgtatggcggtggtaaagccttatttgattatgcaaatgcacggcctgaacctattcctgtatttgctgaaatgggcagtacaaatccagtatttattctaccagaagcattaaaagaaaaaggtgaagatattgctgcgggcatggcaggatctattacactgggagtaggacaattttgtacaaacccaggactttcctttgtgcagaaatcggatgaccttagtaaattctataaccaattaaaacttaaaataagtgagtcgcctgcaggggttatgttgacaccagaaatcaaaaaagcctatgataaaggtattgaaagaaccttaggaataggtaatgtagaagaattttccgttggattgaatggggattctccaaacgcaggtactccaagagtttttaaaacatctatagagaattttaaccaacatgaggatttatctgaagagaactttgggccttcaagtgttttggtagaggctaattcaaaaagtgagattattgaagcagccaaaaatttatgcggtcatcttacagcgactgtttttggaacagataaagatttagaggagtataaagagttgtttgatattctaccaaagaaagttggaagaattattgtaaacggttatccaacaggcgttgaagtttgccactctatggttcatggtgggccatacccttcaacaactgcacctcaatccacatctgtaggaactggagccataaaacgttttgttagacccgtttgttttcaaaactatccaaatgccattttgccaaatgagttgaaaaatgaaaatccattaaatatttggaggttggtagatggagattttaaaaattcaaaaatttaattttatattataaatattgttgaaaaggctctaatttttagagcttttttcgtttcattaaagttgaaatctttttttggaacccaattttatcaattttttgattaaatgtcatttccattttagagtgtgtttcgttagattatttcagtaaattttgcagaaagattcatttaaagccaaataaggtaaagtaaaagtgaatttttattgtttttatttgttgtcttgtaaattaaaactatatttaaatatagtttaatcaaaccaaaaatctaaatatttattatggaaggatattgtgtaaaatgtaaagacaaaaaagagatcaaggattctgccgaagtaaccatgaaaaatgggagaaaagcaatgaaaggtaaatgtcctacttgtggaactgggatgttcaggatattaggaaagtcttaaattaaaagtaaaattaaagggaagttatttaacttccctttaattttactatcccttaagccacgggtttgtaaataaatattgtgagcgctaaatcaacactactgtttttcatctaacaaaattgagttttgataaaattttgtaggtgaatttttcttcttctaaaacaattgtggtcttttttttaaatagaccatcctctttattttaattaccaccaataataatcaattcatattcatcgattacgttttggtaagtagttttttggatttgctaccatgatggcaacatctatcttctcactataaggtgctttaaataccatagtttgaatttctgttttccagaacatcttacgtttgctttctattttactaaaacgttaaataatatttttattaatggaacacataaataatcaagattttttattccttttaaataaacttctttagtaagattttctttatttttttgattttttttacattattcaacattaattgtaatatatgttatacaaaataaataatattttgcattttatcttgttttaatgcattttatcgatttatttttttatcttgccacactttaaacccccaaattatacgtttaaaactacgccatggtaaaaacaacctataagtacatagacttaaattctttaagggaaaatacatttggtaatgtacccatagaaagggaaatcatgcatttatttattgatatggttgatgattatatctccgttttagataaggaactgcccaataaaaactggaacctgctttacgatgctacccacaagattaaacccaatattagcatgtttggtatttatagtatggagtctaccatagtagaactagaaaacagctttaggaatgaagtgaatcttgaaacaatcgaggaaacagcctatggtgtcttatgtgcttttaaagaaataaaaaaagaagtacagattgaacttaatttaatggaaaatgaataaaaagaaaatagttttagctgaggataactctacactttcattgctcctaaagttcaggttggaaaaagaaggctatgaattatttgttgccacagatggtaaacaagctgtcgatcttatagaaagtatgagtccagacctgattttatctgatattatgatgccttttgtaagtggccttgaagttataagccatttaagaaataaactcaatttaaatacacctattattgttttttcctctgcagggcaagaagaaatggtacttaaggcttttaatttaggagccaacgacttcatggggaaaccatttagtcctaatgaattagttataagaataaagcgactacttggaacgtagtcatcagttagtttaatttttatctgaaattaattttgccccaatggttgattatcagtatatctatgattattacagtaatgcccctcatttaattcaatgggtatggtgggttagcgctatattggcaacaggtatagttgtactggctatttgtcttaaatttattaggtcttcgcttagaagaaagagcaatgaggctgcaaaatttaaaacagaatatgaagcacttttaattgaatatttgtattcgggagatgaatcgggtaaactcaccgagcctcaaaaattaatagttagtaaaataaaggatagtataaaaactgggtttaaacgaaaactcatagtttcggttttatacaatttaaggaatgaggtttcaggagaaatgtctgattccattaagacgttttactatgaaacgggacttattcattttgcttttgaacgtttaaaaagtaaaaaatggaacatcattgccaaaggaataggtgaattgagatgttttggaattgatgaagccagtcatgccattgcgccatttataaatcaccctaaaagtgaagttagaagtgagacccatctttatatggttaacttatttctttttgaaggactttcttttttagatgatttaaaagtatccctctccgaatggattcaaatacaattgcttgaaacattacaaaaatttgataatcaagaaatatgtgatatacgcccttggttaaattccaaaaacgattcagtcgttttatttgcacttaaattggcacaaatctataatcagtttgaagttaaggaaactttaatggatttattatcccatgataacaaagaagtaaggataaaaactatcgatgtgttggcccatttatatggtatagaagcaaaagaaatgcttaaagcaaactttaatgaactaagtttagaagagcaaataagtttcttcaagttacttgaaaaattagtggcaccagacgatgaaccctttattgaggcttatctatttcacaagaattttgaaattcaactattggctcttaaaattttgaaagaaattaattttgataaatatattggtcttacaaaatcgtcaaatgataataaaagcttagccatggttaaagcggtaaaggtgttataaaatggatacaagttcggttaaaataatattacagatacttcattacctgttttttggatatgcttttgcatctatcctttcctatataattctatctttcatatcaagtaaagagaccatagaatatataaaaaagagaagttttgttaattacaaagatatcttgtcttctacaatatctccttccataacgattattgcgcccgcttataatgaaagtttgaatattgttgaaaacgtaaggtccttgttgtctaatcattatgtaaact

SEQ ID NO: 2650 - DNA, 23387 bp, synthetic construct
  misc_feature 1..23387: note = Synthetic
  source 1..23387: mol_type = other DNA
gcatgatagggcagtgctacatttttttacaactcaacaacaacaaaattcatattttaatttattaaaaaaaataataaaaccaaatgggtacgtaattttggctgaatttaatttagaaggtgccaaaaaatgtagtggtttagatgtttttaactacaatgaaaaaatgcttcatgaacgattaggagaagactttgagttattaaaatcttttaattacacttatacacaaccatcaggaggtttacgtgaatatgtgtacacattgtttcaaagaaaaaataaagattaatgaaagtacattatattccttttcgaaaaacggattatttttcaaatttgatttgtgattatatagaaaaaaagtcaagcttaaaaagcttttaccaagaatatccagatttaaaagggtttagcagtcaaattaaattaaaacaagactcttttgaaaatgaaaaaagaaaggttttagtaaactcacttttaaaacaaaataaaggtattgagataagtgatttaacagctcaaaatataaatattttaaaaaattcaaatacatttaccataacaacagggcatcaattaaatatttttacaggtcctttatatttcttgtataaaattataactacaattaatttaacaaaagttttaaaaaaagaattcccatcatacaattttgtacctgtatattggatggctacagaggatcacgattttgaggaaattaattattttaattttaaaggaaagaaaatttcttggaatatagaaagtaatggcgctgttgggaggttggaaacaacaggatttgatactgtttatgaagagttttctaagttgttaggagattctgaaaacgctacttatttaaaagaattatttaagaatacttacttaaaacatcgtaatttatcaaaggcaactaggtttttagtaaatgaactttttggcatgtatggtttggtaattattgatggtgatgatattgagttgaaaaaacaatttattccaacaattaaagatgaattgttacataaaacgtcatttaaagaagttacagctaccaataccaagttagaagaaaactataatatacaggttaatccaagagaaattaacttattttacctcaataaaaacttacgagagcgcattgtttttaaaaacaataattacttaataaataatacgaatattgttttctctaaaagtgaaattttaaatgaagtctcaaaatatccagatagatttagcccaaatgtaattatgcgaccattgtaccaagaaactattttgccaaacctttgttatataggtggtggtggagaattggcttattggtttcagctaaaaaaatattttgatactgtaaatgttgtttttccaattttattgttaagaaactctgttctgttaataactgataaacaattaactaagataggtaagttgcatataactttaccagaattatttttaaaacaagaagaacttatttccaaaaaaataaaagaaatttcagacattaatatagattttactcatcagaaagaatttttacaacaacaatttaatgagctaaaagaattagcaaaacaaaccgatatttcttttttaggagctgtaaacgcacaagaaaaaaagcagctaaatggacttagttatttagaaaaacgacttttaagagctcaaaagcgtaaactttcagatattgttgaaagaattaaaatattacaagataatttatttccaaatcaaagtttagaagagagaacacgtaatttttcagagatgtacttaaaattaggcgatcaatttataccaatgctaattgatataatgcaacctttacaacttgaatttagtattattgaatattgagtttatttagtaaattatgaagcgctcggaatgttttaaacaggcatcttcaaaaattaaaagatgaaaatattattaaaatagatagaaatcatattaaaataaaaaatacggaggctttactgaataaatttaaagaaggtaacaattgattataagattatattattaattttgcaggctataaattaattttaacaagaacagggcagtgatcagaccccataagtgctgaaagtatttgtacagagttaattttatcgataatattttcagtaactaaaacataatcaatacgccatccagtatttctagctctagcattaaagcgataactccagtaggtataggaaatttcattaggatgtagatatctaaaagagtcaataaatccattattaattagggtttcaaatccgtcaatttcaacttgggtataaccagcagttttattatagttagacttgtcgttttttaaatcaattgagcggtgagcaacattaaagtcaccacaaacaataacgggttttactttttttaagtttttcaagtaagttaaaaaatcagcatcccatttttttctatatgttaatcgttttaattgctgtccagaatttggaacgtaaacattaactacataataatttgtatactcaatacattgtattcttccttcagtatcatgttcatcaatccccatattatttactattttgagaggttttttttgcaaagtattgcagttcctgaatacccttttttttcagctgcattataataaatgtgataagtacttgccaaaggagtaagagctttttcaacttcactattttgagctttggtttcttgtaagcaaagtatatctgggtttaatttttttatggtatcaaaaaaatcttttttaacaatagctctaataccgtttacattccaagtaattatattcataaggtaaatatataattgaactaaattaaataaaagaaagaatattaatcattttttttaataaaactatttctataaaaaacagaatcgaatctaaataacatctttcactttaaaaaaagtgttaaaaaaaattgggaggtactaattgctattgatgatttcttcaccaagtttaaagaaaagtattttgatattgaagatatggacagtgcctgggaatggcttagagaagattaaatgaaataattttatttttaaaattatattgaatttcaattactttttgagtcctaattttatcagcttcatcatcattcagttcaaaatcaatctctgtaaaatagaagggtgtattttttatttgatttgattcaacatcagtattatctgaatttagtgttaatgtatcattttcaaaaataaatgtaagtgtacacccaactcttttgatttttgttgaaaataacccaataataactgttttgataaaaggaaagcctcctaattcttcaaaatctaagtacatatcatccgttttattttcagcatattttgtagcaccatcaaatttaattttttgaatttcagtaggtactacctttttcttagattttaagatatttgaaaatgaaaaagccattgtgtttttaaatatttaattatgataagtttgattatgagctaaatctgctccgcaagaagtgcatttacttgcagaacctgatccgccagagcagccgttaggacaggtgtagtgataaacacctaaagcattttgagcaggtgcaggtgtgttacttttaggatttgctcctaaaccaactttaggaacatttaatggcccattttttaaaaactcatcattatgaaaagcaggattatgtgtatatggggtattacaagttgcacaaataccagcagttgatccaccactatttgcacacttattcatacaaatataatgttttactgtagcagttattttattttttgaaggttgagttttaggtttatcttctttgcaagaaaatgtaattgcaattattaaaactaaaattaggtgtaattttctcatatagataatgctacttaataagtttcaaatatagtataaaattataagtttaggaactaaagaattaggactttgataattaaaaaagatgttgtttaaaaatacaattgatttcacactgtacttcgattgggctcagtaagtggttattgagtgtagtggaaatagaggttcttataataagcactaatttgactggtgagattctgaattaagttcagaataacaaattttgtaaaaccattaaaataaaaaagcccaaacaattaagtttggacttttaaatatttatgtatcttattttataagtgaattacttcatcataagcatctgcaacagcttccataactgcttcactcatagtagggtgaggatgaattgtctttaacacttcgtgcccagtagtttctaattttctacctaaaacagcttctgcaatcatatctgttacaccagcaccaatcatatggcatccaagccattctccgtattttgcatcaaaaattacttttacaaacccatctggagttcctgcagcttttgcttttcctgaagctgaaaaagggaattttcctactttaagttcgtaaccttgctcttttgcttgtgcttcagttaaaccaacacttgcaatttcaggagttgcataggtacatcctggaatatttccataatcaatagtttctgtaggtaaaccggcaattttttcaacacacgtaataccttcagcagaagcaacatgtgctaaagctggacccggaaccacatcaccaatagcataataacctggaatgtttgtttggtagaaatcattcaccaaaattttatctctatcagttataataccaacatcttctaatccaatattttctaagtttgatttaattccaacagcagaaagtacgatatcggcttccaaaattacctcaccttttttagttttaacaacagcttttacaccatttcctgaaatatctatagattcaacagaagcattggtcattactttaatttttgattttttaaaggaacgctcaaattgttttgaaacatcaatatcttctagtggtaccaaatttggcaaaaattcaacaatagtaacctcagtacccatagcattgtaaaaatgtgcaaattcaacgccaatagcgcctgaaccaacaacaatcatctttttaggttgtttaggtaaagttaaagcttctctatagcctataacttttttaccatcttgtggtaaatttggcaactcacgagaacgcgctcctgttgcaattattatatggtctgcactatattcagtaacatttccatcagtattggttacatcaacttttttgccagttttaatttttccaaaaccgttgataacatcaattttattctttttcattaaaaattgaacgcctttactcattccgtcggccacatttctacttctttttataacggcattaaaatctttatcaatagcttcagcttttaatccataagcatctacatgctttaaataatcatatacttgagcactttttaatagcgctttagtaggaatacatccccaatttaaacaaattccacctaaattttctttttcaactacagcaactttaaatccaagttgtgaagctctaattgcagtaacatatcctccaggaccactaccaataattataatgtcgtatttcatgatttttttggttttaataagcttattcaagtaacaaatttaataattatttatttttaacgtccttctttttaatttttaaacgaaaacgtttacattctttcaggaacattgattcctagtaatttgaaagcagattttataactgttgcaactttggacgaaagttgtgttctaagtattttctcatttttattttcgcaacctaaaataggaacactttggtaaaaagagttgtattccttcactaaatcataagtgtaattagcaattaaagccggactatggtttttagcagctagttgaattatttcgggaaataataataattgtttaattaatgaacgttcttttgggtgtaaagaaacttctacttcatttaacgtagcattgtaattaaaagtagcttttcttaaaatagattgaattcgggcataggtatattgaataaaaggccctgtattacctgcaaaatcaacagattcttcagggttaaataaaatacgttttttagggtcaacttttaaaatataatactttaaagcacctaaaccaatggttttgtaaagtttagatttttcttcttctgaataaccttctaattttcctaactcttgagaaatatttttagcagtattggtcatttctagcattaaatcatcggcatcaactacggtaccttcacgagatttcattttaccacttggtaaatcaaccataccataagataagtgatagcagttttttgcccagtcaaaacctaatttattaagtattaaaaaaagcactttaaaatggtaatcttgttcgttaccaacggtataaaccaattcatctaaatcgtaatctttaaaacgttctatagcagtaccaatatcttgcgtcatataaactgcagttccgtcagctcttagtacaattttttcatctaagccttcttctgttaaatctatccaaactgaaccatcttcttttttataaaaaacacctttttctaatccatcagcaactacattttttcctaataagtaggtgttactttcgtaataatttttatcgaagtttacacccaattctttatacgtaattgcaaagccatcatatacccattgattcatttttttccaaagtgaaacaacttcggtatcacctgcttcccatttgcgaagcatttgttgagcttcaattaaaattggagcttgttttttagcttctgcttctgttttaccttcagaaattaactgattgatttcttctttatatgctttgtcaaaagcaacataatagtttccaactaatttgtctccttttagtccagtactttcaggagtttcaccatttccaaaacgttgccaagccagcatacttttgcaaatatgaattcctcgatcgtttataatttgtgttttatatactttttttcctgatgcttttattatttcagcaaccgaatagcctaataaattatttcgaatatgccctaaatgtaatggtttgttagtatttggtgaagaatactcaaccataacggatttttcagttgcttttggtaaaacaaaaccaaaattggaagttttataaattgtattaaaatttgaaagaaagtatgcatctgtaattacgaggtttaaaaaaccttttaccacattaaaacctgatatttcttttacattttcttttaagtattcgcctaatttagtgcctatttcaacaggatttcctttaataaaacgtaaaaatgcaaaaataacaatggttatatctccttcaaaatcttttttagtagcttgaaattcaacggactctatagctaccccataaatttcttcaaatccttttttaacagctgtttctaaaatgtgttgcatattttttgtgctcaaatattttgaagtgcaaaagtagtaaattcaatattgtttttactgttttataaattcaaattctgtaaaatcaaaatcaggattaggaacatcaatatgcagtatggctacttttccatttttatcaatatcaaaccacagttttccttctggtagggatgataaatttttattaaaattaaaggtaaaaatattaccattccaatggtttaaattaccataaaaaatagatgttttatccatggtaaaatacaattgcttattttttaagctaatggttaccgttccgtacattttatctttgtaagtccctgtataattttcaaaagctaaatgttttgaatttaatttccctctcaatgcactatctttaagttgcttatttttggtaatgctatctctcctagttttataagataagtataatgcagaccaatcttttttgttggttttacccgttaaaagaacgtctaatattttattggttaaagcacttgtagcccagtttaatgaatttgttaaaattacaactcctatttttttctcaggaataaaaaacgatttagaaatcataccatcgtaaccaccaccgtgtgatacaattttatagccttcataatcttgcaatccccaacctagcccgtaggatttaaaatgaattttttcatcattacgatttacattaaaattagtatgcggagtagttaaacgatttaaactcttttttgaaaagtattttttagaagctattgttcctttattaatattgagttgtatccattttgaaaaatcatttaccgaagaaataattgctcctgcaggagcaatattatcccaattcacccattttaattcaatgtttttcccgtttttataataatagggagttgcaatattattggtgtgttttagttgagaagttgacgttaaagttctactcattcctaagggattaataaaattttcagttacataattttgccacgatttacctgaaagtttagctaaaatttctccagctgttaaaaaagcaatgttagaatagccatatgcagttctaaattcggagattggttttaaatattgttgagctgtaataatttcttgtggtgtttttgaagttccataccataataaatcaccactaaatgttgctaaaccactgtggtgagataataagtcttcaattgtaaaatgattggtaacataagcattgtacattttaaaataaggaatataatctataaccttatctgtccattttaatttcccatcttcaaccaacttagccaatgaagaagctgtaaaagcttttgtgttagatgcaacagcaaacaaagtgttaccatcaacttttagttttttttcaatgttggcatagccatatcctttactaaatactatagaatctgcatttacaatagctattgccattccaggaatatgccattcttttaatgttttttgaaaataagaatctaaatgtttaagttgttcagttgtttgtgaaaaaacaggagttactaaaaaaagtaacagaagtgataattttaataacttcataaaaaagttttttaagtagctaatttaataataattataatagtatttacatttggaacttacttatatttgcgctatggataattttttaaaagaactacctgaattagcaaaagaaaaacacatagaaaacaaaaagtattttgctaaattaaaaaaacgaacaccaaagcgtttagatttgataatgcaagatttacatgataaagagtttaataaaacagactgtttagcatgtggaaactgttgtaaaacttcgagtccaatttttacagaaaaggatattcagcgtatatcaaagcattttaaaatgaaggttgtgaattttatttcacagtatttagagagagatggtgatgatttttatgtgttaaaaacggcaccttgtacttttttagatttgagtgataatacttgttctatttatgatgttaggccaaaggcttgtagagaatatccacatacaaatcgtaaaaagtttattcaaattacagatttaacgttaaaaaacattgaaatttgtccagcaacatacaatattattgaagcattaaaactgaagttgccgttgtagtttaactcttctaaataaacaccttagaagttgttaaaaaacaccttagaaaattaaaaatacaccggtgtaaatttttatgttattaaagtattttataatagtaatttttgcctgttaaaacagtatataaaaagtaagtcctacggaaagtacgcaggactcaagattttaacatctacggcatatagccttattgtgataagattaaagattagaataattttttcacaactcaaatatagcaaataatttgatagcatttattttttgcccttaatttttattcattctaaatatttaataaaaaggtttcttattctaaaaatgtttaaatttagagttctgtttaaaaaattgctaacacaaaaataatatgaccaaaattttaggattagatttaggtaccaactctattggatgggctgtggttgatgaaaaaaaggaaaaaatacttggaatgggaagtagaattttcccagaaggtgttgtaaatattggtgaaggtgaaggtagggaaacttcaaaaaacgctagtagaactgatgctagaggaacgagacgacagttttttagaagacgtctacgcaaacgctacttgttacgagaacttgctaaaaaagggctttgcccaattaactacactttagttaaagagtggaatgaagcgcaaatttttaaaaataaacaattacaggaatggtttaaattaaatccctatgagttgcgttcaaaagcaatccaagaaaaaatttctttagaagaattaggtagaatattctatcattttattcaacgtagaggctttcaaagtaacagtaggagtgcaggagtagataatattgaaaaaagtgtgatttttaaaggagataccaaaacaggtaaaattggtatttcagaaacactagagagcattaaaaacactaaaactcttggctcttatttacatactatatacccaaaacaaaataaaccttattctggacataaagaacgcattagaaatagatatacaacaagacaaatgtatatttacgagtttgaaactatttgggaatatcaaaaacaattttattcagaactttcaaatgaattaaaaactgttttgggagggcgtaaaaaagatggttataaggaagatggtattttatttcatcaaaggccattacgttcacaaaagcatttagtaggctattgttcttttgaacctaaaaaaacaaaatgtcaaattaacaccattccatttgagttatttagaatttatcaatgggtaaatacagtagattgtaatgaaaaagttactagtgaagatagagggaaaatggttgaattattactatctaaagaaaaagttagttttaaagaaattagaaaagttattaataaatcggatggttattatcagtttaattataaaaatgacgataaaatagttggctcttataccattagtaatttatctaacaagaaattcttcggtaaaaaatggtttgatttttcagataaagaacaggaagatatttggcatgtgttatcattttttgacgatagagataagttaaaacaatacgcaataaagtattggggatttaatgaagagaaagctgttaaaatttcaaaatttaatttaaaagaaggctattctaatttgagtagaaaagcaattcataatattttaccttttctaaagctaggttttatgtatgatgttgctgtaggacttggaggtgttaaaaatgcactagctgataaatggatagagaatgaacaatttattttagataatgttccaagtgttgtacggtctaattttaaagggggttatattgagccgctaaaacaaatgcttaaatatgagtttgatgtttcagataaacaattattaaaattatatcaccatagtagcgctattgagactactgaattattaaaaaaattgcctataaattcggaagcagataaagaaatacaaagtattaaaaaccctgttgtaattaccgctctatttgaaattagaaaattagtaaatgaaattattgatacgtacggaaaatttgatgaaataaaggtagaactagcacgagatttgaaggcttcaaagtctaaacgttatgatacaagaagagagcaactaagattagaaaaagaaaatgatagaattaaaatagaattagaaaatctagggcagcgaataaaccatatcaccattttaaaatacaaactatgggaagaatgtgataaaagatgtccgtttactggtaaaaatattgaagtgaatgagctttttagtggagaagttcaaatagaacatattttcccttggagcagatctttaaatgatagctttatgaacaaaacactttgttttgctgacgaaaatagagctaaaggaaataaaactccttatgagttttatagtgaacaaggagaacaaaaatgggaagaaataaaaatacaagccttaagttgttttaaaaataaacctaattatccaaatgcttatcaaaagtttaaacagtttgtaaagaaaaaacatgacgaagattttataagtcgtcaattaaacgatactcgttatataagtaaagaagcaaaaaattatttatctaaaatctgtaataatgtgcaagtagcaccaggacaaatgaccgcaacattgcggcataagtggggtttaaacactattttaaataaagatgatgatactaaaacaagagatgaccatcggcatcatgctatagacgctttggttatggcgtgttctacaagaagtcatttacaagaattaagtaaaagaaataggtatcaaaaagattatgaatttaaagattttccaatgccttggcaattttttaggcaagatgcagaaaaatctgtagaacagatattagtatctcataaaaaattgaacactattttaacagtaagaacacacaaaacaaagaaaaatggtgttgtctataaaaatataggagtagctgcaagagggcagctacataaagaaactgtgtttggaaaaagaactgcaccagatggtatagaagcatatcatgtgcgtaaaccaattgaaagtttgtctacgcataaacatattaataaggtagtagatgaaactattcgattacttattttaaaacaagttaataaattaggtggttttgtaaaaggaaaaataccagagggtacattttataatacagatgaaaatggaaataaacagcctcaaatttttctaccaaataaaaatggaaatcctgtgccaattaaaaagataaggctaagagaaaatattggaggagctgaacagttaaaaagtacagtgaaccaacatgtaaatcctcgcagtaatcatcatgtgttaatttataaagattttgatgataacttgaaagagaaagtagtaacattttggacagcagttgagcgtaaaaaacagaagcaagctgtttttcaattacccgaaaatggaaaagaaatagttactactttacaaataaatgatatgtttttgttgggtttaaaagacgatgaaattaattgggaacatcccaagtttactttgttgaaagagcatttatatagagttcagaaatttacttctggagattattattttaggaagcatattgagagtaatttaaatggtgaattaggaaaagcatatcagtacattaaaggttttggagagggtaaaacaggctggaaaacatttaacccaataaaaattaaagtttcagtttctggtaaaatagaaaaagtataattttcaataaaacgtgtcattccgacaaaggaggaatcgcatactattataattaaatacaaatgatagaatttacagaaggcatttattctttttatgtgtacattattacaaacacataccgtactaccttttatataggtgtaaccaataatttgaatagacgcttacaagagcatattaaaaatacagaaagtactaaaaaaacgtttgctgccaaatacaatttaaaatatttggtatattatcagaaatttggttgggtgcagcaagccattgcacgtgaaaaggaattgaaaggatggcgtagagaaaaaaagttaaatttgattagagcgtttaatccaacgtttaagtcattaaattatctttttgaataagaattgaaattgtaaaattagaagtaataagttctttgaaatattgggttgttattcaaatgttttgtctgtgataccgagtaggcgaggtatcacataatgctaagttttaatgggattcctcctttgttggaatgacaatataaaaggttggttatttcaatagtttattttgttagccaagtagttgaggtattgtaatctatttaaattaatttttaaggtttaatatgtgagtaaaagtaaatagcttttgggtttgttttgtcataccgagtaggcaaggtatcacataatgctaagttttaatgcgatttctcctttgttggaatgacaatataaaaggttggttatttcaatagtttattttgttagccaagtagttgaggtattgtattcaatttatattaatttttatggtttatttgaaagtaaaagtaaagaacttttgggtttgttttgtcataccgagtaggcgaggtattacataatgctaagttttaatgggattcctcctttgtcggaatgacaatataaaaggttggttatttcaatagtttattttgttagccaagtagttgaggtattgtattcaatttatattaattttatgttcgatatgtggagtaaaaaaaggagtttatagcttcttctgtcataccgagtaggcgaggtatcacataatgctaagttttaatgggattcctcctttgtcggaatgacaagttttaagttcattgatataaattaaatgttttaatgagatttctcctttgtcggaatgacaatataaaaggttggttattttaacagtttattttgttagccaaatagttgaggtattgtaatttatttaaattaatttcatgtttgatatgtggagtaaaaaaaggagtttatagcttcttctgtcataccgagtaggcgaggtatcacataatactaagttttaatgggattcctcctttgtcggaatgacaatataaaaggttggttattttaacagtttattttgttagtcaaatagttgaggtattgtattctgtttaaattaatttttatggtttaatatgtgagtaaaagtaaagagcttttgggtttgttttgtcataccgagtaggcgaggtatcacaaaatgctaagttttaatgggattcctcctttgtcggaatgacaagttttaagttcattgatataaattaaatgttttaatgagatttctcctttgtcggaatgacaatataaaaggttggttattttaacagtttattttgttagccaaatagttgaggtattgtaatttatttaaattaatttcatgtttgatatgtggagtaaaaaaaggagtttatagcttcttctgtcataccgagtaggcgaggtatcacataatgctaagttttaatgcgattcctcctttgtcggaatgacaatataaaaggttggttattttaacagtttattttgttagccaagtagttgaggtattgtaatctgtttaaattaatttttatggtttaatatgtaagtaaaaatatagagcttttgggtttgttttgtcataccgagtaggcgaggtatcacataatgctaagttttaatgggattcctcctttgtcggaatgacaaattaaaactcttttaaataattaatctataacaaaaccgagcaaagcgaggttttgttgtggtttgattaaagattagagaaaacgatattgatttcgcaacggcaatatgggcagcctatgttgtggtttgattaaagattagagaaaacgatatttcaggttgtgtagtaattaaggatgctaatgttgtggtttgattaaagattagagaaaacgatattaaactttagaaaaatggaaagatgagattgttgtggtttgattaaagattagagaaaacgatattcaaaaagtgaaggatatatagaggtaaatgttgtggtttgattaaagattagagaaaacgatattcttgtaaatgaatagcccctattccatcgtgttgtggtttgattaaagattagagaaaacgatattccttggtggctcgtaaagactcaagcataagttgtggtttgattaaagattagagaaaacgatattatatggttaaagactaccctcgtttatcaagttgtggtttgattaaagattagagaaaacgatattattttgtttttcctgttgttatatcaatttgttgtggtttgattaaagattagagaaaacgatattatcggatgttgtagtaatgttttcaaactgttgtggtttgattaaagattagagaaaacgatattaaaaaatttcttaaagagtttaaagagttcgttgtggtttgattaaagattagagaaaacgatattttaggtaacataaccgtaaatattacagttgttgtggtttgattaaagattagagaaaacgatatttttgcaaaaaaagaaatagattatttacgtgttgtggtttgattaaagattagagaaaacgatattatcctgttattgctgctacaccacagcagtgttgtggtttgattaaagattagagaaaacgatatttagcgagtaaaaaagatattcagcaattagttgtggtttgattaaagattagagaaaacgatattttctagcacctacataactagggtaatcttgttgtggtttgattaaagattagagaaaacgatattttaaactaactaagtcattattagaacaatgttgtggtttgattaaagattagagaaaacgatattaaccaaaaacaatatgcgattggcttaatgttgtggtttgattaaagattagagaaaacgatattagcagaaactttatgcgaaggactatatgagttgtggtttgattaaagattagagaaaacgatattatattacaaaagaattatttaaattatatgttgtggtttgattaaagattagagaaaacgatattagttgcgctgttagcttctggtactcaaaagattaattgaaaatatcgtaatttaaaatgctcctttattgtacttttaaggcaatattggagcattttttggttttaaaataattctaattgctgcggttgtggttcttttggaacttcaaacttcccccaaaaatttaaaatattaccaaattgtttatcggttatcctaagaatactaactttgcctagaggtggaagcaacatgtgaattcttttctcgtgtacatcagcactttcactactggcacaatgcctattataaacagaatattgcatcatagtaaaaccatcttttagtaaattttttctaaattgttgtgcatttcttctgtctttttttgtttcagtaggtaagtcaaaaaatacaaataaccacataattctgtaagcgtttaattccataaactaggatagttaattttttttatttttcctgtatagcattgttgaagtgaagtacaggttttagataaagcaaccattaacggacttttagtatcttcaaaatatacagtttcagtcaatacatttaaaagttcagcttttataggtgttgttaattcttcttcattataatttttaagaatagcaataacttttgcatcaactaaaggtctaaaaggttccataatatcatcggctaggcaaaatgcattgtatttattatgatgatgtatcccaagagtacttaataatccgctaccagctaaggctcttgctactgcagctcttaaaataatgtatccataatttaaaaataagtttggatatgcaccgtaacgttctcttttaaatttaaaattaaacaagtgcttccaataatgagctgcagcaacaccttccatattttcagtatctccactcaatactttagattcaaaatagtgtaaaactttagatggtttgtttaattgttctagcaaataggcttgatttttaattttggactttatggtttgttgccaaagttgtttttttaatggaagtgatgcgtttatttggtttttaaataattcttgctgaatgtaatggttgtctaaatttaaaagcatacttgagggcatatgcttcgcatcacaaaaaattacggctacattgttagccgataattttgttaatgttggtattgaaatgtaaatttcatgatgttctagaacaataaatccaatatcttcaataggaacagttagctcacggtctttggttttaataacaagctgttctaatttggtagttaatgttgctttattaccaaaaaaaagggttcgttttaacatagcaattaaattttatgaatactataaatttaattaaaatattatgaatacgaatgctaaaatttaaatgggtaattttttattaataacgaatttgctttaaaaactaaaagcttctaataactgttctaagtaatatacactaacatattaattatttactcatacaacaaatacttttctcgcacttttttaaatacttcaattttaggttgccatgattggtgaatttctttagctgaaacaccactttctacttgttgttgtaatttatttgtaccggctaattttacaaaaaatgtattaaaaaacgtacttttatcaagtgttgaagtataggcttcaactaagtaagagatattaattttatctagaggtttagttgtacttaaatctaaaccacagcactcaacattttcatgtttaggatgttttgctccaaaattgggttgaggtgtaaaacaatacgtaaaatctttatttttcataaaaggagaaccaaaaatttgaaattgcttttcagttcctcttccaacacttacattggttccttcaaaaaggcaaagacttggatataagttaatagatttatcattaggtaaattaggagaaggttttataggaaggctatagttacttgcgtgtgtataattttttaaagctaccactgttaaattgcattgtataccattttccatccatttttcaccattaatcatttgtgcatattctccaatagtcattccataaacaataggtactgggtgcataccaacaaaacttttgtattcagtttctaaagttggcccgtcaatataataaccatttgggtttggtctatcaaaaataattacagggatatttaattctgcacaagcttccattacatagtgaagcgtagaaatataggtgtaaaaacgaacgccaacatcttgaatatcaaacactaccacatcaataccatttaattgttcttttgaaggttttctgtttttcccatataacgaaataattggtaatcctgttttggcatcaatcccatcagttactttttcacccgcatctgctttacctctaaaaccgtgttcaggagaaaatacggttttaacatgaatgtttaaacttaataagctatcaactaaatgtgtgtagttaccattatttttatgaattacagatgtttgattagtagttacagcaatcgttttattttttaataattttaaatacaatttagtttggtcggctccggtacttatttgtaaagttgaagaagtttcactttttggtaaggttgtaattttgaattttgaatttttagatggattgcaagaaatcaaactaaaaaaaaatagagaaaccaataagaaatatgtatttttgaactgataagaaatcataagtgtattgaattacgaattatttattgcaaaacgtattattgctgcaaaacaatacaaaagtagcatatcttcacctataataaaaattgcaattattgctattgcaataggaattattattatgatgatttctatggctacaggtttaggattacagcaaaagatacgtgaaaaattatctgggtttaatggtcatattcaaattacaaattttgataataataattctgaaatcaccttaattccagtttctaaaaaacaagatttttatcctaaattcaccagtgtaaaaggaattagtaaggttcaagttttcgctacaaaagcgggtattataagaactgaaacagactttgaagggattgtttttaaaggtgtttcaggagattatgattggacattttttaaagactatttggttgaaggaattttaccaagctataatacggcaacagtttcaaacaacgtacttatatctagagaaatttctaatagattgggaattaaattaggagatgagtttaatatcctttttgtaaaagaagacccttcaaaagcaccttggattcgtgtggtaaaagcaatagggatttacgattcaggatttcaagattttgatgagaattttgtaatggccgatattcagcatatacaaaaaatgaataggtggaaaaatgatgaggttggtggttttgaggtgtttataactaattttaacgaaattaaaaacaaaagccaagaggtttatcagcaaacaggttcaaccttgaacagccaaagtattattgaaaagtatccagctatttttgaatggattaacttatttgataccaatatttatttaattattgctattatgattttagtagcaggtattaatatgataactgcattgttggtcttaattttagaacgtacacaaatggttgggattttaaaagcactaggaagtacaaatgttagtattcgtaaagtttttttatacaatgcaggttatttaattttgagaggtttgttttggggtaacttattgggattactattgttatttgctcaaaaatacggtaaatttatttctttaaatcctgaaacctattacgtaaatacggttcctatatatttaaatattaattatttaatagtattaaatttaggtacacttttactgtgttttttaatgttgataattccatcgataataatttcaaaaataagtcctgtaaaaactataaaatttgaatgatataaaattataatatcgtttaaattaacaaacatcttcataatatatctttataaaaacattgtacatttgcaactctaaattagaaaaatggaatacgttaaaaatatacttggaactataggaaatacgcctttagtaaaattaaataaaatagttgaagaaatagaggcattggtattggcaaaagttgagacttttaacccaggaaattcagcaaaggatagaatggcggtaaaaatgattgatgatgcagaatctcaaggtttgttaaagcctgggtatactattattgaaggcacttcaggcaatacaggtatgggtttagcattggtagctattattaaaggttacaaattaatttgtgtaattagcgataagcaatctaaagagaaaatggatattcttcgtgcagtaggagccgaggttattgtttgtccaacaaatgttgagccagatgatcctcgatcttattattctgtttctaagcgattggcaactgaaacaccaaattcttggtatgtaaaccaatatgataatccgtcaaattccttggcacattatgaacaaactggccctgaaatatgggaacaaaccgaaggtaaaattacacattttgtagtaggagttggaactggaggaaccatatctggaattgggaagtatttaaaagaaaaaaatcctgctattaaaatttggggaatagatacgtatggctcagtatttaaaaaataccatgaaacaggtatttttgatgaaaatgaaatttacccatatattactgaaggtataggagaagatattttacctaaaaatgtaaattttagtgtaattgatggttttaccaaagtaacagataaggatgcagctgtttatacacgaaaaatagctaaagaagaaggtatttttgttggtaactctgccgggtctgctgtaaaagggttgttgcaattaaaaaaacattttaaaaaagaggatgtggtggttgtattatttcatgaccatggaagccgttatgtagggaaaatgtttaatgatgattggatgcgtgaaagaggttttttagatgaagaaaagttagtagcaatagatttaattaaagatagaattgagattccattaattacggttaaaactgaagagttagtttctcatgcaattgagcgtatgcgagttaataacatatctcaaattcctgttactgatattcaaggatttgttggttcggttgatgaaagtgaattgtttagtttgtattttgacgataaaaatattgccaataaacctattaaagaagttatgagtaccccttttcctgttgtaaaaagtacaacttcaattgataaaatttctaaattaatcaacagaaaaaatagtgcagtattggttgatttagagaatgataaatttcacattattacaaagcacgatgtaattagcgcaattcaataaattatttaaattcactggtaaagtgcaatttaacagttgggtatttactttgtgtcatttgaatggtaaatgcagaatctgccaaaaacaccaattgtccttgtttgtcttttgccaaataacgctgtttaacgcgtttaaattctttaaactcatcacttttaacatcttcaggttctacccagcaagctttgtgaactggtaagttttcatagctacattttgcaccatattcatgttcaagtctgtattgaattacttcatattgtaaagctccaacagtaccaattatttttcttccgtttaaatctagagtaaataattgtgcaacaccttcatccatcaattgatctaagcctttgtgtaattgtttagattttaaggggtcagcattgttaacatatctaaaatgttctggagaaaagttaggaatccctttaaaatttaatagttctccttctgttaaagtatctccaattttaaaattcccagtatcttgaagtccgacaatatcacctggaaacgattcatctacaatttgttttttttctgcaaaaaaagcattcggactagaaaatttcatttttttgtttaagcgtacgtgtaaataaggagcgttacgtttaaaagtgccagaaacaatttttacaaatgccaaacggtttctgtgattaggatccatattggcatgtattttaaatacaaatccggttaacttttcttctttagaatcaaccaaacgctcttcagatttttttggctgtggtgatggtgcaatttcaataaaacaatctaacaattctttaactccaaaattatttagtgcagagccaaaaaatacaggttgtaaatcaccatttaaatatgcatccttgttaaatttagggtaaacttcggtaatcaattctaactcttctcttagtatgtttgctgcattttctccaataatttcatctagttcaggtacagatatatctgtaaattcaactccttcagaaacagtttgtttgtgattatctgaaagtatattaatttttttctcgtaaatattataaattcctttaaagtcgtaacccattccaattgggaaacttagtggtgtaacccttaatcctaatttttgctccacttcatccaataaatcaaaagcgtctttaccttcacggtctaatttattaataaaaacaattataggaattctacgcattctacaaacttctaccaattttttagtttgctcttca

SEQ ID NO: 2651 - DNA, 23384 bp, synthetic construct
  source 1..23384: mol_type = other DNA
  misc_feature 1..23384: note = Synthetic
agaagtaaaagtttctgttgatgtaaaaaatactggaaattttgatggagatgaagtggtacaattgtatgtgaatgatgtttacagttctgtaacgactcctgagaaaactttaagaggttttaaaagattaaatattaaaaaaggagatactacaactgttgaatttatacttactccggacgaattaggtctgtataacagggaaatgaagtttgttgttgagccgggcgactttgaagtaatggttggaggaaattcgacaaatctgctaagattaaattttaaggttataaagtaatctttgtgcaatgatgatgtataataattaacgttttaagttttttgtaaataattcttttaagaaattaacaaatcgcaaagattatgatattgctacttccaaaaaagtaaagattttagtggtaaaataaagtgttttgaccaaaattttgcccaacaccttttgaaagatgtcatttgtcgaaataatgatttagttaacaaaatggattcttaaatttaacatgttattaactcaaaaaacaatttaaactatgaatcaaaacgtactaaaattactgtttttgtttttcttgttcggttttcaaaaccttcaggctcaaacagcgacagtaacaggaacaatcacagatgctgaaggaatgccaattccaggagtaaatgtgaatgtcaaagggactaaaaccaatacatcatcggattttgatggtaaatacagcattgctgttcccaatcaatctgcaattttgatattttcttatgtaggttctgctacaaaagaagttcctgtttcaggacagacgactgttaatgtagctttaagtgcagacagtcagcaattaggagaagttgttgtaactgcacttggtcagtctaaagagaaaaaggctttagggtatgctaccagtgtgattaagtctgaggcaatcgttaagacaggttcacctaccgttgctaatgctctgtatggtaaagcaccaggggtgcgtattacttctactcctggcggagctggaaatatcaatatccagattcgtgggattaactctattacaggtaagaaccaaccgcttattgttttagatggtgtcccaattcgtgatggagaggctaaaaataatgattattggagtgatcagcgtattagaagcaatggtctggcagatattaaccctgaagacattgagagtatatctattcttaaaggagcttcagcagctgcattatatggttctgaagccgtaaacggagttgtattgattacatctaaatccggtaaaggtaaaaaagggcttggtgtagattttagtaccagttatgcacaaaaccaaattgcatacttaccaagatttcaatatgaaagaggtccgggctggacaaatgcaaattattcttctggctacttagcacctgatggttttgctcattatgatacaaataatgatggaattaacgataccagaggtgtttcagccagtactaataactttggaccttggttcgatggtcagccaattatgtcatgggatggggttgttcgtccttattcggctcaaaaagacggatacaaaaacatgttccaaaattcatgggatggagtaacaaacatcgcgctttctaacaatacagataatagcagtattcgtttttcttacacccacaatgaatcaaaagggttgagtatggggaacatgaataaaaagaatacacttaaccttaatgcatcattcaaaactggtgaaaatttgaaaactgatgtgatcgtgagctatatgaatcaaaatattcataaccgtgctattggtatggatcgattgatcaataactttacgggtatgataagtccgtttgataatggtgattggtacaaagctaaatacagaaccagtttaggatacaaatatgttaccgggtcaaatcaaagtttgactccagatgaaaatatcattcgtaatggtttcaaggcagatgttgctgattatttttggaatacagatgcaaatcaacaagacgaaattacaaatcgtttgattgccagtgttactgaaacctatacgattcataaagatttgaaattacgtggtcgtgtttctactgatttaacatcagtaaatgtagaaactaaaaacccggttgaaaggcctttggtttatggatttggtactggttcttatcaaatggatgctaaagactataatattctttatggagatgtgatgttgacttacaacaaaaaaattaatgaagctttcgaaattggtgcttcagctggttatacggcaacaaaagaaacgggatctactttagcaagatttacagatggtggtttgagtgttgaaggctggtatgatatgaattcttcagtaaacactgcaaaaagtactagtacaaaatatgaagttgtaaaggacgctgtatttggaactgtaaatggtagctacaaaaactacttgttccttgaaggaacattaagaagagatcgtacttctactatgaatcctaataataatgcatttacgtatccttctgtaaactcctcttttgtattgtcagaagcggttaaattacctgaagtaatcagttatgcaaaactacgtgcttcctggggtattgtgggtaactatccggagctatataaggctaacgtagctttcaatcaaacgacactgggtaatcagggtacaactactcctgtgttgattacaaactctatgaataattatggtaatgaaggtataaaacctgagatgaaaaatgaatatgagcttggttttgaaaccaaattctttgacagaagattgggattggatgtttcgtactacaatgcaaaggtttatgatcaaattttagatttgacactggcgcctacaacaggagcatcgtcaattttagcgaatgttggagaattgagtaaccagggagttgaaatatctttaaccgctactccgataaaaactgcatctttttcatgggatgttactttaaactgggccaaaaatgtaaacaaagtggtgaaattggctaacggtgcatctgaattattacatgctgactatgatggatcagcagctcagttaaaatcagtagtaggtgatccaatgggaggtatttatgcacaccctgttaagacagatgccgatggtaataaaatggttgactccgatggattttatatgattgatggagataaatggcaaaaatatggtagtgcaatgcctaaaggtgtgggaggtttattgaacacattcacctataaaaatttcactttagatgttaatattgattattcttatggagggtatttgatgccaactggggttaattggatgacttcaagaggattgacggaagaaagtttgaattacagtactaacgagcgtggtggtctgacttattttgtagatgctaatggtaagggtgttcaggttcctaatagtgctacaagtggaccaggcggtcaaacattatatcgtgatggtatgttgatgaatggtgtgacagcagatggcgcaacaaatacaaatgtaatatctcaggcaggttactataacatgacttataactggggaggacctcaatacagcagctcacgttatgaattgtatattcaggaaaataattatataaaaatgagagaaatatccttatcgtatagtttgccaagtgcatgggctagtaaaattggtgcttctaaagttaatttttcagcttatggacgtaatctattctttatctacaggtcaattaaggatatggacccagaagcaactactgcaggctctaaatggtctcaaaacattaacaatgcgggaaccaatccggctaccagaagtattggatgtatgttaagagcatctttttaatttgatatttcataatttaaaaaatataacatgagaaaattattatatatatcgctaacaactgcagcagtttttttaagctcttgttcaaaagacgattttgcagatgcgtatactaatccgtctacggttgaaacaactactgtacctaaacagtttgccggattcatgaaaattaactttgaggatgtaattccttcttactggaattattatacagttctaaaatctacttctcttagctacacgcaggcacatggatttgtaaattcatccgggcgctatgtttcaggagctgcaccagtgaacagatgggatagattttataagtttatggctcaatatagagagttggaaaaagtgatggcttctttgcctgctgctacgcagactgaaaatagaatctataccattacttcaactatttatttatacgatcatactcaaaaaatgattgataactatggagatattcctttttctcaggcaggtaaaattagtttaacaggaggtaattatggtgctgcattagcaaagtatgataaccaaacagaactatatacccttatgttggatcaattgaaagctttttctactgaattgaatactattactttgtctgctggtgtggcattagaattccaaaatcaggatttgatcaacaaaggaaacctggtaagctggaaaaactattgtaattccttgcgcttaaaaatcttgaacagagtttctgcagttcctgcttttgcaacaagagcaaatactgaaatggctgaaatcattgctgctggagaaattgtagatgaaaattccgaaaatattgctttcagggtttatactcaggatactgatttagatacttcaggttttattaatgctttagaagatgatttaaataatcttgctccaaaagcaatgattgatcacatgaatgcaaataatgatcctcgtaaatcctggctgtttgaaagaggatcacgtgtagtgaacaacgtagtgatagtggctcctacttatgaaggactggatcctgcattggcatccggggctcagacacaattaataactgatggtaagattgctgtttacaatcgttcggttctcagtagaaataaatggttgccgggaacattaataaatgctcctgaagtaaacctcattcttgccgagtactattcaagaaatggtaattcagcaacggctaaaacacatttcgaaaaagcgatcagacaatctgtagagtattatgtaagattagctgataaagctgatgttttgaactggaaaccaactgtagagcctacaacacttgaagttgatgcttatattgctgctataaactttgcaggagctacaacacctgcagctcaattggaattaattgcttttcaaaagtacattcattacaatataatgcaggctgatgaatcctgggctgaacaaagaagattgaaacttcccgctcttacattccgtgaagatgaaacaagcagtgtgagaaaaacaccaccaacacgctggacatatccaacttcagagagtgtttataatccggataattataatgctgtaaaagcaaatgataatttaagtaccaaaatattctgggatataaagtaaaattccaataataatgtgcgattaaagcacttataagtttaaacagaggtaagatgtaattcttacctctgttttttccagtttaatatttgtcaaaaattagataataaatgatttgtaaatacatgataaaatttttcaataccatattgttgttgttttctttagtactcgttgctcaaaccaaatcagaggtatataaaattaagtatgataaatttgaaaacggaaaaaaaacaggcgagaatatcgcaatctatgtatacaatcaaatggtttttttatcaaaaccaacagataaaatacaacaatacatcgatttaaaaaacaattacaacgttaccaccatcaaggatggaaatattgttttcaaaaaaataattccatttgacagcttgcctaaacctaaatttgatagtgatacccgaataataatggggtataaatgtcaacatgctacattttcctatttttctaataccatagatgtttggtttactgaacaaacaactgtaaaaggaagcccaaatagtagttatttacccaataaaaatgcgcttgttttacaacttgttgttaatgggaattatgcttttatcgctagcgccatcaataaagaaaacaaatatattcctgagcttaattatgatgataaaaccaaggttgttactacatctgaattcgaggaaattgcaataaattcaaggtataaagtcttaaggatttttgataatgaaattttaaattttgaccccaatcgtgttattcctaaagaatcggaacttgcaacagataaagtgtatcatttttcaaaaggaagtgtcgtattaaaaaaaataaaaattactcccgaattaaaaaacagcagtgccatttttgcaaaactaaccagtaagtctactggtgatgcgtatgacagaactggttcagtatttattatcccagcaaaaaaagaggaaaatacgactacgttattagatgcttatttacatggattagataaattaccaatttatacagataataaaaaaaacaaatatcagggaattaaaaaagaaaaagactatacgccggcaatagaaatactccggttttttacgccatttggagttaattattttaatgataaacgaaaaataaataattataactgggcaaaagacgttgtttataaagaagacgtcacttctcttattcctaccgatgaagatgaaatctggattggtgtttttattggtaattatgatgctggaggtcacacaataagtctcgaactcgatgcttatccatcaatgaaaaataacgaagagaaaccaaataagaaaaagtacgtagcacctttattttcaacagtaaatacgatggaaatgtcaggtcagaattacggaggtctttttgcgaatgatactttaaaagtaaatttcgaaattaaggaaaatctacaaaatttacagcttttgtataccacaactggtcatggaggctggggaaatggagatgagtttgtaccaagaatgaataaagtgtttgttgatggtcaggaggtttttaaaattattccctggcgaactgattgtgcaacctatcgattatctaatccggcttcggggaatttctctgatggtttatcttccagtgatttaagtaggtcaaattggtgtccgggaacattaacccctccttatattattccgctgaagctgccaaaaggtaatcatataatagaagtagttatagaacaaggcccaaatgaaggtccgagtacaaaccattggaatgtttcaggagttttggtgggcgaattgaaagattaattgtgaaatgaaaataattttaaaatttaattatgtaatcctgctattagtactaactgttttttcctgcagttcattacaaactaatccggaagctgttaatattactcaaagctatattactgaaaatcctgttacaacagcgagtcacgcctcaacattggttgaaatagagcctaacgttcttttggctgcctggtttggcggaaaacatgaaggagcaaaagatgtaagtatttatatttcttcctataaagaaaaaaaatggtcagcgcctaaaaaaattattgagccactaattaaagatggtgataccctgccttgctggaatccggttttatttaaaagtaaagctcaaaaattatatttgttttataaagtcggcaagaacccgagagaatggtttggtgctatgatagtttctaaagataacggaaacacctggagtgaggcaaaatatcttccaaaaggaatattaggaccaattcgaaataaaccaattgaaacgaccgctggagttattttgtgcggaagcagcactgaaagtatcgatgataataaatggagagtattcatagaaacgtataccgaagcaacagacagctggacaataacggatattaatgacaggaaaaatttcgacatcatccagcccacttttttagttcattcggctaaagagattcagattttatcacgaagcaggcacaataaattaatttcaagctggtcagaagataatggtaaaacctggcagaaaacagacagtatcaacgttgtgaattcgaattcgggagtagatgcagtgactttatccaataaatcttttttattggttaataaccctttaaagatgggaaaagactggtttaacggaagaaatgtccttgatgtagaatattctaaagatggtctgttctggagcaaattatttgatttggaaaatcaaaaagaaggcgaattcagttacccggccattatccggacttcagataaaaaagtacatgttttatatacttataatcgtaaatttattaaacacacaatttttgatttaaaataaaaaaagatgcaaaaattttgccttgctctggacttaaaaaatgatccggatttaattgccgaatatatagaatttcataaaaacgtctggcccgaaatacagcagagcattttagattccggaattatcagtcttgaaatttataatgttgctgatcgtttgtttatgattattgaggccaattctgatttttcattcgaagaaaaagcaaaacgggatgcagaaaatccaaaagttcaggaatgggaaactttgatgtgggaatttcaaaaagcacttcctcaggcaaaaacgagagaaaaatggcttttaatggataaaattttcgaactcaaatagacttcaaccgataaattcaattatgaaattttttaagcgtaaacaaattacaatcatttttggcagtctgttatttttagggattactgtaaatgcccaaaaaaacaatctggcacagacattctataaacatgataaatacctttcttcggataagttagaaggacgttttccgggaactacaggaaataatgaagcagctgcttatatcaaaaaatattttaaaaaatacgggttgaaaaaatttgataacaacttttatcagccttttacactttttgtgaaagaaggaataaacaagatgaaatcagatagtgtatcgactcaaaatgttgtgggttacctagaaggatcagatgagaaacttaagaacgaatatatagtaataggagctcattatgatcattggggatggggcggacaaaattcaggcagtaaaaagaaagaagctttcgccattcataacggagcagatgacaatgcttccggagtttcggctttgctatgcatattgcaggaattatcaaatgctaaagtcaagcctaaaagaagtattatttttatctcttttagcggagaagaggaaggattattaggctctaaatattttgtctcacatttaccggttcaaaaagacgctgtaaaagtaatgttgaatatggatatggtgggaaggttaaatgaagagaagcaaatttacatgggaggcgcaggaacgtttccagatggagtagaattgatgaaaaaattaggagaaaacagttcccttaatccggttgtacatgctggcgaagtgggaggctctgatcatgtctcgttttataaagctggtatatccgctgtaggatttcataccggaggccacccgcaatatcatacacccgaagacgatattgatttaataaatattgaaggaggagctttggtgtctcaatatatttacaatgtattagtgtcaattgcaaatgacctgcagcaactgtattttattaagcaggattagggaatatctaactaattattgttactaaaaaagcttagtattaaaaggtataccgtggtataccttttctggtttatctaaataaaaaagtcccaccgaagcaggactaaagattttcatctacggcatatagccttattgtgataagattaaagattagaaattttaatcagttacaaatatatagaaaaagtaaattggtttgaataaggaaaaccgtatttgctttaatttattttgtgctatatttcgttcggtttaaattttaagagatatggcgaaaattttaggattggatttaggaacaaactcaattggttgggcattgattgatgatgttcaaaataaaatattaggtattggaagtagaatatttccaatgggagttgaaaatctgggggatggcgataacgaaatgtcaaaaaatgcaagtagaactggtgcaagaggagttcggcgtcaattttttagaagacgtttaagaaagaaaattttactacaaaagctttctgaaaataatatgtgtccaatgaattctgatgattttgaggattggaaaaaaacaaaattattcccaacagataaactctcaaagtggtttgcattaaatccatatgagcttagaaaaaaagccttaaacgaaaaactatcattagaagaaattggcagaattttttaccatttaattcaaagacgtggatttttaagtaacagtagaaaaggaggtaatgacgatggagctatttttaaaggaaatgcaaaggaaggaaaaataggaattgatgatacattagaaagtattgaaggtaaaacattaggttcttatttatatgaaatatatccaaaagcgaatcaaccttttcaggatggtttggaaagaatcagaaacaggtacaccacacgtaaaatgtatgttgatgaatttgaattgatttgggacaaacaagcagaatttcattcggttttaaattatgatttaaaaacaatttttggaggaagaaagcaggataattacaaagaagatggtattttgtttcatcaaagacctttgcgttcacaaaagcatttagttggtaactgttcctttgaacctacaaaaacgaaatgcccggtaagtgctgttcctgttgaaatgttcagaatttatcaatgggtaaacactgttgaatataatggaaagaaaatatctcaggaggaaaaagataaactgattgagcaattacttttgtcagataaaattgaattcaaaaaattgcgaaaagctattggtaaagaaagtgcagaattcaaattcaattataaggatgatgataaaatagttggaacgcacactatttctaatctgtcaaataaaaaattctttggtaaaaaatggtttgaattttcagataaagaacaagaagatatttggcacgttttatatttttttgacagtaaatcaaatcttaaagaatatgctgttaaaaactggaatttcacagaagaacaagctatagcaatatcaaagtttaatgtaaaagatggttatgcgagtttaagtagaaaagctattggtaatattttgccattcatgcaaaaaggatatacctatgatgttgcagttgttatgggtggaataaaaaatacttttggcgagaaatggcaaaatgacacatcagaaaataatcagaaacaattagatttaattgataacattgaaggaattgtcaggtctaaaatttcaggcggttttatagataccattaaggatttacttcgtaaagaatttcaatttaacgacaaacaattaaaaaaactttatcatcattctgcaacaattgatgtagcatcattgcttgaaaaattgcccgttggaaaggatgccgacaaggaaattcaagccattagaaatcctattgtaattaatgcattgtttgaattgcgtaagttggtcaatgaattaattgatgaacacggccaacttgacgaaataaaagttgaaatggctcgtgatttgaaaatatctaaatcacaacgaaataaaattcgcagagatcaaaaacgattagaaagagaaaatgacagagttaaaactgaagttgaaaaatatgtcagagtttctcatgataatattttaaaatttaaactttgggaagagtgtaaacaaacttgtgcatatacaggagttccaattcctattgctaaattgtttactggtgaagttcaaatcgaacatattcatccttggagtcgttcattaaacgacagtttcaataataaaactttgtgttatgctgatgaaaacagacgtaagggagataaaacaccatttgagttttatggaaatgatgaattggattggattgcccgaaaagaacgagccttaaaactattctctgacacgaaagaatacccaaatgcatatcaaaaatttaagcgatttgtacaacaaaagtttgatgatgatttttcttcaagacaattaaatgatacaagatatataagcaaggaagctaaaaactatttgactcaaatatgcaacaaagtagctgtttcacctggacagatgactgcaaatttgcgtcaaaaatggggtttaaatactgttttaaatgatgagaatgctaaaactcgtgaagaccatcgtcatcatgcaatagatgctttagtaatggcttgtggtaagacaagttatttgcaggaattatcaaaatggaatcgttataatagaaattatgatttaaaagactttcctatgccatgggaaacatttcgttatgatgcagaaaaagcagttgataaaatattgatttcgcacaaaaggctaaataatattgtaactgttagaacacataaagtagaaaaaaacggagtaattcataaaaacattggagtagcagcaagaggacaattacataaagaaactgtttttggaaagcgaaactttaatggagaggaagcatttcacgttaggaaatcaattgatagtttaacaactgaaaagcaattagaaaaagtagttgacgaaactattagaaagctaattcataaaagaattcaggaaattggaggatttgtaaaaggaactattcctgcaaacacattttttgttgttgatgaaaatggagtaaagcaacctcagatatttttaccaaataaaagtggagcaccagtcccaattttaaaaattagaatgagagaaaatataggtggtgccgagcagttaaaagataatttaaatcaatgggtaaatccacgaaataatcatcacgtgcttatttataaagatgagaaaggaaatttaaaagaagaagtcgtgactttctggacagtagtagaaagaaaaagaaaaggttttccaacttatcaattgccattagatggcaaggaaatagttacgactttgcatattaatgatatgtttttattagggttaaatgaagatgaggtaaattgggaaaatcctgattatgaaattttaagagatagtttttacagggttcaaagtttgtcttccaaatattatgaatttagacagtctattaatgcagaatctcaaaataaagtttcacctatttatgaacaaataagaggatttggctcaggtaaaacaggttgggattcttttaatccaatcaaagtaaaagtttcagtttccggaaaaatttcaaaaatgtaattctactttaaaaatgttgtgatttgattaaagattagaaaacacgatattagttggcttgttaccatctaataatcaaaagattaaattgaaatatcgtataaaaaaatgcttcttttttggattgataacccacgattgaagcatttttttgtttctaaataataatttagttcagtttaggctaaaacaattccagttgtgtaggctgaggagcagatggcacggctgcttttccccagaaattcaaaatattgccaaattgtttatcggttattcgtagcacgcttactttgcctaaaggcggtagtagtttgtggattctcttttcatgaacatcagcgctttcactacttgcgcagtgacgtacataaacagaatactgcatcattgaaaagccgtccttcaataaattagttctaaatccggacgcatttcttctgtctttttttgtttctgtgggaagatcaaagaaaacaaacagccacattattcgatatccgttaagctccatagtacaggatatttaattttttttcgatttcccgtgaagcattgttggagagaacttgacgttttttgtaatgcgatcatcaaaggacttttctcatctttaaaataaactgttctcgttaatatttgtaataattcagatttgatagcagtgtttagttcctgttcactaaaacgttgcataatttcaaagactttttcgtctacaataggacgaaaaggctccataatatcatcggcaagtgcaaaagcattgtatttacttttatggtggattcctaatgtattcaataatccgcttccggaaagagctcttgcagttgcagctcttaaaatggcataaccataattcaggaaattattaggatagtcgccatatcgttcccgttttattccgtcaaattctaaattaggctgagggaaatatttccagtattgctgtgcagcaactccttccatatttgtagaatctccacttaagactttactggccagaaatgaaaaactatttttggattcggttattttttcaagtaactgcccctgatttttaattttttcaattatggtttgctgccataactgtttctttaaaggtatggaagcttcaatttgatttttgaatatttcctgctgaatatgatggctgttcaggtttaagaacattccgttgggaagatggttttttccgcagataatgatagaagtgttattgtcaacaagtaaattcatggccggtatgctgaggtagatctcattatgatcaagaacgagaaagcctatatcttcaatgggaatagtgctttcctttatttctgattttaatacaagctgattgtttttagctgttatagaaaatttgttttcaattaaaatggttctctttagcataaatttaacttgaaattatacatccccgttattgtcttcaacaggtatctttaattattgttttaaatttaggctttaaggtgatgttgtttttacggttttccttaattcacgtgttttaattttgaccttatctaaaaagagataagctaatctatcaggtaaatactttttactcgttatttttcttgaaccatcttctgggcgtatcactttcatgaagtacaatttcggaatgtaagaactctgcggcatcagctgaatcttgcacttttgaggcactgcgtgtcagcatttcggattcaaatccggttaatacactttccctcaaaccagtttttttccagtgagataaagatttacatccttttgcaatttcccgtgcaagcgcaagggcgtccagcaacgcctgattcgcaccctggcctttaaaaggactcataggatgagcagcatctccaatcacagtgacttgtcctgagttctctaataattccggtgtgagtaattcgcggtcatacacgggatatcccgaaatataagcttcctgggtggctaataaaatttgaggaatcgggtcgtgccactgcgttcttcggcaggcttcttccttgagtgcctgaggacctttcgcacttaacttttttgcctcatcttccggcattggaaagctaagctgccacattacagaatcggccgtgtaaggcatgacatagattcgttcattgccattagcagtttggaatacagtagcggaatctaataaagcactattcagattttggacagcactcaaagggcaaatccctaatattacgatacagcccaaataacataggggagtaatatcttctccaataagtaatttacggaccgaactacgaataccatcggctccaactacaagatctgctttggcactcttcatctttccatcgacctgaaagttgagatgaacattaccatcactatgtttaaaatcgattaactggtgtccccattgtatgttatcgtttccaccaagttgctccaatagtgcgaatcgcaaagattgtcttgcgatatgaatattgctacgttttgggggcattctctcttctgactgaagccactttctgactccccattcaccgataacttttccttcgggagtatgaaccagatgtctggttgaaaatactccttcttttaaagaaataatacctaagccctgaattgctttactggcttgctgtaatgttagtccataaccctgagatcgggcattaaagtctttatcgcgctcataaagagtaaaagggattccacggtgtaaacaagcaacagccagggcgattccgcctatgcccccgccaataattgccacgtgaggataattctctttatttgcaacaggaggcctgtgggcaggaagcagaccggttccggaacagtttacgcatgaatataagttgcctttaggctgaacaggtgctgtacctttaccattagttttttcaaattcatctaatgcgatttggtaatggagtcttacttttttagttagccttcgacttttttttccgcgtccctggcattccggacaaattgtccagctttccatttcattttgcactttttttacttccactttttaccggatcttgatttacataagaaaacaaacacagatactattgatactgagttcaagagtctaaataattataactcttatttctaatagatacatctgtaagttatatttccatgtttttgcttttacaggtgcgcaaagttactataaaagataggtctctgccgaagcaggagtaaagattttcatctatggatatatttgacatcagattaagactgaaaaatatcctaatcgtttaacaacataaagcaattatataaaaagaattaattatttgaaatcttcaattggttataggttgttttctctaagatttcaattcttttgtatggcgcaatctattggattccgtcgcaaataagtcagtgtaattcataaggttttgacttatgtattgtacccaatggactaagtgagtgtattagaatttctaaaccaatactattttgtgcttcactgcatataaaaccaatccaattcgggtttttatttctagtttatcaaataaacattcccggtatccgtcgattgtttttggacttaaacacatttctgaggcaatctctttatacgttttttcggtacaggcgtgttttataaaaacaatttctttttctttcagattgatttttttagagtcatcattggctttttttaccagcatccccgaaactaattctgttaaataaaagcctttttcaataactgaaatcatggcttccttaaatatttccggagaagtatcttttagtaagtaaccttttgcaccattcgtaatcattttgatgattatttcttcatcatcattgacagaaagtgcgattaccttcaaatcaggtctgttttctttaatccatttcatggtgctaacgccatccaaaaccggcatattgacatccagtaaaattaaatcgacatctgcattttcatgatcttgcaggtaggaaacgaagactttgccattttcgaatcggttaattacctcaaaatccttaaaactattgattaaaagttccagtgattgtgaaaagagctgatgatcatctacaataataattttgtttttaggtttcattgttttgggttaaaggatattctaaaattacggtcgttcctgatgaatttgattccattattaagattgctccaattaacttggctcttaatttcatgttgtttaagcctaatcccgaatttatctgactggtatcgtagccaattccaaaatcctttatttttaatcgaaaaacagtatcagttgtattaatggctacttcaaataaatcactgtgagaatgtttaaggctgttgtgcagggcttcctgaaaaatgcgataaataaacaaatcatgttcctgatcaatctggggaatttctcccgtaacggtataattgtatggaatgttttttagtttttttatacgctcaagatcttgttttatggcttcaataaaattgctgtgcagtagattgtctttattgatgatcctggataaaatccgaatctcatccagtgatttggctagtatttctttaagatcattaagctcatttaccaggacaggtttcccattgttaagatacatattgagctgcataatacccacagaaactatctgacctatattgtcatggagttctttactaatttcgctaagagtctgatctttaatttcaatcctggttttaattaactcggattgaaaatacaattctgattccattttctctaccagataattgtttttcttttttaaaaaataaaagaatatcacaagcaaagtaatcagtaaagttaaaaaaacaatacttaacgaaatgactaataattgtatttcttttcgctccataagaatccaataatatagcagctgtgggccaggacatttaaaataaacactactaagctaaaaatagattcgtcatgtttgatcaggaaccagtttaaagcaagcataaagggcaggaatggtacatgaaaaactaaaattcctaatatgtaccaaaaaaagactgattttttaaaatttaatattttgtttgaattaaaaatttcgactaagtataagcaggataatatcataattaacagcacgccaatggcaaaactataggtatatgactggttaatatcttctttaaaatataagatattcaaaaaaaatgaaaggataaacagtattaaactgaaaagtcctgttattcgataatttgttttggacaaaacactccttaaaagtaagataaaagcacaaaaactgaccagcatataaaaattaaaaacataataatttaatatgcctgtccatgccgtaaaataataacctattctttctattgcggcagaaaaccaaatcaaaattactaaaaatttagctttattcgtaggaagtttgtgccaggaaattaggccgataattccggaaaataaagctaaatagacagtataaaatcttaaaaattcaaacataatcttctagtatgttttgctgggaggatttccgatacttccgtaattcattggttcaattcctggtatttcttcgataccaatttgacgaaccaaagcaaaaggttgtatgtcatcaggtgcagtttttctgatttttgttcctgtgggtgttaaaaaaatggtcatccggcctgctttttcttcatattttctttcatctggatatacaccatagtaaaaacggattccgtttacatcatatccttttttcttgcctttagccttaatataatgaatataattttcaagctcttctacagaaaaccaaacattattggcatcttcttttgtaatgtatttagcaattacccgggcgcggtatttcataaaatttaaatgcaattccttcgcgaatctttttgtaattaattgagtgggtctttctggttctctttccatgatttttttaatagttaggggttaattaattgttatttaatattttaaatgtttttgtttgagcaaaattattttaaattcttacaaaaacaaaggggaaaatcaccctttttttgtagggtaaatttatttaaaaatttgggttataacactgttttgtaggaaaataaataaaatcaattttacatcgttcatttggtgcacaaaatggataggtgaaatctgaaaagcctagttaaaagagtaagagctaattataatactaaagttatgagtttatatcacgaagtttttgcaggagaatcattcagcgaagacaattattttgaagctgtacgatatgttttaggaccggaatatgctaatttgaatgaaagtgaattagaagatgtccttttatcaagagtagatcaaatgtctgaaagtgaagcagaagggttttggtcaagtttaggaaatgtagccagcagtattggttcaggagttttgcgcggtgtttcggcagtggctccaatagtaggaactgctgttggtacttattttggagcacctcaaataggcggagcggttggtggactggttagtaatctggcaggagcaggaagtgctgcattagacaacagtcgtcagcaacaacgcagacaaggacctccgcaacaacagcgaagaccagctaataataacagacgcagacaagcaccttcaccactggggcaagcgtggggaaatacaacccgctatttggccgatgctggaagagcagctttgccggcaatccagcaatatgttcaggataaccctgttcagttgcgtccacaggcagcacaggatattgccagagtacaaggtttgtacaaccagttgggaggcgtaattaataatcctcaatttcaggcaggacaagcacagcaaagtttaggtactgcaagtccaaatgcacctattgaaagccattcttttgctgaactaattgagactgttaattatctaaccgagaatattttatatgaatattacaacggaggactaattccgacagaagactattatgtagatcaatatggacaatttgtgggttcgaatacaccaaacagaatcaatagaattgaaaattctattgccagtttataaaacttaaaagttatacaaatggatgcttatatagaatatttgaaagaacataatcccgagatggctaaatattttgagcttatgcagcccctgatggaaaaaaaagaaccggaagagcaaacagaaccgccaaaagttgatttggaacttgaagaaagaatcaagaaacttaaaaaaatcaatcagaaactttttacgataatcgagggattgaaatttcagctggaatttgagttaaatcagaacgatgatttggcaaaagccattggagcctgttctgaatgtttcggcgaaaatgacgattgcccggaatgttttggaattggaaaaccgggttacagcactcctgattttattctgttcaacaaatatattcagcctgccatccaaaaatataacaaacattatttcaataaaaattaaccattaatatttaaaattatgaattatttcgaaagttatttagatgaagatttattaaatgaagattatttcaacgaagaccttttaggcgaagatttattagaaagctatgacgaaagttatgatgaagctgccaaacgcagaagaccttcaataaaaggaataagaccaaatgtgagttcagccgtaaagcaaagatctaattttggaaaagcactaagcggaagagcaaatgattatgctaccaaaagcgagttaaagaaatcattagacgcgatttcaagccaggtaaacgaattgaagaaaacctctttggcaacaaataaaacattggttgcattagatcaaaaacatacagaacttgcaaagttggatgcccgtaaaggtgaaaatcaaaccaaggttttaaagaacatgcaaatgatgagcatgatgggggctttattgaatcagccaaaacttaaacctgaaaatttagagattattgaagttctggataaagaaggggatgtagtttcaaaacatatagctgaaaaaaaagatacaagtgctatttatgttgatcagacaatgtctatgcttttaccaatgatgacaactatgggagattctggttccggaaaatcagacaatatgaacatgatgttaccaatggtaatgattatgtctcagcaaaatcagggtactagcggcaataacaataatacgatgatgcctcttgtcatgatgatgatgatgaataaataaatgtaaaaagggcaattgacacccaattgcccttttattctattaacacttaaaaataaaaaaatgaatccatttaatatattagtcaattacataatagcaaacagcagggcagcattttataatgttcccggtaatcaggaaataacgaatacagccttgttaacaggtatggtttctgaaaatccattgatgagctatttaattatcgataacaaagctaaaatagaaggagagaagtttagtacgccagctactgtaacaaaaactcctggtaccggcactaatcctgctacaccagtaccaggtactactccggggacaaaccctgcaacgggtacaggcacgcctgcaaatccgtcaggaacttctaccgaaactccaaccggaaccccggcaacacagacagaagttgtaacattagaagcggtaaaaaatgaaatttcaaatagtaatcaaattttaaaagatgagattactaaaggtttagaagccaacaaagcagaatttaataagatgattgcagaaaaattagacacaaaaattacgtttttagaaaagaaccatatagtaataaatgaatcaattctggaaatcaaaaagaaactggaggaaatttctaaagtaaatcagactcctgatacttctggagctacaaaagaccaaaaagggcttcctaaaaataatcagaaatgaaaacggcagttgatcaccctgaaaccgttgtgttagacagaattgagaaaacgaccactgaaattctgaaaaaaatcaattgtattcgtcccggtttgttttccagtaatctgaaattttcaaaaaaagccgaggaagaaaaaaaattattgtttaaagagctaatcccaaaaaaggttttttcaattgataaaacaatcgaactggttagtaaaatagcagctgatactaattttttgaaactgcagcaaatcgatcaggattttatttcaggattaaaaaaaattgatcttaaaaatacccaatatattagcgaaatcaacaatttcattactcaggaaaacgaaataaatgtagttttcttctctttggtcgaagaaaatctctatttcacgtatctcaattctgaattgtatgagataaaatataagttagaccaaattaatctgcaaccttaaaaacaaaccaatggatccaagactcaaagttatattatatggtaatcctgacgaagaactatcgttgttaatgcgtttggaaaaagaaaaagactatcctgatcattgtaaaattatttcagaatttggagaaattgtaagcatccaaacgcaacgtcgttatttatgttctatttacaacagtaaaaaagtaaaaagtctgaaagcaccaagtgtgattcctgcaaatgacgatgttgagcctaatcctgaaaccagggttttagataaaaaaaatgaggttttaagcgatactgtctcgaatgtggtttttggaattattgattttggtttcgattttagccatcccgattttattaataacggtaaaacacgctttgaaaaaatttgggtgcagtctgacagatatgatggcaatgaatttggatatggaaggataattagtcaggcacagattaatgaagcattattagatgagtttccttttaagaaacttggttatcatccgggaaaatccgatttatttggtaatggaactcatggtacgcatgtactcggaattgcctgtggaaatggtgccgttgcacccaa

SEQ ID NO: 2652 - DNA, 23384 bp, synthetic construct
  misc_feature 1..23384: note = Synthetic
  source 1..23384: mol_type = other DNA
ttacttatgatgatattaaggcgggttcgaatagcaattggaacatcattaaggcggcaaatcgtattcgttgtatccgaacagaaaagtggaagtacgattattactttgatgcggcaaccgcttatttcaaacaatatgaactgtatgatctgatcaatgatccgctggaaatcaccaatctggcgtacgatcccgcatacagcgaaattagaaaagatttagaagcacaattgcatcagcttgaggtcgaaaaactctgggtaaatatgccaaaagatgtttttagtacgacaaccttcaactaaaagacatttttaaaacctaaaaagtacccaattcaaatactaacaaaaaaatacaaatcatgtcacaaactataaagtcagaagtgcataaagtacattatgcggattttaataatcctgccggacaaaccacaatacagggaataagaggagtttcggactctgaaaatgtatatatcgcaggaagcttattaagtgaaaacaatctcgttcagggcttactttacgagggaacacttaaaaaaaatggagaagaaggaaaatggcatgttgttaattttccaggtacttcaacaactacagttattaatacttcctgttacggacccaataacggacctcatggcaccgtacaaattgtaggatcttataaaacagcagcttctaccggtaaagctcctagtggaaatctcggattctattatgaaggtcctgttgatggttccggaacatgggttcaggtcacacctaatggaggaaataccaataatgtatttgttcacagtgtaatgggaggccttgctgttggaaattatgatgttgaaaatgataaaaatggatatgcctttttatatcacattgccagtaaagaatgtaccgaatttaaagtaccggattccttaacgactaccttgtatggtatctggcataatggaggagacagttatacaatggcaggaggatatagtacggcagaactgggaaaaatcagccaggcttttcttgtggattatgattctaaaacgaaacaaaccagtaatttaaaatcatttagttacaagaacgaaacagctttatctgtaattacccattttgaaggcatcaccattgctaaagacaatggctataatatgccatcagactggattaccttaaatggagaaaaaagcggagcatcgtttgtttctgtaagcagaaatgctgacggatcatttggagaagcaaactgggtggatattgattttccggactcaaccgtaacaagtgccaataccgtatacagaaataacatattgggtatttatgtaatcgaaaacagttctgataccaaaactatatcttcttttgttgcaaaagtgagcatttaaaaagaagataatgtaattaaaaatatcctgtaaaaaatgcgtaaatgttccttttgaacttttacgcatttttttgtttccttccgtatatcgtttgtcttatgccttataatccccgtttggtgtcatttttttagaattgattttggatctccactactttagattgatcacaatgctactgtattgttccaaatatatttctaaatctgctataaagaagaaaactatgaacacagaaaactacgatgtaattgttataggcggaggcgcaataggtttagccactgcttatcagctcggtaagcgaaaagcaaagactttggtgctggaacaatttacttttgtaaatcaattagggagttctgcgggcgtgtcacgtcaattcagaatcccatatccacagcaatatatggtacagatggctctggatgcacagccatattgggatgaactggaaaaagaaacagatacagagttacttgataaagtgggcacactctggtttggagatcctgcagtgcattcaacagaaggaaacatcgcggaagctgaagaagcactaaaagctttaaacgttccttacacgaccctaaccgcaaaagaaatcgaggaaaaatatcattttaaaaatttaccggaaacgtacaccggactttttcagccggatggtgccagcattaattttaaagccacgattgagaccctcttaaagctgtgcaggaaagaagagaccgttcgcctggaagagaattcgccaacacttaaaatcaatcaaattggtaaactctttgaagtcatcacgccaaacggaatttatatcaccgaaaaactcgctatcattcccggtccttatatcaatagtgtaatcaatttactggactttaaaatagaggctacctactggaacatgtcttcgtcttattttaagaaaataaatccggacatccaatatcccacctggtttgtatttcaaaatgcaacaggcgaaaatggcaatcagttttacgggttcccttccgttgattgggatcatccggaatacattcgagtcgctcccgatttcgttataaaaccgctggaagagcctggtgacagaaccttaatccctaatgaacaggaattgggctatacttcagaatgggtaaaggaacatatgaccggattaagcacagaacccgaatacacttcaacatgtctgattgccctgagtaaaataccaaataaagaattgctgattgattttgcaccaagctatgtacccaatcacaaaaacatcgtcgtatacgccaccggatgggctgcaaaattcacccctttcttaggtaaaatcatgtctgatcttgtactggacggacacaccgattttgatattaaacctttccaattaggacgcaaattctttaaagcaatttaaaaatatagattatggataaaaatactcctttaaactcaggaatgaatcctgatttaaaaacagaagtagctgtcattggcgccggaatgtccggattatacactgcttaccgtctcgtaacggataaaaagtataaagctgacgaagtgcagattttcgacatgaacagtaaattaggaggaagactggaatctgtaattatgccgggaatgaatttctggggtgaattaggaggcatgcgttaccttacttcacaagaaattgtaaccacattaattgaaggctatgtaccaccggaaaatccgaacatacgcattcctgttctgaaagacaaaatgacgccagttccatttcctatgggagaatcctcaaaactattaatgtatctgagaaaagagcgttttaaacaggatgcctggaacgtagcgcaggagcagaatcaaaaactgccaacccgatattacctgaatgacaatgattttggcttcagttcagatcagttgttcaataaaatcatttatgatgttttaatggccgattcgtgggtggctgcaaagtatggcaaaaagattaagcagggcccttcaatctatgattatgcctttgaattaaccagtagagactgggatgatataaagcctaaattggtatacaattttccgaattctccctacaacaaacgtaaagtaaacgatttgggattctggaatttaatcaaagaccaggtttcacaggaaggatatgaatttttagcaaatgccggaggatattattcgaataccatcaattggaattcagcagaagcttttccttatatggttggggatttctctgcaggaaccatttacaaaactattgaagaagggtatgacagcatcgcttatgcgatagcaaattcctatacagatcatgacggtgcctgcatctggtctgaaaacaaactgcttactttcacaaaggaacatccttcaaaaagcacccataaataccagctgacttttctgaacctaaaaaccaatacagaatggaacgtgtatgccaataccttagttcttgccatgccgagaaaatcgctggaacttttagatcaggaaaatttctttttcaattgtaatgaaaattcggttttaaataccaatatccgctccgtaattatggaaccggcttttaagatattaatgggctttccctatccgtggtggaaagaattgggaattgattcaggacattccattaccgatttaccaatgagacagtgttattattttggcacagatcccgaaactgataattcgatgttgctgggaagttatggagatatggaaacggagaccttctggaaagcactttctgatgataaagtactttttgaggtaaaaccggcaaaatcagcatcattaaaagaactgcatgaactaaatgatgttcaggctactaaaatgatggtcggagaggtaatgaaccagcttcgcgaactgcacggccccgatgtaatcataccggaaccttatgtaacttattttaaagactggacagatgacccttttggtgcaggatatcacgcctggaaagccggattttctgttgaaaacgtaatgccttacatgagaaaaccggtagctgatgagcagatccatatttgcggagaagcctattcagatcagcaaggctgggttgaaggtgctttctgtgaagcagaaaaaatgctgcaggaatattttggactggatcgccccatctggctgtctccggattactatctgggatggtaaggttaacttttataaaaagaaaaatcgagaactatgggcggagccggtgccagtgaaaccagacctataaatcttgacaaacctgcgcctgaccggatatttcaaaaactggattgtcttactgatactgataaaaataaaatctacacgcagcgaatattggcgcatcctttatatccttattccgtaaggcctgatttacgacttcgtgatgccaacaagggaaaatataaaaaataatgtactgatcaagatgtttctgatgagcagagaagtgtaattcaagaacagttttttaacgctaataaaagcaaagctcctgcttcaggatgtcattaccataaagagtaaagatttgaaaaaaagatgcttaaaaaccataaaagtaaaagactgataaagtccaattcctatgaaatgcccccataaagtgagatactttttgggggcatttttatttcagtggattttttgtttggttaaaaacagcgctaattaaaagagtagttgtttttaaattggagagcccggaaaggcttcggatataaattgctgaagccctgcttcttcaagtatttcaattgaaaattcgccaaaacgttttggaagccaaattattcggattccacttggggaacttaggctttcccgtgttaaaacagttccattttcatcctccggctggacacccgaggctactaattcgtcaaaggctgcttcaatatccggggtcgagtagcagtggcggtaaatcgttccttcaccttttgtatccaatagattttttagatttccggaaaaaggctgcacaagcataaaacgctccctgccaattcttaaaacggcataagttacatgcagctcacctctctcccaagtgaattttttggagatctcggccccaagaattcttgcataataggcacaggcagtctcaagatctttcactaaaatatcgatgtggctaaacttaaggtccattggtgcacttgtgttttggttcggttgattttgcgggtttaatgaagctaattctgggctaaaataaggctttgaaagtcatttaaaaataaacagcatgtttttttaataataatctgtttttaaacctgctgtttttatataggttgaaaataaaaatcatttagccggctttcgacttcttctctttattatcggtacattttaaagaggcagttttgataacaataatttgatattccctaaaacaagttcaggctcttcaagctggataaaatgtcccgattttaccgttgtaatatgtgtgaaatctgtcacgccggcttttaatgcttctttagagtcataccataattgtctgtcggcggcatcatgttcgggatcaattttcatacttgttatggcaataaccggaacgtccggcagattaggcagcattgcggcgtatttaaaatccgcaatgagttgcagtgtttcttgtgcgatacctgaatttacaccatacgtatttttatagttattgtaaaagacatcgatctggtcctgtgaaaaatgattgtacttttcgtgagaagcatcaacaaatactaaaccggccacttttgccggattttttatagcataatcacgaatgatcacacctcctaacgaatgcccaaccagtattacttttctgccttgtgcaaactgatctacgactttttcaagctcagaccgtaaggtatttatagttctgggtgctgtgctaaaacctgattttccatagccggccctgtcatatagcaaaacatccgaatctaaaaaatgggctatcgacaagatctctgatgattctccggtgctgtaccaggaggtgtggtcatttccatgacctgattcaaaaacaaccagatatttcgatttattggaaaccgtatagctcatgagtttatgagttcctaagtctacagaagttccaggatattccccgacggtcttttgatcatcatctgagcaggaactaaaagagaaagcacaaatagttattataaaaatacagcgtaatccgcctttgtgcagctttaattttgcgagtgtgttttttaagattgtcaatagcattttgggtttgtttttaagtaaattcgatacaaatattactattatttgccatcctaaagttcggattgataaatcagaacctattcttaaaacctcaaatgctatttatatagttgtggcagctgtttttttaaattcagaaggagtctgattggtgctttttttgaaagtagtgttaaagacggtcttcgaattaaaaccgacttcaaacgcaattcccaataaacttaaatgctccatatcaggattttgaatcagttttttggcttcttcgattcgatagcggttaacgaactgataaaaattttcatcacagcctttattgataatgtaagaaagaatatgagatgaaatatccagttgggaagccagtttgaataaactcaattcggggtccaaaaaaggttttttatcctccattacctgaattaaaatggatttcatgacttctaaatccgtatccgaaattagttttttctggtttacctccggaattgaagcttcagtgataaggacttcaatttgttctttttcacgtttatcaggctgataaaattccttttgttttaaagaaaaataggtaataaaaaaaatcgcgcccaaataaatcagactcgcaaaatggtcaaaaaaagcattggtttttgcggctttaaaaacaatatcaaataaccagagagtagtgattatcaacacgcaaattaccaccttctttaaccattttaaattgattgcagtggtattggaagtgtaaaggaacaaatgcttctgataagcggtaatttcacggtacgccgcaatacaatacgcagtgacctgaaaacaaaaaacaaaattaaaaacgacactaattacggcagcattctttttatcggctgctgtaggaggcggtacttcgatcaggagtgaaagagagagtaataataaaatgatcaaagcaaatgcaaaatgcaaatgatcttttacccgccattgcctgtcaggctgaataaaataaaggatactaaaataaaaaacaggtgcgactataaaatcggttatgcccagaaaatcattgagaggcgtcctcgttttcaaaaactcagttttctccagtaaatcgttgaactgaatcaggaaaatacacaaaataaaggcgccaaaccatcggttaacggttccatttgcctgattaatattggcaaacagcaaaaaagccagtaataaagttgttcccgcaacaaagaagctcagtagttgatccattaaaagcaatttttaaatctgatatttttaaatcgattttgtaaagataaaattactactatttatttcagtattgcgggatgctttttcaagtcttttgctgcactgaattcaaatcgcaagcagccccctgttattttttgttccgctgcgggcagaaagatcgtttaaatttagaagtataaaacattattcccagtaattaactgataaaaaccacttgttacagtaagctgccatttattgtaagtaggaaaccttgcggcttattaggttataaatttgcacccgattaagaaaaagcatagaatttaaactaaattttttttaaacattttaataaatactgaaaatgaaaaaaatactatttttaagcttcgttttagcttttatgtcttgttctaaagatgaaaatgaagctgttacagagaatatcaaaccaggcttggcagaagaagtgaatgctgatccgttaagtgggtattcttcttttgaggtcacattacccgagaacctgagagcactgacttcggctgcaaatgcgacatttgcggtttggccaagtattttcttttctgcaaacgacgataatacgatcgatgtttactgggagggaagcaatacggcactggatggacacaggcattttacaaagatttcattgcaaagcaagcagatagtggcggagaatccgctgccggcagctttaaatcttgggaatacccgctttttgggttacgataaaatcagtggagggcgttatataatgggaacatcagatgtaaatccggataatcagttgcgaaaaaatccgaagctgtattgttttgacagtaatgggactgtaaaatatactatcgatctatggaaagactgcgatccggccaatatagcgacaggtcaggccggacaggctataatgacatacaataaagcaggggatactttcggggtttatatgggacaccgggcctcgggacatcaggccggctggttaggcttctacaaagccgatacaggcgaaagaactcaattgagagactggtatatttctcacaacttcgaccagagacttctgccgcttccggatggtcgttatgtggcacttgctcatggcgatgcacttcccaaacgatctttgttcgtagagggctgggatgttaataaaggaagattgaactggctcaactactttgatattccaggaaatagtggtgataatgtcacaaaatcatcaaccggagaggtcattaatttaccgaatggtaacgtggctattgtctatgctacccaaagagaccatagtacagataaaatagttcgtgatgttcgtgttgctattgtttccggtataggaaccagtgcacagaaagtaattaaagagaattggttaaccaactatgccaatactgagattgatgaaacagcaggctgggggatgcagattggaacttattctgaggacaagctgtttctagcctggaatgtttttaagacgcagcaaagtaataaaattgaaaagaccacttttgccctgctggacaatgaaggaaatctgttaaaaacaaaagataccctggtaaatacttcaaaaaaggaaggaataaaaatgattcagcccgcgcagactatgagaaaaaccactgacgggaagtatttgattttcctttccgaaggttctgattctaataagttaaggattaatatgatgcaggtaaaaaagtaaatagcttagggaatgttttgagatgaggttttacaaaaaaaacttgtagttaactgaaaagaagagatgatcttgatgggtcgtctcttttttttttggtttctgaatactttcaattttatcttaaatgattttgttttaaagctacaagtaagctgtcttgaaataaataaaaaaagtcccaccgaagcaggactaaagattttcatctacggcatatagccttattgtgataagattaaagattagagattttaatcagttgtaaatatatagaaaaattaaattggtttgaataaggaaaaccgtaattactttaattttttttatagtaaattcagtgcagattaaatttaagaaatatggcaaagattttaggattagatttaggaactaactcgattggatgggcattaattgacgataagttaaataaaattttaggtattggaagcagaatatttccaatgggagtcgagaatcttggcgatggtgataacgaaatgtctaaaaatgcaagcagaacaggggcaagaggagttcggcgtcaattttttagacgaaggttaagaaagaaagtattactaaaatcactttcagaaaataagatgtgtccgataagttccaaagattttgaagattggaaacaaactaaacaatttccgtctgcttcattagcaacttggtttgcaatgaatccttatgaattgcgtcaaaaagcattgaaagagaaagtaagtttagaagaattaggtcgaattttttatcatttaattcaaaggcgaggatttttaagcaatagcagaaaagggggaagtgatgatggagctatttttaaaggaaatgcaaaagaaggaaagataggaattgatgatacattagaaagcattgagggtaaaactttaggctcgtatctctatgagatttatccaaaagagaatcaaccgtttcaggatggactagaaagaatcagaaatagatatactactcgtaaaatgtatattgacgaatttgaactgatttgggagaaacagtcagaatttcattcggttttgaattatgatttaaaaacaatttttggaggtagaaaacaagataattacacagaagacggtattttatttcatcaaagacctttgcgttctcaaaagcatttagttggaaactgttcttttgaaccatcaaaaactaaatgccctataagtgctattcctgtagaaatgtttagaatttggcaatgggttaatacagttgaatataatgcgaagaaaatctctgaagaagaaaaagctaaattagttgagcaattgctttcatttgataaaattgaatttaaaaaactacgaaaagccatcgggaaagaaagtgcagaattcaagtttaattataaagatgacgataagatagttggaacacataccatttctaacttatccaataaaaagttttttggtaaaaaatggtttgatttttcagataaagagcaagaagatatttggcatgtcttgtatttttttgatagtaaatcaaacctaaaagaatatgccattaagaattgggaatttacagaagaacaagcaattgctatttcaaaatttaatgttaaagatggctatgccagtttgagccggaaagctattggaaatattttgccttttctacagcatggatatacctatgatgttgcagtggttatgggtgggattaaaaatacttttggagacaaatggcaaaatgataccgtagaaaacaatcaaaggcaactcgatttaattgataatattgaagggatagtcaggtctaaaatttcaggaggttttatagatacaattaaggatttacttcgtaaagaatttcaatttagtgataaacaattaaagaaactttaccatcattctgcaacaattgattcttcagtgttattagaaaaactgccaataggcaaaggagcagacaaggatattcaagctattagaaatccaatcgtaattactgctttgtttgaattgcgaaaattagtaaatgaattaatacaagaacacgggcagcttgacgaaataaaagtagaaatggcacgtgacctgaaaatatcaaaatcgcaacgaaataagatacgcagagatcaaaaacgactggaaagagaaaatgacagagtaaaaaaggaagtagaaaaatacacaagagtttctcatgataacattctaaaattcaagctttgggaagagtgcaagcagacttgtccttatacaggtgttgtaattccggttactaaactttttacaggagaagtacaaatagaacatattcatccgtggagtcgttcgctaaacgacagtttcaataataaaacattgtgttatgcggatgaaaatagacgaaaaggagacaaaacaccttttgaattttatggcaatgatgaattggactgggttgccagaaaagaaagggctttaaaattattttccgataccaaagaatatccaaatgcctaccaaaagtttaaacgatttgtacagcaaaaatttgatgacgacttttcttcaagacaattaaatgatacccgatttataagtaaggaagcttcgtcttatttaaagcaagtgtgtaagaaagtaaatgtttccccaggtcaaatgacagctaatctgcgtcaaaaatggggattgaatacggttttgaatgatgaaaatgccaagacacgggaagatcatcgtcaccatgccattgatgctttggttatggcttgtggaaagacaagttatttacaggaattatcaaaatggaatcggtataatagaaactatgatttaaaagattttccaatgccttgggaaacgttccgatttgatgcagaaaaagcagttgataaaatattgatttcacacaaacgtatttctaatgatataacgattcgatatactaaagtagagaaaaacggaaaaacatatacaaataaaggagttgcagcgcgagggcaattgcataaggaaaccgtttttggcaaacgaaattttaatggagaagaggcatttcatgtcagaaaggcaattgatagtttaacaaccgagaaacaattagaaaaagtagttgatgaagttattagaaaattaatttataaaaaaattcaggaacttggtggatttgtaaaaggtgttattcctgctaatactttttttattgttgatgaaaacggagttaaacaaccacaaatttttctgccaaataaaaacggtaatccggttccaattttgaaagtccgaatgaaagaaaatattagtggtgctgaaaaattaaaagaaaatataaatcaatgggtaaatccaagaaacaatcatcatgtacttatttataaagatgaaaaaggaaattttaaagaagatgtcgttacattttggacagttgtagaaagaaaaagaataggtgattcagtttataaattgccaatggaaggaaaagagatagttgcaattttacatattaacgatatgtttttgttaggattaaatgaagaagaaatcaattgggaaaaaccagattatgaagttttaagagatcatttgtatagagtgcaaagtttgtcttctaaatattatgaatttagacaatctgttaatgcgcaatctcaaaacaaagtttcgccgatttatgaacaaattagaggatttggtttaggtaaaactggttgggatttttttaatccaatcaaagtaaaaatttcagtttcaggaaaaatttcaaaaatataatttcatttgaaaaagtttggtgtaaatttacaccaattaaaattatggttatgacacgacaaagtatttctttagccaatcagaatgatgaatggctaaaacaacaaattagtaaagaagaatttagcagtaagagtgaagccgttaattatttaatcaagcaagcacgtgagcgggaagaatatcacaactatgttcaaatgaaaattgacagagggattaagagtggattcagcaccaaaacaaaagaagaacttttagaggagattaaaacgcgattaaatgtataattataggttatcatttgaagctgaagaagatattattcgcatttttgagtatggtttaggtagatttggtctgcaacaagccatcaaatattatgatatgatgtttgaatgttttgataagatagcttctaatccgtttttgtttcctgttgtatccaattataaaaatgcagagcgattttgtgtttgtggagttgatacaatttactataatatcaaaaaggaaggagtagaaattattaccataattggaagacaagattattaaaagttcattgacatgattttcaaattcttaaacatctcaaaccacgactgaaaagtatagtatctacccaatagggttgaagatagccagttaactgttgtggtttgattaaagattagagaacacgatattagaattgatttaggttctaattttcctcagttgtggtttgattaaagattagagaacacgatattataaattgctttcctgtatcagttactgtggttgtggtttgattaaagattagagaacacgatattcaatagaaggtacaccattcacaatcgtacgttgtggtttgattaaagattagagaacacgatattcaaagcaggaataaaactaacaagtgaacgttgtggtttgattaaagattagagaacacgatattggagaagtgctaaaaacaaacaacaaaaaagttgtggtttgattaaagattagagaacacgatattataatctattaaacgaacaacgtatttgtagttgtggtttgattaaagattagagaacacgatatttggaggtgtatcatttgatgaagcgagcagttgtggtttgattaaagattagagaacacgatattaaaagagtttaacgcaaaagcaacggaagcgttgtggtttgattaaagattagagaacacgatattaaacgcatacggaagtaacacaagttactagttgtggtttgattaaagattagagaacacgatattatccgataaaagtaggtcagtacttaataggttgtggtttgattaaagattagagaacacgatattaagttcaagaatttgaaatgattgacaaagttgtggtttgattaaagattagagaacacgatatttgtttgagcaaattattgaagatgatgatgttgtggtttgattaaagattagagaacacgatattattaatggcgaatcacaacctaagcggattgttgtggtttgattaaagattagagaacacgatattaagcttgataaaatatataaacgcagtagggttgtggtttgattaaagattagagaacacgatattgtaaggaaaagaaaacccagctacccgaccgttgtggtttgattaaagattagagaacacgatatttatttgatatggcagatttatcaggactaggttgtggtttgattaaagattagagaacacgatatttttctcccaatcaaccgttaggttggcattgttgtggtttgattaaagattagagaacacgatattcgaaaatatctattgttttcaacatccttgttgtggtttgattaaagattagagaacacgatattttaactccccggatagttccagttcttctggttgtggtttgattaaagattagagaacacgatattcttaacgtagtagtattgatcgaggtgctgttgtggtttgattaaagattagagaacacgatattcggctgctgcttcaattgaccctgcaactgttgtggtttgattaaagattagagaacacgatattttcaactgttggggaaaatattgatgctacgttgtggtttgattaaagattagagaacacgatattaaattcatcttctgtaagtccggaagcatcgttgtggtttgattaaagattagagaacacgatatttagaggaagtgatagatgggttattgatgggttgtggtttgattaaagattagagaacacgatattagcgtatgcttcagaaataacaactgaggagttgtggtttgattaaagattagagaacacgatatttaattgcatgcgcgcctgaactgcttaaaggttgtggtttgattaaagattagagaacacgatattcataagggggttatccttgatgacgaatacgttgtggtttgattaaagattagagaacacgatattaaaagccttaaaccaggttaccgaagccgcgttgtggtttgattaaagattagagaacacgatattaatgctctttttcattttcaataccaaagtgttgtggtttgattaaagattagagaacacgatattgtacaagctttgcaactggttatactgtaggttgtggtttgattaaagattagagaacacgatattgccggttaattggctttatatcccctcaaagttgtggtttgattaaagattagagaacacgatattcaccgccgaggcagtaaacaagggggttgagttgtggtttgattaaagattagagaacacgatattatctacggttggaaatgcaacaaacgtagcgttgtggtttgattaaagattagagaacacgatattatttaaaaccaacaattgatgagttgataggttgtggtttgattaaagattagagaacacgatatttgatgcaccagttgcagaaacgttgtttaagttgtggtttgattaaagattagagaacacgatattaaaagtggacattatgatacgattagatgtgttgtggtttgattaaagattagagaacacgatatttgtttttgttgatatattaaatcatattagttgtggtttgattaaagattagagaacacgatattgagtttgacgcaaaaggcaaacacgttgctgttgtggtttgattaaagattagagaacacgatattacagcaaattatgtgtatgtttgattgcaagttgtggtttgattaaagattagagaacacgatatttgttggactgaaagcttgtacaacgtgtccgttgtggtttgattaaagattagagaacacgatattattgaccttttgaatcagggtgaacaaagtgttgtggtttgattaaagattagagaacacgatattagtgctccccactgttcaaggctaagcatagttgtggtttgattaaagattagagaacacgatattaagtgcctgataaataacccaaggtgaatagttgtggtttgattaaagattagagaacacgatattttgaccagacattaaaccaaagatcgcaagttgtggtttgattaaagattagagaacacgatattccagttctttgacagttttgtcgacggatagttgtggtttgattaaagattagagaacacgatattctttttttccggtaatcgtagagatggttcgttgtggtttgattaaagattagagaacacgatattaatgtcgagggattagaaaagactgaaagcgttgtggtttgattaaagattagagaacacgatattactctaagatcgtggtttgtttccggtctgttgtggtttgattaaagattagagaacacgatattttggctgttttttgtaataaagtcgttaagttgtggtttgattaaagattagagaacacgatatttctcactctggagaatgtaagcgttaccaagttgtggtttgattaaagattagagaacacgatattaactcttaaaaatacaacaggcttaaccctgttgtggtttgattaaagattagagaacacgatattggttaatgctaaaacaccaaacaacagaacgttgtggtttgattaaagattagagaacacgatattggttggttggtttccttctgatatataagactttagacgtgaatatcgttcaggaaaatgcctcttttatggtttgataacccataattgaggcattttttgcattgtagggggtctagttagttttgcacgtttaaatgttactattgatttgaaataatgtagtatcaaaacaattctaattgagtaggctgaggagctgaaggtactgctgctttcccccaaaaatttaaaatattaccaaattgtttatcggttattcgaagtacacttaccttacctaaaggagggagtagtttgtgaattctcttttcatgtacatcggcgctttcgctactggcgcaatggcgtacgtaaacagaatactgcatcatcgaaaatccatctttcaataaattgtttctaaatccagatgcattgcgtctgtctttttttgtttctgttgggagatcaaaaaaaacaaataaccacattattcgatatccgttaagctccataaggcaggatatttaattttttttcgatttcctgtgaagcattgttgaagagaactggcagtcttttgtaaagcaatcattaaaggacttttttcttctctaaaataaaccgtcctggttagtatttgtaataattcagccttaataacagtgtttaattcttgttcatcataacgctgcataatttcaaaaactttttcatctacaatcggacgaaacggttccatgatgtcatcggcaagtgcaaaagcattgtatttacttttgtgatggatacctaatgtatttaataagccacttccggaaagggctcttgctgttgcagcccttaaaatggcatagccataattcagaaagttattaggatagtcaccatatcgttcccgtttgattccattaaattctaaattgggctgaggaaaatgcttccagtattgctgtgccgcaacgccttccatattagaggaatcaccacttaatactttactggccagaaatacaaaactattcttggattcggttattttttcgagtaactgtccttggttttttattttttcaattatggtttgctgccataattgtttttttagtggaatggaagcttcgatctgatttttaaatatttcctgttgaatatggtgactgttgaggtttagcagcattccgttaggaagatgattctttccgcagataataatagaagtattgttatcaaccagtaaattcatagcaggaatgctgaggtagatttcattatgatcgagaacaagaaagccaatatcttcaatagggatagaactttctttcatttctgattttagtaccagctggttgtttcttgcggttatagaaagtttgttttcaattaaaatcgttctctttagcataatttaattatttttctaaagttcgtgtttataaaaagtttgtttttatggttttccgtaattgattcatttttaattagtacccgagttcccgaagtatttttaaactacaatagctcgttgaaatctttgacttattacttttctcaatatcctttggtaataattacccttacatttttttgccatagtttttttataatgtaatatttgtactacatttgttccggtttcaaaatctaaacaaaatttgattcttacgcaatctatgtgatattgaaaaaataaaaactgcccttatcacaagtttcgtgatatgctaaaaaaataaaataagtttatcacaattattgtgatatcaaataaatagatatgaagtttatcacagcgataaaatagaaaatcaaataaacggcaggtgatggaaaaagaaaaaaatattggagaagtattaggtttacagcaacaagatatggctatttttttgctcttaccgctaagtaattgggcgatgtatgcaacgggacagcgtggactgccaaaagaggctcatgaaaaactggccgaaatgcttgcttttttaaaagaacaagatgaagatggtgacgatacttttactgccgcaaaaggaccgggatccagggcaatgaagttctgtgaggatgagctgatcaggaaccaaaagaagcaaaatactatggcaacgcaactcgaaaagtgtaaggcaaaatatacatcggctcgcaatggtttaaaacttgccggttttctaacaggtaaaatgcaggaaaaatggcaggaggagcaattgctaatcattaaaaaacgaacagaaaccgcaatagaaaaaaataacctggaactgcaggcagaatatgaatgtaaattaaggcttctgaaagaacaggaagtatcattgaaaagagaactgtcaggcaactaaaaacagtttacagtttacagctcacagtttacattttacgactcacatttcacaacagacgttctacaactcacatttttttatgtatctcttaattttttattcataattattatctttgaactatgagcacagcaacaaaaccaaatcacatagggcgaaaaataagccgtattcgtgaactaaaagacatgaagcaggaagcattggcacaggctttaggaaccaatcagcaggctgtttctattatagaaaacagtgagacgcttgacgaagaaaagttaattgaagtggcaaaggctctgggtgttactgtagaagcaattaagaacttttcagatgaaggcgtgattaattattttaatagtttcaacgataataaaggcagcatatacgctggcggacagcactactgtacctttaatcctttagataaagtaatagaactttacgaacgtttggttcaggctgaaaaagataaagtagactatttagaaaagaatcaaaaggacaaataacctttacaaaaaatattacattcgtaaagagacttccaaaagaagtctcttttttattttacgcttttgcaagtgcttttaaagcgggaagaacaaagttttgtttagggcatattatttttatttaagtcgggaataatcacaataaaaagttaaaaaaaaagagaaaagcgattaaacctttttaagcaaaaacagtcttatagcataatcttaaaacatgaaatatgaaaccaccatttctactttttcttttgtctttcgttttgttaatttcctgttccaaaagtgattcggatgaatccggtcaggaagcagtctatatagatgatgatttagcaggacccatttccagaccacaaacaggctatggcgctgacggaacttatgctgtggcaaaaattagttttccaagtcctttatacagcggaaaaaatgtagaaatattttatccaaaaggaattaccgctcctaaaccaacaatcttttactcgcatccgtacgggggtgaagaaagtgcgtacaatattgggctttatgaatttattgctaaaaaaggatatgtagtggtttttgccccttatccgacaacaggagtaacagtcgacgaaagatatgatactttatggcagagttttaagaaagcagttacggattatccgactataattgatactaaaaaagtgggtttcatgggacattcttttgggggaggagcttcttttgccctggcacacaaaggatttatcgatgaaggctggggagaaaacgggcgttttatttttgcgatggcacaatggtattcgtaccagatttcacaagctgaattacaaagttttccggcaaatacaaaactaatcacccaggtatatgatgatgatgtgactaatgatcacagactggccattgatatttttaaaaatattaatatttcaaatactgaaaaagatttcattttaataaaaaaatcagttttgccaactttcacgtatacagccgaacatgatttgcccaacacgcaaagttcctatgatgcttatgattattatggtatttacagattactggacgccatgatagattatagttttaatggaaatgcagccggcaaaaatgttgctcttggaaatggttcagcagaacaggtaacgatgccgtcttataaaggaaaggcattaacgccattagaagtcacagataaccctgtgccgctgtatccgcaaaccaaatatacttttaaatgtggagcatcaaataatccgagaattgcaaattgcaattaatttgtaattccactggccgttttttaatagccagtggaaattgcatactgcctcaaaaaaatatttaggccttgcagacaccgtctgtaaaagtatagatgcgcatcaggagctgttgttggagaggttcttttctcttgttgaggaaccactttaaaagctgacggttaaaggaaaaccaatggaattttcttctgctattgccattattgcacctgacgcaatattcacaatgccggattagttttaattaatacacaaaagcactatgtttttgggttaaatcttgtatttattgagttaacagggttcgttgaaatagggtacattggtactaaaaattaaaataacgccaatttatgcccaaaagaatgtatttgaaatacctattaatttgcttctctttattttcaatcactgtaaattcacaactattagaacctaaaaaaaatttccgggctgccgattcgctattaaaagaacctagtttttctgttcacaaagacaattattttttgacgggagtacctgtcaatacggatattacccgcgacaatgccgacgtaaaataccaggtcagttttaagttgcgattgaattcaaaacctttatggggcggtttttttccctatctgatgtacacccaaaaagccttttgggatatttacgccagctcaaaacccttttcagaaattaattttaatcccggagtagccctggtccgccccttttatttaaaaggcggaaggcttacctatggatctgtagcatttgaacacgaatcaaacggcagggattccatttattccagaacctggaacatgcttgccttttcactgaaatcgcaaatttcgccacgatggattgtcggactaagaggatggattccgattgttgataaggaagataatcccggacttaccaaatatgtgggttatggcgaagcgagtgccacttatcagatacagcctgggcgctggagtgccgatattcttttcagaaaagggagtggtcttatcaattacggatccttacagacacaggtaaactggaggccttataaaagcgagaattattatctcacgttgcagtggtttgtgggctacacagaaagtttaatagattatcaggaacataaaagcatggtacgtctgggatttacgattaaacctgaaaatatgggaattttttaagctgctttaattttcagcacatgatttataaaaaaccactcaaaattttgagtggttttttatttctcctcccgttacagctcattaagtttactaaagcattcgttatgaaacctgattccttcactatactgttccggtgacattccatatagtggttttttactatcaatggaaatccccttcgcaatgaagtattcggcactgtttttcactaaagataactctaattggtttaattctgtttttacaggagaattcgaggtttctaaattttgggttggcatattcggttatttagttagcgcaaacgctcagtcatctttttgtgaggtcagaagttttattttttcaacagctattttattttcgttggctacctcgactaacgcaagcagaatatcgttcctgaaaattattttatttcttacatttctaataatggttttggttggcggtttctgtccatttcgggttaaataccgaatagtgggttcaacataggtatacggcaaatgctcatctatgaaattataggcttgttcattgtgcgaatacatttcatc

SEQ ID NO: 2653 - DNA, 23384 bp, synthetic construct
  source 1..23384: mol_type = other DNA
  misc_feature 1..23384: note = Synthetic
atgcattgttaattcttgctttaggatgtatgtcatattcctattcgcagacatcggtatcaggaataatactttctggcacggataaaataccattaccaggagtttcagtccatttaaaaggacaggcaaaaggagcagttactacagattttgacggaaagttttcaattaagtcacagcaaaacgcaggtattgtagtagtgtcttatgtgggatttcaaacaaaagaagtttcttattcaggtcaggaaaaattgaccatttctcttactgaagaggttagtactttaaatgaagttgttgttgtaggttacggatctcaaaaaagatcagatgtaacaggagcaatttcttctgtaaaaagcgaaagttttaacaaaggagtggtagccaatgcaggacagcttattcagggtaaagttgcaggggtaaacattgtagcggcaagtggggaaccaggagctaatcaggatattattattcgtggagtaggtagtttacgttccggaacaacaccgctttatgtagtagacggatttgctttagacaatactacaaatggtgttgcttcgaatcctcttaactttatcaatccgcaggatatcgaaagtatagacgtacttaaagatgcatctgctgctgcgatttacggttcaagagctgctaatggagttgttgtaattacaactaaaaaaggatcaaaaggaagaacacaaataaacctttcgatgactaccggaatttctacattagccaataaagttgatgtttttagtgctagcgattttagaacacaagtaggcgctatcaacggaaaattattggatggcggagctaatacagattggcaggatcaattaacacgcacggcaatttctcaaaatgttaacttatcgatgagcggaggaactgataaatctacatatgcggcatcgttaggtgcagataatcaagaaggagttttgagaaacagtgatttaaaacgttattcagggcgtttaaatttaactcaaaaagcattagatgataagttgaatgttgcttttaatatgacagcaactaaacttgaaaattcaagaccggatgcaagaacagttgttggaaatatgctgacaatgaatcctacagacgcaccttatgtaaacggagaaccaaacgttaatttaagtaatgatgttttgaatccttttatcagtgagagtatttattctgacgaagcaaacaacaatcgtattttggctaatatttcaccatcttacgaaattgtaaaaggattgacatataaattcaatctaggagtagattattcatcttctgacagagacattcaggttttaccgtacagaacagcaacacaaacgactttaggatctttgaatactgtttttaccagaaacagcaacgttttaacggaaaatactttaacgtataccttcaacaaaaacgcacacaactttaccgttttaggaggtcagtctttccaaaaaacacaagtaagtcaaaaaggatttaatttaagaggattcccaacaaatggggttgagccaaaatatcagacacaaacagctagtgaaccaacaacacaatctgcgtttgctacagaaaatgagcttcagtcattctttggaagagtaaactacggatatgataataaatacatgcttacagcaacaatgcgtgctgacggttcttctaaatttggtaaaaacaacagatatggttattttccatcagttgctttaggatggaacatcagcaaagaaagtttcttaagtgattcagaagtggtaaacaatcttaagttaagagcaagctggggacaaacaggttctcaggagattccttctaaaattacaaaagcaagttatacagaaagtaatacaggaaacgatacgtacccgttagacccatctgctacagatttaagcggatatccttacggttcaatttatacacgtttggctaatccggatattcaatgggaagtttcaacacaggcaaacgttggtttagattttagtttattcaacaacagattatctggaacaattgactatttcaacaaaacaacagataatatcttattagaagtagcaccgccggatcctattcagcctacagcaaaatactggacaaacattccaaacatggaaattgtaaacaatggtatcgagttagctttagattacagcagtgataaaagcaaagacttctcgtatagtattggaggaaacatttctttcacaaaaaacaaagtacaaaactcaccttatcaaatcctgacaacaggaggagcacaaggaggaggacaatccggagcaacgataaacggagtgcttaatggtgagtctattggttctttctacatgtacaactttaaaggtattaatgcagcgggtgaaaatgattttgctgacactaatggagacggagaaattcttgacaatgaccgtatcgttgcaggaagcgcattaccggattatgtgtatgcattctatttgaactttagatacaagaattttgatttaggtttaaactttaacggagttggtggaaacaaaatttacaatcacgtagcgatgacatcattcaacagaggaagtttagcaaactctttcaacactacagacagagcttcacaatttccaaacgaattgtctacaaattctaatacagtttctacaagatacttagaagatggtgatttcttacgattaaataatgcaacgctaggatacaatattagcccaaaaactattggacttgataatgtaatggacaatttacgtctttcgctaacaggacaaaacttgttcttaatcacaaaatacagtggttttgatcctgaaataaacacaggaacttcagttggtgatatccagtcttttggtatcgactacttcagctacccacgaagcagaactattttattgggcttaaacgtagcattttaatcaaaaacaacataacatgaaaaataaaataatagtagcaacccttgcattgagtttattattcaattggagttgtactgatctagaagagaatgtattagatgaatctcttaacggtagcggacaaggagatgcagtgagcggtgcaattgctccggcttacggtcaggtaatatcaacatggtaccacaccaataattttggtttgcagttaattgccagcgacgaaggtattttgccttacagaggaggaacagactggtttgatggcggaaaatatttagccgttcatgctcatactacgacaccaacaaatgatctggttactacaacatggaatgcacttactaaaaatatttccagaacattatcagctatcgaagtattaacgcctcttgcagaagcaggaaatgcagaagcacaaggagcactttacgaaatgaaagcattaagagcatatcttaacatgcttacattagacagctggggaattgtgtttaaaaaagaaatatcaaaatctacttcagaagtacttcgcggagcagaagctgtttcttatatcgaaagcgaattattatctgttgcagatgtgatcaataaagacaaaggacctggtagaatgacacaatcagcagtttgggggcttttggcgagattatacctaaatgcaggtgtatatcgtgatccgtacggtgcagcaaaatttgcagcaacagacatggataatgttattaaatatacagacaacatcataaactcaggtaaatttaacttatcaccggaatattttgatttgtttgatgataataacaattcaaataaagaaatcatttttgcattggatcagcgtggtgttttaaaagacgaaaacaaccgttgggcatactggtctattccgggatcaatgtttccaagacctgaaaaaattgatgcagacggaacagatggtcctgctattacatcagatttttatcaaacatggattaatgcgtatggcagcgtagatccggccgatgcagattcaagattctacaaagacaatgcaaaagtaccagcacacctaaaagatcttacaggacttaatccgacaaatgatcaaaatcattactactgtgtaaaagcagaagattttgaaatcgacagaggaatcatgagaggaattccgtgggctgcaagaaaagatgccagtggtgcattttttaaatgtgatggcggatacagaatttatcctgtgaaacaaattaaaggaaacggaccagataaaaacgttgggtatgttgatcttaaattgaaagtcgattttacgaacgaaggaagtttgcactcatcaggatacagagtttctaaataccaatttagtcatacttctcctgacggaaacacctacagtagtgtagatatcgtattacttcgttatgctgaaatttttatgatgcgtgctgaggctaaattaagaaaaggagataatggtggtgctttagcagatatgaatacagtaagaacgtcaagaacagcacgtgctccaattccagctgctttaccggcaataaacttagatattttgtatagagaatatggattcgaattttactgggaaggtataagaagaactactcaaattcgttttggacattttgaagatgtttggactgaaaaaacagatactgatgtaaacaagagattgttcccaattccgcaagtagcaattgacggagcctctaacatcgctggatatttagtacaaaataaaggatattaagaaagtttgtttatttgtgtttaatcagaaggctgctattcacagcagtcttcttgttttttatttttttaagagagggtagttttaaaatttttgaaacaccctgttttacttttttattctttttaacctacacaaaaaaagctgttttgcggcttcattttaagtataaaaacaagctataaatctgtttttattttaacgacctttttgccccaatcctaaagtttgttaccgttttctcaaaattcattaatttatttcaaatgaaaaattcatttttagtcattacaatgttcctgtcttttataggagcaggtaccctgtattctcaggatttacttaaaatacattcgcataacgattacaatcagacaattcctttttgggatgcttatgccaatggagcatcgtctatagaagccgacatttttttgaaagataatgccttgtatgtttcgcatgatcaggaaaatatcactgcttcccgaacattagaaacattgtatttgaagcctttagaaactgctttaaaaatgaaatataaaaaagagcaacagctattttttttaatcgatataaaaacaaatgccgaagcaacacttaataaattaatttcagttttaaaaaagtatgaaaccttaaccagtgataaaaatttaaaaataatcatatccggaaaccgaccaaatctggaaacttacactaaatatccatcttttatatattttgattttcaggaattagggacatcaatttcaaaagaaaattgggaaaaagtagcaatggttagtgttgatttcaaaaaatattccgtctggaatggtttaggaagactaacgcatgaagatcttgataaagtaagtgctgttattgcaaccggaaaaaatactggaaaaccttttagattctggggatgtcctgatacaaaatcagcttggaaagcttttacagaattaggcgttgatatcattaataccgatacaccatacaattgcgcgcagtatataaaatcattacctaaaagattggtaaccgctactaatttttcaaatgtttataagccgagttataaaacagaccagaaagaccttccggtaaaaaatgtaattcttttaattggcgacggaaatggattgtcacaaatttcatcagccgctttggctaatagcggagcattgtctgtaacacaattaaaaagtatcggctttataaaaacacaatcagcagatgattttataaccgactctgcagctgccggaaccgctctggcaacaggtcaaaaaacaaacaacagagccattggaacagattctttaaaaaagccaatggtaaatattatggagctgttgcaaaaaagaaatttcgctacaggtgtaattactacagatgaggttacaggtgcaacgccagcttcattctacgcacacaaggtagaaagatcagatacagaaggaattgcaaaggatttactgaaaagtaaattgaatctgtttgttggaggcggaggcaatacatttaaaaatgccactttagaaactaagtttaaagttttgaagaatataaatgaaatgcaaaccacaactgctgataccgttggtgtttttatagctcccggcagagtaccatctgttttagaaggtcgaggaaatgctttagcagatgctacaaaaaacagtcttgaatttttaagtaaaaagaacaaaccttttttcttaatggttgaaggagcacagattgacagttttggacacattaataatgctgccggaatcgtagccgagactatagattttgatacagccataacagaggcacttatgtttgcagacaaaaacgaaggcactttagtcgtaattacagcagatcacgaaacatcaggttttggtattccacagggagacctgaaaagccacaaaatagaaggcgattttataaccaatgatcatactgcgacaatggtacctattttttcatacggaccacattcgcaggattttcaaggtgtttacgaaaatacagaagtgtttcataaaatactttcgctattaaagtaaggcgaattacagaggttataaaatgagcttttaaaaaatagaaaaatgaaaataaatgccaaaacaatcctttttttaagcatctcgttatttttagaaatgacggtaattgctcaggaaaaagtacatacttacgtcgacccgatgattggttctgaaggagtgggaagagtttttgtcgggccttcatgtccgtacggaatggtaaaaccaagtccagattgtacagcaggacctaacagcggttggttgccaattcccaaagaagtaaccggttttagtcaggtgcatgtaagtggaacaggaggaggtccaaaatacggaaacattcagataatgcctttttcaggaggattagacaaactcgatcagacatcttttagagccgaagaaaatgtaaagctggggtattacgaaactgtttttaaagaaaacggaataaaaaccgaaataacaacaggcgaaaaagtttccttttatcgtattacatatcccaaagatcaggtcaaagctttaaagattgatcccggatttttcttaggagaacaagaagagcctgacggaagagaagcacagcaatttgttggttcacaaatagaaatagtttctgatacagaaattcgtggatacagcagaattcgaggcggatggaataatggtcgtgcgtatacggtttatttctgggccgtttttgatcagcctattgcgaaacacgttacttacaaagacgggaaattttatccgaatgacagagcacaatttgattctggaaaaaaaacagcggcattggtttcttttggaaacgaaggcaaacaagagcttaatgtaaaaattggaatttcatttttgagtgaattaaaagcaaaaaacaatataaaagtagaaattccacattgggattttaatgccgttttagcgactttagaaaacaaatgggaacagttattaaaccgaatcagactttcggcagatacttctgtcgattataaaaaaatgttttacacaggtttgtatcatacgatgattatgcctgtagaccgaacaaatgaaaatccgttatggacgaataacgaaccgtattatgatgacttctatacgatttgggatacatttagaacttcaagtccgttaatcaccttaattgatagtaaacgtaaggtagaaatcattaatgcaatgctgaatatctacaaacgagaaggttatttgccggaaggcagaagtggtaatgataacggaagaacacaaggcggttcgaatgctgaggtagttttagccgatgcttttgtaaaaaacttaaccggtatcgattatgaattagctttaaaagcgatgctcaaagatgctaccgtaccaccaggaggaaatgaagaaaaagaaggtcgaggcggtttactggattatatacgattaggatatgtaccatacggaacggatcgtgcaggaaacagaactatcgattattcgtataacgattacaacattgcagttgttgcgaaagggctcaataaaatggaactttatgagcgctacatgaaacaggcagacagctggcagaacttatggcgcgcagattatacggacaaaggagcaacaggatttataatgcccaaagatgctaatggaaagtggttagacgatattgtttttggagaatcaaaaattcagaaaccaacttttaaatatacacctgtaattatcgaatcgccttggtacgtttgtcattggtgtgtattcttttacgaaggtacttcatgggaatattcatttagcattccgcatgatgttccggagcttgttcgcaaatcaggtggtgaaaaagcctttgaaacccgattagatacttttttcaattcaaatttatataacgtagcgaatgaaccttcgtttttaacaccatgtttgtatcactggatcggaaaaccgtatttaagcagtgaccgaataagtactatcatcaagaataattttaatacatcacacaaaggtttacccggcaatgatgattccggagccatgtcgtcttggttggcgtttcacatgatgggattgtatcctaacgcaggacagccatattatttactgaatacacctttgataaaacaaacaaccatgacattagaaaatggtaagagttttacaatcagtactaaaaaaaggagtgataaaaacaaatacataaaagctgcttttttaaacggaaagccacacaacaaggcatggatttcacatgatgatattatgaatggaggtgaactccttttcgaaatggattcgaaaccttcggcttggggaacaacaattttaccaccaacaaaataaagatacagcaaatgaaaaatgcacttttatcccttcttctttgtgccttttatcagttcgcaggagcgcagagaagtgtaccggaactcaaaaacaatacaaccttgcattacgaatgcaaactgcatggtcagacaagagccttgaagctaaccgcaaacgtaagttcagatacgctggtttttcacttggaaaccagaggagtaaaaagcgatatcgtaattgcacaacaagctttaaaaaacggaacagcattaagttttaatcaaggcgaaaatacagctgttttgcatctaaaaccaaccgagactttttttatgatttcgcgttcagcttatcaggatttagtacaaaacaataaatttgtatacaacaatacaacctatgatgtggtaaatccaaaaccaaatgatgaggttttcatagaaggaaaagcaatagatgtgctgcatgtaaaagcacaaattgacaacacagcattatggattataaaaaatcctgattttccgataatctgtaaagtcgataaaaatccgctgggaatagattttactttaatgaaaatagaatagaagtaattaaagttattgtttatcgttatcctaacaggttttcaaaacctgttaggtatttcatgtaagatttaagataaagccattggcttaacaaatttttgtagcgccggattttagtcaggcgttataattatgtataaaaaaagtcccaccgaagcaggactaaagattttcatctacggcatatagccttattgtgataagattaaagattagaaattttaatcagttacaaatgtatagaaaaaataaattgattctaatgaggaaaaccgttttttgatatattttttttatgttacatttcgtacgtaataaattttaagagatatggcaaagattttaggattagatttaggtacaaatagtattggttgggcattaatagatgatacattaaataaagtattaggtattggaagtagaatattccctatgggagttgaaaatcttggagatggcgataatgaaatgtctaaaaatgcaagtagaaccggagcaagaggagttcgacgtcaattttttagaagaagactaagaaagaaaattttacttcaaaaactttctgaaaatagtatgtgtccaatggattctaaagattttgaaaactggaataaaacaaaattatttccaacagttaagttagcaaaatggtttgcattaaatccttatgagcttagacaaaaagctctaaatgaaaaattatcattagaagaaataggtagaattttttatcatttaattcaaagacgaggatttttaagcaatagtagaaaaggaggtaatgatgatggtgctatttttaaaggaaatccaaaagaaggaaaaattggaattgatgatacattagaaagcattgaaggtaaaacactgggttcttatctattcgaaatatatccaaaagaaaatcaaccttttcaggatggcttggagagaattaggaataggtatacaactcgtaaaatgtatgttgatgaatttgaattgatttggaataaacaagcgcagttttattcgaatttagatttagaattaaaaacactatttggaggaagaaaattagacggatataaagaagatggaattttgtttcatcaacgccctttacgttcacaaaaacatttggttggtaattgtacttttgaaccaacaaaaactaaatgtccaataagtgctattccttttgaaatgttccgaatttatcagtgggtaaatacagtagaatacaatggaaagaaaatttctcaagaagaaaaagaaaaaataattgaactattgttatcttttgataagattgagtttaagaaattacgaaaagcaattggtaaagaaagcgccgaatttaaattcaattataaagatgatgataaaatagtaggaacatacactatatctaatttatcaagtaaaaaattcttcggtaagagatggtttgatttttcggagaaggaacaagaagatatttggcatgttttgtatttttttgacagcaaatcaaatcttaaagaatatgctattaagaattggaattttaccgaagaccaagccattgcgatatcaaaatttaatgtaaaagatggctatgcaagtttaagcagaaaagcaattggaaatattttaccttttatgcagcaaggatatacctatgatgttgctgttgtaatgggcggaattaaaaacgcttttggagataagtggcagaatgatacctttaaaaataatcaaaagcagttggaactaattgataatattgaagatattattagatcaaaaatttcaggaggttttatcgatagtattaaaaatataatttgtaaagaatttggatttgaggataagcaattaaaaaaactttaccatcattctatagttattgatgtaaaaaggctactggacaaattaccaactgataaagaagctgataaagaaattcaagctattagaaatcctattgtcattacagcgttgtttgaattacgtaaactcgttaacgaattaatagatgaacatggacagtttgatgaaataaaagttgaaatggctcgtgacttgaaaatatctaaatcacaacgaaataagattcgcagagatcaaaaacgattagaaagagaaaatgacagagttaaaactgaagttgaaaaatatagcagagtttctcacgatactattttaaaatttaaactttgggaagagtgtaaacaaacttgtccatatactggagcttcaattcctattgctaaactgtttacaggtgaaatccaaatagaacatattcatccatggagtcgttcactaaatgatagttttagtaataaaacattatgctatgcgaatgaaaacagactaaagggagatagaacgccgtttgaattttatggaaacgatgaatcgaattggtcaagtattaaagaaagagcattaaaattattttcagatacaaaagaatatccgaatgcataccagaaatttaaaagatttgtgcagttaaaatatgacgacgattttacatcgagacaactcaatgatactagatttataagtaaagaagcgaaaaattatttagcacaaatttgtaataaagtagttgtttcgccaggtcaaatgactgcaaatctccgtcagaaatggggcttaaataatgttttaaatgaagagaatattaaaacgcgtgcagatcaccgtcatcatgcgatagatgctttagtactggcttgtggcaaaacgagttatttgcaagagttatcgagatggaatcgttacaacagaaactatgatttaaaaaagtttcctctgccttgggaaacctttaggtatgatgcagaaaaagctgtggataaaatattaatttcacataaaagacttaaaaacattgtaactgttagaacaaataaaaccgaaaaaaatggaaatactcataaaaatacaggagtagcagcgagaggacaattgcataaagaaactgtttttggaaaaagaaactttaatggagaagaagcatttcatattagaaaagcaatagatagtttaacgactgaaaaacaactagaaaaagtagtagacgaaacaataaaaaaaataatacataaaaggattcaggaattgggaggatttgtaaaaggaacaattcctttaaagactttttttatagttgatccaaacggagttaaacaaccacagatttttttacctaataaaaatgggaatcctgttcctattttaaaagtaagattgaaagaaaatataggaaaagccgagcagctaaaagatgatttaaatcaatgggtaaatccaagaaacaatcatcatgtacttatctacaaagatgagaaaggaaatttaaaagaagaagtagttacgttttggacggttgtggaaagaaaaagaaaaggttttcctgtttatcaattaccaatagatgggatagagataattactactttacatataaatgatatgtttttacttaatttagatgaagatgaaataaactggagtgatttagattatgaaaggttaaacaataatttgtttagagtacagaagttgtcgtctaaattttatgaatttagattaagttctgagtcatcgatacaaaataattttcagcctttttatattcgaattaacagttttggtgatggtaaaacaggttggaaaacttttaaaccaattaaagttaaagtttctgtaagtggaaaaattcaaaaaatgtaatttcatttcaaaaatttggtatgattttatatctacttaaattgttgatatgacatgacatgacaaagtatattcttaactactccttatgaagagtgattgaaaatcagattgaggcagaagaatttattatcaaattaatgtagataaaaagaaagaagtgattaaaagtatttgaaggtaatattataacggttctttgacataaatttccgaaattttaatttctaaaaaacaacttaaagattaataaaaaaaatatttttagattcgtatggtaggagcattttcatgttgtggtttgattaaagattagaaaacatgatatttttgtaccaacaatctcaccgttccaattagttgtggtttgattaaagattagaaaacacgatatttatattctttctatttattgaagctgagtagttgtggtttgattaaagattagaaaacacgatattccttatccaacaagttcaacattcgaattgttgtggtttgattaaagattagaaaacacgatattaaatgctcgtctgttttagtgttccaaatagttgtggtttgattaaagattagaaaacacgatattacgttatggaaaagaatatttatcagatatgttgtggtttgattaaagattagaaaacacgatattattggggcgaaataaaagaaaactctatacgttgtggtttgattaaagattagaaaacacgatattacttagtttggataaactcaggtaaacagagttgtggtttgattaaagattagaaaacacgatattgtctggtttttccggatcgacgtaaggcttgttgtggtttgattaaagattagaaaacacgatattactttagccctgttcggtttaaacagtttcgttgtggtttgattaaagattagaaaacacgatattctacttcaaaccttatccattgcaagccctgttgtggtttgattaaagattagaaaacacgatattcctgaattccaattgctacattataagcccgttgtggtttgattaaagattagaaaacacgatatttccaaaaaacatttattttaccaggcaggagttgtggtttgattaaagattagaaaacacgatatttaacatatccagttttattgcaataaactagttgtggtttgattaaagattagaaaacacgatatttttggcaatagatcatacggcgtacattgagttgtggtttgattaaagattagaaaacacgatatttattcagaatggattgaatttacattctttgttgtggtttgattaaagattagaaaacacgatattatttgatggagaaacctattacaagtacgtgttgtggtttgattaaagattagaaaacacgatattcacctgctgcaagatataagataaccggaagttgtggtttgattaaagattagaaaacacgatatttcaaaaccaattactttaaaatcttcgcatgttgtggtttgattaaagattagaaaacacgatattcattggacgaaacggaattatttaagaccggttgtggtttgattaaagattagaaaacacgatatttatatctaacgaggttaatgcgtctactatgttgtggtttgattaaagattagaaaacacgatattacaagttatctattggaaagaggaaactaagttgtggtttgattaaagattagaaaacacgatattttatacttcattacattttatttctttcatgttgtggtttgattaaagattagaaaacacgatattctatattacatttatttatatcttatatttgttgtggtttgattaaagattagaaaacacgatattatcaatccttctttaatatctatcattgcgttgtggtttgattaaagattagaaaacacgatattaaaaagcttcgcagaaagccagcgggacctgttgtggtttgattaaagattagaaaacacgatattaataatcctccaacacctcaggggtttggtgttgtggtttgattaaagattagaaaacacgatatttgttcgggattggcattagaccggtccctagttgtggtttgattaaagattagaaaacacgatattagggaagaatgtcacgcccgcatcaagaagttgtggtttgattaaagattagaaaacacgatattgttgatacggcaaacagtgagccttggtatgttgtggtttgattaaagattagaaaacacgatatttcatttttttttacattatattcttttattgttgtggtttgattaaagattagaaaacacgatattttgccttgttttatttttatccttcattacgttgtggtttgattaaagattagaaaacacgatatttatccaaaaacaaaaccttatccccaccgcgttgtggtttgattaaagattagaaaacacgatatttgatgtttggaatcagttaaaagaaatggtgttgtggtttgattaaagattagaaaacacgatatttacttgactctattggaaaatgggagaacagttgtggtttgattaaagattagaaaacacgatattttgatttgtttacaactaccgtagtttgtgttgtggtttgattaaagattagaaaacacgatatttttgatcctgcaaactattcaaagcatcctgttgtggtttgattaaagattagaaaacacgatatttttctgatccggatgccatcaggtattttagttgtggtttgattaaagattagaaaacacgatattccttcccaaaaattaagaggtgcaagctggttgtggtttgattaaagattagaaaacacgatattagttggcttgtttgcttctcatatacaatggtttatatacgaatatcgtttagaaaaatgcctcttttatgctttgataattcataattgaggcattttttcaattgtagcgtttattttttgaatggagacagtaaatgttgtttaaataatcagtgtcagaataattcaagttgcgtcggttgaggagctgagggttgagctgcttttccccaaaaattcaaaatattgccaaattgtttatcggttattcgcagtacgcttacttttcctaggggaggtaaaagtttatgaattcgcttttcatgaacatcggcactttcgctgcttgcacaatgacgcacatatacagaatattgcatcatcgaaaatccatctttcaataaattggttctaaacccagatgcatttcgcctgtctttttttgtttctgtggggagatcaaaaaaaacaaacaaccacattattcgatatccgttaagctccataatgctggatatttaatttttttcctatttcctgtaaagcattgttggagagaactagcagtcttttgtaaagcaatcatcaaaggacttttttcatccttaaaataaactgttctggtgagaatttgtaataattcagccttgataaccgtgtttaaatcttgttcatcaaaacgctgcataatttcataaactttttcatcgacaataggacgaaacggttccataatatcatcggcaagggcaaaagcattatacttgcttttatgatgaatgcctaaggtgtttaataatccacttcccgaaagtgcccttgcagttgcggctcttaaaatggcataaccataattcaaaaaattattaggatagtcaccatagcgttctcgcttaataccatcaaattgtaaattaggctgagggaaatgtttccaatattgctgtgccgcaaccccttccatattagaggaatcaccacttaaaactttactggcaagaaacacaaaagtgttttgttttgatttcgttattttttcgagtaattgaccctgatttttaatcttttcaataatagtttgttgccacaattgtttctttagtggtatagaagcttcaatttgattcttgaatatttcctgctgaatgtgatgactgttaagattcagtaacattccattaggtaaatgattctttccgcagattataatagaagtgttattctcaacaagtaaattcaccgcaggaatactgaggtaaatttcgttatgatctagaaccagaaaacctatatcttcaatcgggatagtactttccttgatttctgattttaatactagttggttattttttgctgtaatagaaaacttgttttcaattaaaatagttctttttagcataactttaattatttgtttaaagttctagtttaaagttcttatttttttacggttttcctcagttcaagaatttagttattttttatactaaactttgtatgcaatctctaacacattaaaatcttttactacaatatcgatcgtttgtacggaattttctataattatttaaaaaaaagcagaagttggaaacatataatgatagcgccggatattaatccggcgctatcattataaattaggtaataaacatccatcgggtcggtagatattttaatttcaagacaataagagtgtataaactgtcttcataggttatcgtattacttctaatggcgcacctggttttgggcgataaaggaacattttgtattcaatcgatttaccactttgtggatcttctctcattaatgtagaaagattaatataatatttatcggttttgactaaagcgaccattttaccgcggccataaaagcgtaacatatattgatcgaaaacaaaaggagcaagttcattaacatctttcacccatgcgtctactaccatttgagattcatacattttggtaacgtaatgagcttgctccatttcaaattgttttttgtaatatttaaaagcaagtgcatttacatctttggtattgtagtattctattagttctttataaaaagcttctacttcttttagaagtttatctttatcttctttggttaaatcggctccattttgccaaccttcaatatcattttcataaggagcaattgcatcaaactctaaatttacttcgtaatacggtagtttgcctttttgtgcaggcaattcataacgtaaggcttctttaaattcgtttactttttccaatacatattccccatagttaatgctgagttttaaagctatatttcccatgtcgatttcatgtcccatattatattctttatctacaggtggtgtcatgcgaatggtgagtttttgctttcctgattttagtatcgcatgattaataggtttagaacctgacataatgcgaggattgtattcttcaaagactggaaaatcattgatcaaggcttcaaagctaaaattagcagccttttctatgtgcaaagtatatgttgggttatagtcatatctttttacttcgttataaatgttggttactttttttacgttttcttcgttcgtaatgtcttctttatttatttctttttgagcacaagaaaataaaaaaccaaaacagaataggagggtataaactgtcttcataggtttatcgtattacttctagtggagcacctggttttgggcgatagaggtacatatgataccaagtagcttcactggtttcagggtcttctcgcataagtgtagaaagattaatatagtatttatcagttttcactaaagcgaccattttaccgttaccataaaagcgcagcatgtagtgatcaaaaataaaaggagctgtttcattaatatcttttacccattcatctactactatttgagactcatacattttggtcatatagttagtttgtgcaatttcaaactgttttttgtagtatttagaagcaagcgaatttacgtcctgcttttcataatcttgtatgatgtttttataaaaatcttctacctctttgagcagtttgtctttatcttctttggttaaatctacgccgctttgccagccctcgatatcctcttgataggacgctatggcatcaaactctaaattgacttcataataaggcagtttgcctttttgttggggcaattcgtatcgtagagcttctttaaagtcttttactttttctaacacatattctccgtaattgatgctgagttttaaggctatattttccatgtcaatttcatgctccatattgtaatctttatctacaggaggtgtcatacgaatggtgagtttttgtttaccgggttttagtatagcatgattgataggtttagaaccagagataacgcgagggttgtattcgataaacataggataatcattgactaaggcttcaaaagtaaaattggcagctttttctatgtgtagcgtataactcgggttgtatttgtatgtttttacttggttgtaaatattagttactttttttacgttttcttcgttcataatatcttctttatttatttgtttttgtgcaccagaaaataaaaaagtaaaacagaataggagggtgtaaactgttttcataggttatcgtattacttctagtggagcacctggttttgggcgatgcaaatacatgtggtaccaaactgatttaccagtttttgggtcttctcgcataagtgtagaaagattaatataatatttatcagttttgactagagctaccatttttccgtcaccataaaatcgtagcatgtattgatcgaaaataaatggtctagtttcattgacgtcttttacccattcgtctgctactatttgtgaatcatatattttggtttgataattggtttgtgcaacttcaaattgtcttttatagtattttgaagcaaggctatttacatttttggcatcatagtatcctatcagttctttataaaattcttctacttctttgaggagtttatctttatcttctttggttaaatcggctccattttgccagccctcgatatcgttttgatatggggcaatggcatcaaactctaaatttacctcataataaggcagtttgcctttttgtacaggcagttcatagcgcaatgcttctttaaattggtccactttttccaagacatattcaccgtaattaatgcttagttttaaagctatattttccatgtcgatttcatgccctatattgtagtttttatctacaggtggtgtcatgcgaatggtgagtttttgtttgcctggttttagtatcgcttcgttaattggcttagaacctgacataatgtgaggattgtattctataaaaatgggaaaatcattgactaaagcttcaaatgtaaaattggcagctttttctatgtgcaaggtataggttggttatattcatacatttttacttggttataaatgttggttattttttttacgtgttcttcattcataatgtcttctttattgatttgtttttgtgcacaagaaaataaaaaagcaaaacagaataggaggttgtaaactgtcttcataggttatcgtattacttctagtggtgcacctggttttgggcggtagagatatattgggtatgcagaagctttacctgtttctggatcttctcgcataagtgcagtgagattaatatagtatttatcggtcttgactaaagcgaccatttttccattaccataaaaacgtagcatgtacccattaaaaataaaagggcggtcatcattaacattttttacccatgcgtctacgaccatttcagattcatatattttggttatataatgagtttgttccatttcgaattgtcttttgtagtatttagaggcaagagcatttacatcctgattttcatagtcttgtatgatgtttttataaaattcttctacctccttaaggagtttgtctttgtcttctttggttaaatctacaccgttttgccagccctcgatatcctcttgataaggcgcgatagcatcaaactctagattgacctcataataaggcaatttgcctttttgttggggaagttcgtagcgcagggcttctttaaactcgctaactttttgtaacacatattctccgtaattgatactgagttttaaggttatattttccatgtcgatttcatgtcccatattatactctttatctacaggtggtgtcatacgaatggtgagtttttgtttaccaggttttagtatagcatgattgataggtttggaaccagacataacatgaggattgtattcaataaacattggataatcattgactaagacttcaaaagtaaagttagcagccttttcgatatgcagggtatagcttgggttgtatttgtatctttttacttcgttgtaaatgttagttactttttttacgttttcttcattcataatgtcttctttattgatttgtttttgtgcaccagaaaataaaaaagtaaaacagaataagagtgtataaactgtcttcatcatttatcgtattacttctaatggagcacctggttttggacgatgcaacataagtccataataagtataatttcctttggcatcctctctcattaatgaagaataattgatgtaatatttatctgttttgactagagcaaccatttttccattgccaaaaaatcgcataacatattgattgaaaataaatggtttagtatcattaacatttttcatccatgcatcaactactatttgagaatcatatattttagtttgatagtggctttgtgcaatttcaaattgtcttttgtagtattttgaagccaatgcatttacatctttggcatcataatatttgatcagttctttataaaaatcttctacttctttgagcagtttgtctttatcttctttggttaaatcaaccccgttttgccagccctcaatatcattttgatacggtgcaatagcatcaaactctagattgacctcataataaggcaatttgcctttttgttggggaagttcgtagcgcagggcttctttaaactcgctaactttttgtaacacatattctccgtaattgatactgagttttaaggttatattttccatgtcgatttcatgtcccatattatactctttatctacaggtggtgtcatacgaatggtgagtttttgtttaccaggttttagtatagcatgattgataggtttggaaccagacataacatgaggattgtattcaataaacattggataatcattgactaagacttcaaaagtaaagttagcagccttttcgatatgtagggtatagcttgggttgtatttgtatctttttacttggttgtaaatgttggttactttttttatgctttcttcgttcataatgtcttctttattgatttgttttttttgagcgcaaaccatcaggctgtaactcaataatagtgtggttagtagttttttcatgatagtaagtatattttatcggtttgatagtcccattgcaaaaaagtgatgtcacctttgtactcttttttagcatcaagtattggtttgttttgttttttatcatattcgtcgtttataataaatatagttcctgtggctgagaaggagagtttaattccttcaaattctatttttgttttcacaaaaaagccattttcatcgataccgtaccagtcttttaccccaattacggcttcagcggtaccattatattcaaaagatgctatcgtttcgtagccgagtgttttgtatttgttggatatgtttatcttaaattctatagctgttctaatactcgatctgcccgctttatgaaactctttaaaacccgccagtttgttgtactgaaaatcgatagtggtgtctatttgccctgatacaacaaagttcaggtttacggcactctggtcgtcagccagtatgtaggtaagaccgtcaatcgcttttaataccgcataagcaatagggtggcgcctacataaaagctccagaagatcccattgtatggcaacgcccaaaaggggagtggctttgagttgaagatcaacacccacacctaatctgcctttcagttccggatgttttttaccatctataggatcacacgaccaggaagcagcagcagcgattttaggatatagcattttg

SEQ ID NO: 2654 - DNA, 23378 bp, synthetic construct
  misc_feature 1..23378: note = Synthetic
  source 1..23378: mol_type = other DNA
ctcacccaattgtgcaatactttcaaaaaacgacgcatccgaaaaatcaaaagttgcttcctgaaatggcttggtaaacaaggacaacaaatcgtaaaacatcgtggtgaaataagcaatctcttccggggaatcatccgtgcgcaaaatctctagttcaaaaagcttggcgttaaataatgcggtattatcgattacttttttgtcaattaattcaaaatagggactgtaaaagtcatttggtatttgcttcatgcaaccaaagtccaaggcaaccaattggtttttttcgttcaccaaaaaattcccaggatgaggatcggcatgtactttctttaaaatatgaatttggtacatataaaagtcccaaagtgcttgtccaatgctattggctacttcttgattgttgtttttggcggtaaattccgaaagatgaatccccgtcatccagtccatcgtaatgattttctcggaagagaattccggataatattctgggaaaaccaaatttgctatggcactacaagcggcaacaacttcctgactttgtttgagttccaataaataattggtttcctcaatcaatttatcctcgacttccttgaaatatttatcggaatcttttccttgcagattaaacattctaatagcaatgggtttcaccaaagccaagtccgacgaaatgctattagcaacgcctggatattgaatttttacagcaagttttttaccattttttacggctaaatgcacttgcccaatgcttgcggcatttacagaattggcattaaattcgtcaaaaatttcgtaaggtgttttaccaaaatttgttttgaatgtttttaaaaccaaaggtcccgaaagcggtggcactgaaaattgcgacaacgaaaacttctctacgtaggcttgtggcaagaaacttttgtccatgctcaacatttgagccactttgagtgcgctaccttttaggctcttgagtccgtcataaatatcctcggcattatcttcattgagtttgtcgcgagtcaaatcctgattgaccaatttttcgccataatacttcaaataatttacgcctactttggcacctgtttgcatgagttttgtggctctttcaatttttgaagtcggaatataatcgattgttttcatttattttttttgtattttttctttgaaaatgaattttccaaagtcaatcaagctatcaataggaacgatattcatcaattcaaacgacgcttttacggatttttcgatataaatatctgttttttcaaaagcggcagaggaatcgtccatccaaaatttaatggtaagcaagaactgaaaccaaaacgattcggttgtggctttttcttgaaattcttgcaatcgttcttgctgtgttcgatagtcatcggtaatgatttcagagatgtaggatttgaacttttttcgcatatcgcccaaaatcatgatattcttcagttggttttgatgttgtttcaaggtcattaccacataacttctgttggcggtaatcaattcgaaaaacgtaaaataaaaactcaacaacttacttttcatatcgtaggtttgatagtcgggatttttgtcaagcatttcgattgttttatccataaaaataataaaaatctctttttcgatgctttctaaagtgccaaaaaagctgtaaaattcggcttcagtaaaatcatttatctttgtaaaatgaaatactgattttggtttttcattgtgttccaatgtgtaattcatatacatggatactattctgtcttttgatagtgcctgttttttggttgccattttaaatacatttaaattagagtataaaggtacgtaatgtttaactaattattaatatagttaaacaaaatattttttatatttgaataataataattgatacttaaaaaaaatcgcatgaaaaagaatgtattaataacgggtggttcgggatttattggaaagtatttgacagctatgttgctggaaaaggggtattcggtttcgattctttctcgagaaaagaaagaaaacacgacaacggtctcctattatacatgggatgttaccaatcaaaaaatagaagaagctgcggtgcttcaagcggattatattattcatttggctggagaaaatatcgcagatcagcggtggactcttaaacgcaaagcaactattcgggctagtcgtgaggaatcgattgctttgttgtattcggttttaaaaaagaacggtaaaaaactcgatggatttgtttcggcttcgggaattgggatttatggtgcttataacggcgagggaatatgcaccgaggaaactgctgctgcgtctgattttttgggagttacttgccagcaatgggaggcagcagttgctccaattgctaatttaggcattcgtactgtaaaaattagaacaggattggttttgggtaaaaacgaaggttttctaaaaaaaatgctacccgtttttaaatatggattgggtgccgcattgggttctggtcagcagtacatgccgtggattcacatacacgatttgtgcgccatgtatattgctgcaatagaaaatccagccatgcaaggggcgtataacgctgtagtagcggataatactaccaatactattttttccaaaaagctagcgcatgtgttgggatttgcgctttggttgcccaatgttcccgcctttattttgcacttgatgttgggcgaaatggccgtaattgtcctgacagggcgaagagtttcgtctgataaaattagaaatctagggtttcattttgaattcaaagatcttgaggaagctttggaagattgtttatctaaatagctttaatttagaacaaaatgtagctgtgtggctaccgttttggagattttggcaataatgacatttggtataacgatgccgtaatcatccgtgttcaggtcgaattgcgaatccaatacaatccccattttagttttttgtagtacggctataatgctgatgttttttgttctgccgtgaatttttagttttcctttaatttggtagctggtaggtgtttcgggcacattttttaaatcaaatttttcaatgattcccgtaaaatgtgcttgcggataccggtcactctcgatgtaatacctgttgaaatgatcttgcatcaattcttttttgaagacaaacgcacgcatattcgccttacagataagttcactgttttcaagagttatggtgcatgttacggcagtgtttatggctttgacttcttcaaatacaggtacggatgcttcaaaagtaatactgccattggtggtggtaatttttttttgagcaacagtttgtagtgctaaaaataggagcgggaataggagtagttttttcatagctggtatgaattgagtacttaaagttagcttttttttaagaattattcttgtttttttttaggaaaatacagggtattcgcttttaaaaatttttcaccacaaattccacaaattttcacaaattcaaagtctgtttttggtatgtttgagttaattatgatgttattgacgggttcatttttgcgtaaatttgtgtaatttgtagttaaagaaaattatgctttttaaaagcgaatgccgtcaggaaaataaatcgagctctatagttcgtaggatttgtttgtgaggaagtatttttggtgattgctgtgcgtgagggatgtagtggagctcttttttttgcctacccagttagggttttgaaccctgactgggtaggcaaaaaaaaagcgggaacgaaagcccgacccgaagtttttacggagggtcacgcccaaataatacaaatgttagctatacaataatgcttattttaactcaatcaaaacattatacttgctgaagcttgccagtgtttccttggcactgtggttgaattcttcttcgtgaatttctcgttcttttttgaggtcaatttgcttcaagcagttgctaaaacgtttgacttcctcgagtgtggttatgattaaaccgggaacggctacgtttttgcccaattcgtccttggcaaccattgtaaaataggaggagttgcaatgtttgacaactccagtttgaatattctcggcttctacacgaataccaacaatcatggaacttttgcccacataatttacagatgctttcatggttacgagttcgcctacctcaatgggtttaaggaaattgacggtatcaacggaggctgttacgcaataattcccagagaatttggaggcacaagcaaaggcaatttgatccagtaaggaaaggatgtagccaccatgaattttgccactaaaattggtgtgggaaggaagcattaattctgaaatagtgatgtaagaggacttgacagttttgaaaccggtattcataatggtttaattttggttaaaaggagatttttctttttgtacggcggttataaaatagcgtgtttcgccccaccaggaaaaagttcggtatttttctacataggataatttaacatattgtccttgaagattttgtaaatcagttatcacttgtttgtcggcatccaaaaccgagaatgtaaatatttgagctccagaaatgccttggctcaactcgccttcccatgttttcataatgactcctttgtggcttatttttatgagttcgcccgaccgcatgccttcgctaaagggaacgtaataaataaaggcaaaataaacaaccactacaagtgtggcaagggcggcaataatggttagtactcgtttcatttttagttaatttaaaagttgattttcgtcggtttcggctctttttaagatgttatcgggtagggcttttttggctttggcacccatttttttcaatttttcgacgcttacaataaggtttccttttccgtctacgagtttgttcattgcgccttggtattcggttttgctttcgtctatttttttgccaattttgattaaatcagccacaaaaccttcgaatttgtcgtataaagcacccgcttgacgtgcaatttcaaatgcattttcttgttgcttttggttcgcccacatgctatcaatggtgcgcaaagtggctaataatgtcgatggtgttacgatgacaatgtttttttcgaatgctttgttgtagagtagcgtgtcctcattgagtgcgatggcaaatgcgggttctatgggaataaaaagcagtacaaaatcagggctttctatttggtataaatcctgataattcttttcgcccagttgttctacgtggcgttttatggaattgacatgctcctttaaatagcttattttgagcatttcgtcttcttcattggtgtacttttcgtaagcagttaaggaaacttttgaatcgacaatcatttttttgccatcgggcaaattaatcaccacgtctggaaaaacgcggtttccggactcggtaatgtggctttgttgcacttcgtattcgcgtcctttttctaaacctgatttctcaagaacgcgttctagcactaattcaccccaattgccttgcattttgctatctccttttagggctttggtcaagttgacggtttccttactcatttgaagattcatttcgcgcaaacccagaatttgttggcgcaaagccgcatgataatcaatgctttctttgtgggtatcttcgactttcttttcgaataattgaattttatcttgcagcggtgtcaagatatttttcatattcaggttgttttgttcggtaaatttattggatttttcgtctaatattttgttagccaaattttcgaattccttggtaaatttttcctgtagtttttcgacttcttctttttgctctttgttgcgttcccaaagattgtcaaaatcgacttcttttttcgaaagttggatggcaaaactatctttttcgtttctaatggtctctttctcttgatttacagtttgcaattgcttttcgaaagtcgctttgtctagtaatgcctgctctctttgttgcaataattgggcatttaaacctactaatttttcctctaaactacttttttctgattgaaagcgagccgaaaacaacaatttgccaatgaaaatgccaatagcaaatgcaatgataaacaccaataaaaagagtagcatattcgtcataaaaggaggtatttgaaaaaaacaaaagtacgcataaatacgtagtccttcctttttaagagcatattaatttattttttaaattatttggattcggtgacgcaaccttttgggtttagcgaactctttgaaatataaacgaaccaaaccgtattattatgaaaaaaattagtgctttttttatgctttcgttgagtatcatttcgtgctctttgaacaccgattctccatctgtttcttgcggtaataccaagaacgtagctttcaaaacgtacagctattgcaatactttgattgccgaaaccactacctctaaagcgattgtggtggatacgcaacaaaagtttgatgcttattttcagccgtgtgttccgccagttgatgatgcaaccaaaaagaaaatcgattttggaaccacgatgttgattggcgttttttcgggggttaagcctactggcgggtacggaatcaaaatccaatcggtggtggagagcgattgcgaagtggtagttggcttttacgaaagtgtaccgcaaccagacgaaaacgttactcaagcaaccacttatcccaaagagttaattacaatcccaaaaacgaccaaaccaatatactttcaacgggtaactcaaaatacagattatgtggttttggggagttttgcaggcgaatgtataggctctgaatgccagcaattttacggtattgacagtcaaaaagtgcttcgttattcaaatgttggctatggcaattacgagatgcgtttgtatgatgctcaagctttggtttacaatgaggattttgcggatttttccagaaatattcctagagaaattataaatttgaaagggcaaaccaaaacctatggcgcaccagactctcacgatcaaggtggaatttatgtagcattatatcagggcactatggttgccaaagtgtatcttgacaatgataataccgccgatcaaaatgccgctatgttggtttttaaaaaaatacattcaggataaaatagtgcttctaaaatcaaaaaattaaccttttaaatcaaaaaacagcatgaaaaaaatagctataattatggtattatttttaggaatttcctcctgcaccttggataaagtatccggttttgaaagtgctagtactataaatggtacttagatttgggaaaaatcagtgggtagcattaccggtaatagtgttgaaaccccaacgagtacgggtattgagcggaaattagtttttacaaacgatggtaaagtaatggtctatgccacaggacaagaaactagaagtgtggcgtatgagataaaacaagggaaaactatttttgatgatttagatcacaatttactcgtttttgacggaatgacttacgtaatttcccatattgacgccagtagtttaattctggatgataattttcccgacggctaccactttcattataaaagataaagtggctttatttatatggcattaaccttcaaattatttttcttgaacgaaaatcttacccaactcatacaaaaatgtgtgcaaaatgatcgagcgagccaacagcaattgtaccagttgttcgctcccgttttgtatggaatttgtttgaaatacatgaaaaatgaggccgacgccaaagatgtatttcaggaaggatttgtattggttttccaaaaaatgcatcagttcaagcaccaagggagttttgaagggtggctgaaacgcatttttatcaacttgctcattaagactttgaagggtgccccaaaaaatattttgttactcgaaggatacgaccttgccgatgctagttttgaggacgaagcattagaatcagttcccataccacaagaaaaattactagaatacattcaggatttgcctgatcaataccgattagtattcaatttatatgtttttgaaaaacgaaaacacaaagaaattgcccaattgttacacatatccgagggcacttctaaatcgaatttgaatcgagccaaaatcaatttgagaaatagaattttggccgccttaaagtctaaaacagcatgaaaaaagaaacgatagaaacactattttcttctatggaagatttttcaagtgtgccaccacctgaattgtgggaggctattgaggaacagttaacgccacccaaaaagaaaaaacgagtagtagcgtggtggtttctagccgctagtttgctggtagggttgggtgtgccaacgtatttggggtatcattacattactactgaaggcgctgcaagaggacttgttgtacccgaaaaacaaaatgtagtacaagtgcaaaaagctacaatttctggcaaagccaaagtgtaccaaccgaaagttatagtaatagcatcaaaaaaatttcaatccaataataccaatgcagccatagccgaacgagaaaaggagcaaccatcaaaaacgagccacaaacggaatgcaaccagagtggtttggacggctgctaaatacaatctcgttcctaaatctacccatttgatagaacaaaaagacaatcatagtgtttcccaaaacgcgttggctacccttccgggaaaaagccaaaaacccaattatgatggtattcacgaccaaacaaaacagtctgaaacgaatagtagcaataaccaaagcaatcaaaatgggactttggttttgaatgctacggctaaacctacagttgttctttcagataaaacaactcccaaagccgaaaaaaccccaacaaccccaacacaaaacaaagatgaaaccaatgccaaagttacccaagaattagctgttttggatcagattttagaccaatcgaaacctacagaaaaaagggaagatgtagccactaaaacagcaatttcaaaatggtctttgggtgtttttgcaggattaaatagctctcaaaattacaaaaacaacactgcactaggcactacaattgatgccaagcaaggcgctaattttggcgttacggcgagtcgtaccatcagcaaaaaatggggtttgagttccggattcaaactcaatgaactcgggcagcagttgaacaatgtttcctattacagcacgaaagctactttgggcattgatgttaccaattttattgttaacacggacaaagctaatttggttgttctggccaataatcctaattatttgtttattgccaacgctaatgctgccgtaagcaacaccattggggtttcgacaggggaagtctcacaacgcctgaaatatttcgaaatgcctatgtccgtttcgtacgccctttttgatcacaataaaaccagtatcaagatgaatacagggggatttgtggggaaactggtttcgaatcatgtttttttaaatggtgcagcaatagggggaaacagcaatgtaaatgattttgtatacggtgctttatggagtagcacggtgcaataccacctttttaatcaaacccagctctatgtggagccaggaatcaactactatatgaaccccttgcaaggaactccttttaatcaatttcaatgggtttttaattttggaatgaactggagtttttagaggttttttctatggatttatattgcctgttgattttgtcacaggcttttttttgttcaaaaacgaaatttaattgtttttttttaaaaaaaagtcccaccgaagcaggactaaaggtttgcacctacggcatatagccttattgtgataagattaaagattagaaattttaatcattgcaaatataagtaaaaaaaactttagtttgtatgtggaataccgtaaggtgggtaattattttctccgtagctttaaaaattcttacaaaacaggaattgatatggcaaaaatattaggtttagatttaggaacaaactcgattgggtgggcgatagtggatgataagtttaataaaattttgggcattggaagtcgaatttttccgatgggtgttgagaatttgggtgatggagataatgaaatgtctaaaaatgcaagtcgaacaggagcaagaggtgtacgacgtcaattttttagaaggagattgaggaagaaagtgttactaaaatcactttcagaaaataatatgtgttcaatgagtttgaaagattttgaagattggaaacagactaaacaattcccatctgaaaaattagcgacatggtttgcaatgaatccttatgaattgcgacaaaaagcattgaatgaaaaattatctttagaagaaataggtagaattttttatcacttaattcaaagaagaggttttttaagtaatagtagaaaaggtggaagcgatgatggagctatttttaaaggaaacgctaaagaaggtaaaattggtattgatgatactctagaaagtattgaagggaaaactttaggttcttatctgtatgagatatatccaaaagaaaaccagccttttcaggatggattagaaagaattcgaaatcgatacaccactcgtaaaatgtatattgatgaatttgagttgatttgggaaaaacaagcgcaatttcattcgggtttaaatgatgatttaaaaaccatttttgggggaagaaaacaagataattacgaagcagatggtatcttatttcatcaacgtccattacgttctcaaaaacatttggttggtaattgttcttttgaacctacaaagacgaaatgccccataagtgctattcctgttgaaatgtttagaatttggcaatgggtaaatactgtagaatacaatggaaagaaaatcaatcaaatagaaaaagaaaaattgattgagcaattgctttcgtttgataaaattgaatttaaaaaactacgaaaagccattggtaaagaaagtgcggaattcaaatttaattataaagacgacgataagatagttggtacacatactatttccaatttatcaaataaaaaattctttgcaaaaaaatggtttgatttttcagaaaaggaacaggaagatatttggcacgttttgtatttttttgacagcaaatcaaatcttaaagactatgctattaagaattggaattttagcgaagaacaagcaattgcaatttcaaagtttaatgtaaaagacggttatgccagtttgagccgaaaagctattggcaatatcttaccttttctacagcaaggatatacttatgatgttgcagtagtcatgggtggaataaaaaatacttttggcgacaaatggcaaaacaatacagcagaaaacaatcaaaaacaattagatttaattgataatgtttatgacattgttagggctaaaatttcgggtggatttatagatacaattaaagatttgcttcgaaaagactttcaatttgatgacaaacaattaaagaaactctatcatcattcggttacaattgatgttacagcattactggaaaaactaccagttggcaagaatgccgacaaggaaattcaggctattagaaatccgattgtaattactgctttgtttgaattgcgaaaattagttaatgaattaatagaagaacacggtcaacttgacgagataaaagtagaaatggctcgtgatttgaaaatttcgaaatcacaacgaaataaaattcgcagagaccaaaaacgattggaacgtgaaaatgatagagtaaaaagcgaagttgaaaaatacacgagagtttcgcacgataacattttaaaattcaaactttgggaggagtgtaagcagacttgcccttacacaggtgttacaataccagttagcaaactttttacaggcgaagtccaaattgaacacattcatccttggagtcgttcgctaaacgatagttttaataataaaacattgtgttatgcggatgagaacaggcgaaaaggagacaaaacaccttttgaattttatggaaatgatgaattggattggattgctaggaaagaacgagcattaaaattattttcggacaccaaggaatatccaaatgcttaccaaaaattcaaacgatttgtacagcaaaaatttgatgatgatttttcttcaagacagttaaatgacactcgatttataagtaaagaagcgtcttcttatttaacgcaagtttgtaaaaaagtaaatgtttctccaggacaaatgacggccaacttgcgccaaaaatggggtttgaatacggttttgaatgatgaaaatgctaaaactagagaagatcatcgtcatcacgctattgatgctttggttatggcttgtggaaaaacaagttatttacaagagttgtccaaatggaatcgctataatagaaactacgatttaaaagattttccaatgccttgggaaaccttccgatttgatgctgaaaaagcggtagataaaatattgatttcgcataaacgcatttctaatgatataactattcgatatactaaagtagagaaaaacggaaaaacgcatataaataaaggtgttgctgcgcgagggcaattgcataaggaaaccgtttttggtaaacgaaatttcaatggagaagaagcatttcatgttagaaaatcaattgatagtttaactactgaaaaacaactagaaaaagtagttgacgaagctattcgaaaattaatttttaaaagaattcaagaattaggcggatttgtaaaaggaacaattcctgctaatactttttttattgttgatgagaacggagttaaacaaccacagattttcttgccaaataaaaatggtgcgccagtaccaattttgaaagttagaatgaaagaaagtatagggagggcagaaaaactaaaagataatgttaatcaatgggtaaatcctagaaacaatcatcacgtacttatttataaagatgaaaaaggaaatttaaaagaagatgtagttactttttggacagttgtagagcgtaaaagacaaggtttattagtttatcaattaccgattggaggtaaagaattagtaactacattgcatacaaatgatatgtttttaattggattaagtgaggaggaaattaattgggaaaacatagactataatattttgaatgagcatttatacagagttcagaaaacctccaagaaggagaaatcatttgaatttaatttcagagccagtatcgcatcatcattagataataaaaatcaagaagtctctattcaaagttttaaaaaatggattgaagttaatccaatcaaagtaaaaatttcagtatcaggaaaaatttctaaaatgtaattctatttttaaaaaagttggtgtaaatttacaccaactaaaattattgttatgacacgacaaagtatcactttagccaagcaaaatgatgaatggctgaaagcacaagttgcagaagaagaatttaccagcaagagtgaggctgtaaattatttaatcaaacaagctcgtgaacgtgaagaatatcataactatgttcaaatgaaaattgataggggtttgaaaagtggttttagcactaaaaccaaggaaaaacttttggcggaaattaaaagtaggctaaatgtataagtatcatttatcttttgaagcagaagaagatattgtaaggatttttgagtacggtttaggaagatttggtttgcaacaagcaaataaatattacgatatgttgtttgaatgttttaataaaattgcatcaaatccgtttatgtttccaatggttacaaagtataaggatatagatcgttgctgtgtttgtggagttgatactatttattacaatattaaaggtaataaaattgaaatcatcacaatcatcggaagacaagatttttaaatgttctttgacatatagtttttcaatctcttaaacagccaaaccacaactgaaaggcatggcatccgcccagtagggatgcagtagctttcagttgtggtttgattaaagattagaaaacacgatatttgatacgatactgttaatctaaagtaataagttgtggtttgattaaagattagaaaacacgatatttattcggtcatctaaatttgacattaattcgttgtggtttgattaaagattagaaaacacgatattcttttagttttggaagaccaaggatattccgttgtggtttgattaaagattagaaaacacgatatttcttgagatttacagatgctgtgttccgttgttgtggtttgattaaagattagaaaacacgatattgcaaattttatcgtatttaaacgggtttcggttgtggtttgattaaagattagaaaacacgatattgaaatattatagcttgagtagctttcgcgggttgtggtttgattaaagattagaaaacacgatatttatctttgcatatctttgcatatctttgcagttgtggtttgattaaagattagaaaacacgatatttatattaaaaccattagctaatacattaccgttgtggtttgattaaagattagaaaacacgatattcaacggtgtaatctttccaatcagttgagtgttgtggtttgattaaagattagaaaacacgatatttgtttcacaagtacaccgtagacctgtacagttgtggtttgattaaagattagaaaacacgatattggattagaccacgaaataggcgccgctgtagttgtggtttgattaaagattagaaaacacgatattttttattttttttacaggatcacccagcgggttgtggtttgattaaagattagaaaacacgatattttcctgtataatgtcatacatccattggtcgttgtggtttgattaaagattagaaaacacgatattgagaacggattttttttatagcaagacgcagttgtggtttgattaaagattagaaaacacgatattgattttttagtcaaagtatgctcgattccggttgtggtttgattaaagattagaaaacacgatattcgtctttattggacatctctataacttttgcgttgtggtttgattaaagattagaaaacacgatatttttatctaccaaaaacaacctttgcaaaacgttgtggtttgattaaagattagaaaacacgatatttgttggcaatgatataattagaagcgctaggttgtggtttgattaaagattagaaaacacgatattagtatagtccgattgccttattgtgttgtagttgtggtttgattaaagattagaaaacacgatattggatgccgaaattgttacaagagaatttttgttgtggtttgattaaagattagaaaacacgatattaacgatgtggttgctcaaccagaacaatcagttgtggtttgattaaagattagaaaacacgatatttcacgcttaccgctcatagaaaatgtactagttgtggtttgattaaagattagaaaacacgatattcctttttctttccaaaaagtaaccgatgtagttgtggtttgattaaagattagaaaacacgatattttttggcaatttaaaactgctccgcacttgttgtggtttgattaaagattagaaaacacgatatttagacatcttttttgtgttgtaacctctgtgttgtggtttgattaaagattagaaaacacgatatttattgaaatagaagacaatctaatcaagcagttgtggtttgattaaagattagaaaacacgatatttgtcaacaactcaaccactactactggagtgttgtggtttgattaaagattagaaaacacgatatttttgggaaagcgactttcacttcttcctgtgttgtggtttgattaaagattagaaaacacgatattcgtttggctatttgctttcgttcgtattttgttgtggtttgattaaagattagaaaacacgatattccgtttgcgccacaatgtttggattggccggttgtggtttgattaaagattagaaaacacgatattgctaaaaatttagtttgttttcgatttcagttgtggtttgattaaagattagaaaacacgatattaatttacaaacaaacaattggctttatatagttgtggtttgattaaagattagaaaacacgatattggttggggcaaaaaatcagatgatggctgggttgtggtttgattaaagattagaaaacacgatattcttggggtaggtaatattggaattgagtgtgttgtggtttgattaaagattagaaaacacgatattattcatggcgaaacacccgaatcacaagacgttgtggtttgattaaagattagaaaacacgatattattcgtgaagatttaattgatggcataaacgttgtggtttgattaaagattagaaaacacgatattttataaaaaataacagttcgctaaaccctagttgtggtttgattaaagattagaaaacacgatattaaaccaaagaggaatatgattatctgaaaggttgtggtttgattaaagattagaaaacacgatattttatgtgcctaatttttacaacgttgataagttgtggtttgattaaagattagaaaacacgatattcgcttttgtcctacacgttcccaacggacggttgtggtttgattaaagattagaaaacacgatatttttgtttgtaaattttttggtcaacacgaagttgtggtttgattaaagattagaaaacacgatattttttaatgccaaaagtagttctggacataagttgtggtttgattaaagattagaaaacacgatattaatacagattttgaacaattaggcggttttgttgtggtttgattaaagattagaaaacacgatattaaacccaagaggagtacgattatctgaaaggttgtggtttgattaaagattagaaaacacgatattaacaattgaagaagaagaaattgaaattccgttgtggtttgattaaagattagaaaacacgatattctcggttcttgtctttaaaagtaactttgggttgtggtttgattaaagattagaaaacacgatattaggtaacaaaaatggacgaaagtccagttgttgtggtttgattaaagattagaaaacacgatattgtatcatttgcttactattccgtactggttgttgtggtttgattaaagattagaaaacacgatattggctatcggataattcgttccaggacttcggttgtggtttgattaaagattagaaaacacgatattttgctcaataaccgtttcaagactccctctgttgtggtttgattaaagattagaaaacacgatatttcatatcaaacctataaaatcctttgatacgttgtggtttgattaaagattagaaaacacgatattgaaaccaaagaggaatatgattatctgaaagttgtggtttgattaaagattagaaaacacgatattccgacaaaaatgaattcattggcagtttagttgtggtttgattaaagattagaaaacacgatattcatcgatttcattacatcaatcaacaaccggttgtggtttgattaaagattagaaaacacgatattcattatctaattcctaatataatgataagcgttgtggtttgattaaagattagaaaacacgatatttggcaattgcaaaatgcacgatggctttctgttgtggtttgattaaagattagaaaacacgatattgcaataaaccgcctcaatgagcatctggacgttgtggtttgattaaagattagaaaacacgatattaattaatactaatatcaggaacaaagatccgttgtggtttgattaaagattagaaaacacgatattaattaagcattctctgggtgcgtttggcttgttgtggtttgattaaagattagaaaacacgatattgttttgtgtttgtaagtttagtcataatccgttgtggtttgattaaagattagaaaacacgatattccaaagtactgattccacttgccgcaatcagttgtggtttgattaaagattagaaaacacgatattacgtgaacataaatccaaaacagtccgccgttgtggtttgattaaagattagaaaacacgatatttggcaattgcaaaatgcacgatggctttctgttgtggtttgattaaagattagaaaacacgatattcatcccgaagcttctttacccacgcatctcgttgtggtttgattaaagattagaaaacacgatattaattggcttgttaccttctaattatcaagagaataaagaagaatatcgtaaaataaaatgcctcttttttggattgataagccaatattgaggcatttttttgtttgtaataggaagggacaggttgagacctgtctgtaaggtgtgggattgcaaatgaaattggattatatttatgaaaattttaaaaataatcgatgaaaaatagaaagagaaatcgaatgaaaggattcgattattccagcaataatatttattttgttacgatatgtgttcaaaatcgagaatgttgttttggatacgtagggacaggttgcgacctgtccgtacaccatccaaatgaaaatcatccaaatgaaaatcattcaaatgaaaatcatccaaatgaaaatcatccaaatgaaaatcatccaaacgatgataagaaaaatgatttttcaggtataaaaatgaatttgaatgaatatggtaaaatagtcgatgaacaaataatttggttagaagaacaatatcaatatgcagttatacataattatgcggtcatgcctaatcatgttcatattattctagaaatagatagtttgaaggttaaagacagtacaacaaaaataaaatcattatccagtttaataggagctttcaaaaccacttcttcgaaaataatccataaaaaaggattagaaaattttgcatggcaacgttcatttcatgatcatataattagaaatgaaaaggcatacgatacaatttttaattatattgatttgaatccagaaaaatggtttcaagattgttttttttgaaagaaattaaaacaattccaattgcgtgggagcatctactgcatcttgtttggctttgcctaaataattaataatcatcccaaactgtttgtcggtaattcgtaaaacgctcactttacccaatggggggacaagtttattaattcgtttttcgtgaacatcagcactttctccgctggcgcaatgccgaatgtaaactgaaaattgcatcatactaaacccatctttcaataaattccctcggaacagagaggcattcctgcggtcttttttggtagctgtgggtaggtcaaaaaacacaaacagccacattattcggtatccgttaagttccataattgcgggtatttaatttttttcctgtttcctgtaaaacagtgttgaagcgagctagctgttttttgtaaagcaaccatcaatggacttttttcatctttaaaatatacagttcgggtgagtatttgcagtatttccgatttcaaaagtgtatttaattcttgttcatcatagcgttgcatgagctcaaaaactttttcgtcaactaggggtcggaacggttccataatatcatcggcaagggcaaaagcattgtatttactcttatgatgaataccaagagtattcaataaaccgctgccagatagtgctctggcggtagctgctcttaaaattgcataaccataattcaaaaaattattggggtaatccccatagcgttctcgttttattccgtctttttcctgattgggtaaggggaaatttttccagtattgttgtgctgcaactccctccatattgctggtgtctccacttaaaactttactggctagaaaggggaacgaatttttatttttagttattttttctaataattcgccttgattttttattttttcaataattgtttgttgccaaagttgcttttttaaaggaatagaagcttcaatttgatttttgaatatttcttgttgaatatgatggctgttgaggttgagaaacattccgttgggtaaatgattgttgctgcaaatgattattgcggtattgttttctgtcattaagttcattgcgggaatgcttaaatatatttctggattatccaagacaagaaaaccaatgtcttcaataggaatagtactttctcgaacatcggatttaattactaattgtaaatttttggcggtaatcgaagatttattttcaattaatattgttttctttatcataattaaaaagtatttaagttgttgttagtcagggtttaaaattatatgtttaatgtcatttgtttttacgtaaaacctcattcaagtgtttttttttgaaatataattttgaagcaattcacaataaggattattccgttgtgaaaacattcaaagcggcctcacaagggtcgcttttttattttaaaaacaaacctatctttgttgttttaaaacaccgtcatgtcccaccgccattttatcctccacaaaccctacggctatttgagtcagtttatttatgaattgaaacgcaagaagaaactcttgggcgaattgcacgattttccagcaggaacaatggctattggtcggctagacgaagattcggaagggttgcttttattgaccaccgacgggaaaatgagtgaaattgtccgaagcaaaaaagtcgataaagaatactatgtgcaagtggatggcatcatcacgcaagaagcgattgatgaaatgaaaaagggagtagaaataggtttcaacggcacgaaatacatcaccaaaccctgtcactcttttataattaacgaaattccagattttggaccaagaggaaaaaaaattcgggacgaacgccacgggccaacaacttgggcttccattacggtcaacgaaggtaagtttcgtcaagtcaggaaaatgacggcagcagttggttttcctaccttgcggttggtacgcattcggataggaagcttatatttgaatgatttacaagctggagaagtgagagaagttatgaattttgaattatgagttatgaagttttaatgcttacgacttactaattaatactttaaagaaatatgttaaatatagttttagtcgaacccgaaatacccaataataccggcaatattggtcgcttgtgtgtgggtacccaaagtcgtttgcacctcattcatccgtttgggtttgtcatcaatgataaaaatctgaaacgttctggactcgattattgggtgcatcttgacgtaaccgaatatcaaaatatccaagaatggattacgcaaattccagacaaatcccgagttttcttgatgagttctcacgcgacaacatccatttatgaagccgaatttcaagatggcgattggttggtttttggtaaagaaagtgtgggtttgagtcaagaaatactgggtttatttgatcccaaaaatcatttaaccatcccaatgtcacccctaatccggagttttaatattgcaaattcagttgcttttgtagtgggcgaagccaaaaggcagatttcagttataaagttgcgtatttaagatttgtatctaattcccccttcggtggttagggggcttttaagttattacaaacttccctttttcgttatcaaaaacaatatgttcgtctttgaataaggtattgaagctgcctttggtaatcaaattacagggttggtcttgcactaccatttcgggcgtcatgataatcatttcatctgtaatttgtatcgccatatcaatatcgtgagtcgagaataagatgcattttcccgtttcatgcgtgagtttttttaagagttttaacaacgaaactttgtgcagtaaatccaaatgcgtagtgggttcatccagaattatcaaaggcgtgtcttgtgccaaagctcttgcaatcaatactttttggagttgtccgtcgctgatttcataatgctttttatgggataaatggctaatttgtgttagctccattgcaagctgaatttgcttttcgtcctcgtgcgataatgtcccaatccagttggtgtagggctgcctgccaagtgccactagttcaaaaacggtcaaattacttggcggtaattgctctgttaaaacgacacttaaattttgagctaaatcgagtgcatcatacgaatggatgtttttgtcatgcaataaaacggttccttctaaaggtttttggatgccaattatcgtttttaataaagtcgattttcctataccattagcaccaatcaaggcaatgagtttcccttttgccaaagcaatagaaagattggaagccaccaccgtttgtgcttttttatggccgtagccaatgcttatattcgaagcctgtaagaggattggagttttcattagcgactatttttttgtttccgaacgagtaaccaaatcacaattggtgccccaaaaatagaggttactgcattgataggcaacgttaaatcacttccaggtaactgcgaaatgctgtcgcaaatcaacatggttatcgctccaaaaagcagcgtactccaaaacaatatttggtggttactggtttgaaataccaatttggcaatatgcggaacggccaatcccacaaaggcaataggaccagcaaatgcagtaatgctccctgccaaaaggcttgtggccaagaggattataaaacgtgttttcttataattcaatcccatacttttggcgtaattttcgcctagtagcaacgcattgagtggtttaatgcacaaaacgctcaatagtaatcctgtaaatacacaaatggctaacaatccaatcgaagtccaagacagattgcctaaagaacccatagaccaaaatgtaaatttttgtaactgttctgcggtgctaaaataagtgagcgtactcacaatagcaccagtaaagctgccaaacattagccccacaattaaaatcgccatggtatcttttaaacgtaacgaaatggataataccgctagtaaaaccaaaaaactacccaaactggaggccataataatggcgtaagacgataataaaagcgcagccaaatacggaggcaaaaatccagcacctagaataactattgccactcccaaactagcaccagaactcaaacccagtacataaggtcctgccaatggattcctaaataaggtttgcatcaacaagccactaattgataatccagctccaacaattacggctgtaatggctttgggcactctaaattctaaaatgatgtattgccaagtttctttgctgggctggttggtaaacaaacagttgaatacctctttta

SEQ ID NO: 2655 - DNA, 23375 bp, synthetic construct
  misc_feature 1..23375: note = Synthetic
  variation 16531..16626: note = n is a, c, g, or t
  source 1..23375: mol_type = other DNA
gagaagagagtgatttaataccgttagtttatagactttaggcagctgtttttgttttgatttaggctcttgtgccattctctgaaaagaagccattaaattcccaatctcgatgaaagcatttttacgagccaagcggtacgatgtagaaacggttccttttttattataaaaaattgaaatttccttcaggtaattttgattggcattgatggatttttctaaatgcatgggcatgtttaaaaattcccaagaaggccataaaaaatgattggccaaaaaagcaagaccggcacctacaatggtgtccagtattctaaattgaacaagatcccctatgttaggagtcacaattccataaataaaaacaacatacatggttacaaatgtggcactgactttgtaatttgtttgggtaaaagagaatcctaaaagcaagcaaagaatagaaagaatactgattataatgttgtctttgacaaagaaaagaattccaaaggcaattaatccacctaaaacagtacctagaattctatgaaaagaacgttgtttagtcaagccgtaaccgggtcgcatgataacgataatagtcaataaaatccagtatacattatgaaaaggcagtatttttccaataataaaaccaactaatagcgctattgttaatcgtaaggaatgcctgaaaatagtggaggaaaaactcagattctcggtcagagtgcgccacggataatactgcggtgttaagaatttttctaaatcggtatcgattcctgtaaaatcctgtaaattaacaattgaggtaaaagcacgttctacaatttttattttctcgacttgtttttccgcatattccagcatagtggtaagcataaaaacgccttctgaggcataattttttcccaaatccttctcataatcagtgattgccagctgtaaggcgttcaaatcgtttagcaatgtgtgttttggaatataattcgttcgtttttttacacttttggataattgcttcaaacttgcggccaaattgtaggctaagttttgatacgtcagcaacaccttcggatgattgtcgaatttttggtgcaatttttcatggtcaaatgctgtagacaatgccacttcaaggatttctaccattgctataaaaacaagcaacatttttcgattttgatttgaagaaccagcgcttatatggctgttaattaatacttctcttatgttttgatgaatggtgttcaactcgacctgaaggtttaactgcttttcaataattgcttttttatcggcgtctatggtccataaatctcctcttagtttcaaatatttagccgtaagtttgatgcattcagcaatttgtaattcgatgtagcgatgtggtctgatgtagtgaaaaataagggaaacaacgaggtagaataatcctcctgctagaatcaaacccgaatgttgcaccattgcccaaccggtatttatattagaaaatgtcaaggagagtgaaatcagggtggagaaagaaaccattgtagctcgttgtccgtaaacggataacatggatgtcaggaaaactaacagggctaaaaaaggataaaaaatccaagaatacggataaattatatttactagcaaattcacaccagcaacaagaatggtggctacaagaatcccgttgactttatgtttcagactacttggaatgtcactgggataagtaaaaaaggctccaagagctattgtaaaacctacttcgaatttgccaaaaaaagaaaacagcatcaccggaattacagtggcgatagttacttttagggcattagtgaaatacgtcgtatcggtaaatttttggattttatgaatcatacaattgcattgcttgcaaaggtaaggattgtaagaatttttaaagggaatactatcggtcttttaacctaaattttaaatagtgatgaattatcattagagcattattcattggctatttttttactatttttgcaaactgaattaaaagagaacttatttcgattttaatagctaatatttaatataccacgaatgattttaccaattataggatatggtgatccagttttaagaaaaacaggggaagttctttcaccagaacatccaaacttgaaagaaacgattgccaatatgtatgaaacgatgtataatgcctatggtgtgggtcttgctgcgccacaagtaggattagcgcttcgtttatttgtaatcgacacgactccttttagcgacgatgaggaattagaagatgcagaacaaaaagaattaaaaggattcaaaaaaacctttatcaatgcaaaaatgataaaagaagaaggtgaagaatggagtttcaatgaaggctgtctgagtattccggatgtcagagaggatgtatacagaaatccaaccattacaattgagtattgcgaagaggattttgtaatgaaaaccgaagtttttgagggattaatcgccagagtaatccaacatgaatacgatcatattgaaggaattttattcaccgataaaatttcgtcattaaaaaaacgattgattcaaaagaaactgaaaaacattttagagggaaaaacattccaagactaccgaatgaaattctttgccaaaaaaggaagataaaacagctttttaacttcgcttggtatgatttttggtttcaaataaaaataaataagtcaaattcttaataataattccacaataacatgaatttagaaaaaatattagccatttctgggaaaccaggtttatatgtattgaaagtgcaaacaagaaccggatttgtagcagaatcattagcggatggaaaaaaaatcaccgtaaacttgaaaagcaatgtaagcttactatcggaaatttcaatttatacctatgaaggcgaaaaacctttagctgaaatcatgcaaaaaattgctgataaagaaagcaaaggtgcggcaatatcccataaagaagacaacactacattgatggcttatttcaaagaagttttacctgattatgatgaagaaagagtatatccttctgatatcaaaaaagtgctgaactggtataatatgcttcaagcaaaaggacttgttactgatgaagctcctgctgctgcagtgacagaagaggtttcagccgaagaaactccagtagcggaagttaacgctcctgctaaaaaagcaaaagctaaaaaagaataatcatattttaaaatactatttaatcctgttcagttgtttttctgaacaggatttttttatttttaccaaaaactatccctaatgaattcaagacaaaaccaactgcaagctttcgaacgagtattagatattatggatgatttgcgtgaaagatgtccttgggacaaaaagcaaactatgcaaaccttgcgccatcttaccattgaagaaacctatgaattaggcgatgctattttagacaatgatttgaacgaagtcaaaaaagaattgggtgatttgttgttgcatattgttttttatgccaaaataggaagcgagacgaacgattttgacattgctgatgtgtgtaatgaaatttgtgaaaagctaattcaccgtcatccccatatttacagtgatgtggtggtaaaagacgaggaagaagtgaaacaaaactgggaaaaactaaaactcaaagaaggcagaaagtccgttctggaaggtgttccaagaagtttacccgcattagtaaaagcaagccgaatccaggagaaagtaaaaggagtgggttttgattgggaagaatcgcatcaggtttgggataaggttcaagaagaattagacgaattacacgttgaggttgaagcaggagatcaggataaaattgaagccgaatttggggatgttttattttcaatgatcaattatgcccgatttttaaatgtaaatccagaagatgctttggaacgaaccaataaaaaatttatcaagcgctttcaatatttggaaagtaaagcaggagaattgggaaaacctttaatggatatgacacttgctgaaatggatgttttttgggaagaagcgaagcgtcttcctaacaaataggaattggaaatctatgatttccaaacacctcaattttgggaagaagcgaagaaattatagtgttcagatttttaatatccaataaacaattaaaataccaatgtcagaaattaaaaccgagttaaaacgttctttaggattaatcgatgccacgagtttagttgccggttctatgataggatccggaattttcattgtaacatcagccatggcaagagatattggttctgctgcctggttattagttatttggttggtaacgggattaatcacggtcgccgctgcattgagttatggagaattggcaggaatgatgcctaatgcgggcggacaatttgtgtatattcaacgcgcttatgggcgattggtttctttcctgtatggttggactgtttttacagtaattcaaacgggagttattgcggctatagcggttacttttgcgaattataccgctatattctttcctgttttagatcaaactctttttacagtcggtactgattttattttttcgtatcaaaaagtattggctatttttagtataatcctgttaacctacatcaataccaaaggagtagaaagcggaaaaacagttcagttgctctttacttcggcaaaattaatagcgctttttgccttgataattttaggattatacgtgggtctgcaaacggatgttttgtccaataatttcgcaactatgtgggaagccagcaaaacggtagtcaatcctgacggaacaattacagtaacaaaattagcaggaatggctattttgggagcagcaggagctaccattattaattccttgttttctagtgatgcatggaataatgtcactttcattgcaggggaaattaaagaacctaaaaagaatatcccccgtagtttgtttcttggaaccttaattgttactgttatttatgttttagcaaatctggcgtatttggctttattgccaatgcagggagctccaaacgctgctgatattgccagtaacggaatcatgtttgccagtaatgatagagtaggagcggccgcagcaagtatgattatgggaaatgtaggcgtttttgtaatgggtgcattgattatggtttctacttttggatgcaacagcggattgattctttcgggaggacgattattttttgctatggcaaaagacggacttttttttaaacaggctacagaactgaataaaaaccaggttccggccaaagcattgtgggtgcaatgcatttgggcttgtatgctttgtatttcaggaaaatttggggacttattaacctatgctacttttgcgtcattgttgttttatatcctgactattctgggagttttcattcttagaaaaaaagaacccaatgccgataggccttataaagcgtttggatatccggttgtacccgcactttatattgtggtgacatcagccatttgtctgactttactgatttatgataccttcaatacgggattgggattgtgcattgtggcgttaggaattccggtgtattattttgtaatgaacaagaaagagtaaagcaaatggaattaattagctaattttttgagtgaattgatgtctttttaaaacgatttttttaccggataattcaatcaatcctagtttttttaaatccgaaagtaaacggatacagctttcaatggctgttccaatcatgctggctagttcatttctctaaagttgtacttttaaggagttatcttcgtttttcccaaaggtgtcatgcaaatagagaagcgtcccggctaatcttctcttgactgtttttttggctaaatgcaccatgtgatcgtcggcttcttttagatcaccgcaaatgcttttcatcacattcatcgaaaactgattgttcttgccaaagcatcccatcacttctgattttggaatacaaataccatcttttagatagtaaataccatttacattatctccctcttcaaatgtaaccgctccttttttactactatgggaggttttacaataagaaagttttagtaattcgtcttttgttaaggtttttaaagagctaaattctctaacgatacattgttcgcatttgctcatattctttggtattaaaaggcaaatggatatgcaaactgataccttcagaacgattgctctctgtgaaagatttcttcaaaatttcttctgaaaaatccatttcatcctaattaggataactggtgtattttggttccgaaacattgtatttttgtattaaggaatttttcatggcaaaatcatttatagttagtcaaaagtaaagcgactgctcacatattaaaatgacaattatcatattgaaaaaaaacttttacaaaaaaaagaggcttcaaaagcctcttcacaaagaaatttgttctttaaatagtaatgcaatcctgaatcatttttatccattttttagctatttgatgatcttcatgcaaacaaacctgacctatttgatcattctcaattgtgtaaaatggaatggtgtctgttttttcaccttctttgtaatgaaattgaaattcaatttttactatcgtatcgctgttattctccgttgttggaatcagtttacaggactgaattgtatttaaatctacaaaagaaacaacttcttttttggcattaaaatccatcaaaagaaaccctttgtttttttggtctaaagccaatacttttttgttttgtgtttccattaactcaaaattaaagcgattgttttgactgaatttctgttttattgatttaatttttgttttatttagtgaactataccgaatggaatagaaaatggggatggcgattattaacgttagtaccaggccaattatagttacggatgtatccattttttttattttttttagatttataatgcaggattaattgaactgaaaactaaaaaggaatcaattcaaaatagaagataaatatattcttctaattagggtttcagtgctttaaattaccagaaaaaatgaaaaggaaagagtaagagcgaaaccatttcacaacggttgatgtcttgttttgcaaaatgaataatgtacttagaggctttaaaatttggaacagctaccaagtaattttcgtaaaaattactaacgttaggatcaatagaacgatcatgtaaagcaaatacagtatgtacctgtggttgaataaaagctgaagaatgaatgctgtcagcagaaaagaatgaatgtgacttttctgtttgaattgaatccaatgaaatagcatttgcattaaaagcaaataacagagctattgaaaagccaataaaaaagacagttttctgaatccatttcattttgtaaacataaaaaaggagactgactttatgaaattttttttaataaatgaacgttaaatgttaaaatcagctaagtcgtgtctccccataaaaaaacctcgagcagtttattctcgaggttttgatcaccagtatgtgctgaaatttattcggtttttaagtttcgtaattgtttgagtttttctttccaaacatcaagactctctttatgaatagcaatgtttttacgaacttctaatacgatggaattttctttttttgcatttctggtattggtaaaaaactgaatgttattttccaattgaaaaatttcattttgaacttcatcaattttacgcattacaaaaatcttttcattatctaatttgcgcgtatcatggctttctgacaaatgatccattctgtttgagaaacgcaacatatcagtgtcttttttactcaaacttaatttttcaaaaagggcatccagtattttgttgaattttccctcaatatgtcttcttgtgaacggtactttaccaaagtttttccaggtttcaatatgcaattttatggagtctaaatctgttttatggtctccgatcaattggaactctcttaaggtttccaagtaggtttttttagcatcaaaagcggctacttcttccccattttcctcatttttttgctcttttaatttgtcaaaataatgattgcaggcatccttaaactctttccatattttatccgaatattttcttggtacatgccctatttgtttccattcatcctgaatttgtttcatgataggagttgtagcatcaaaatcagtgctttcctgcaattctttggctttagctacaagagctgttttcttgcttaaattgtcgttttggtctttcttaatgtctttataaaatgaatttttgaaagaattgaaatttcttacagcagttttaaaactggcccaagtatcctcatttacctccgatggcacttttccggcagagaagaaagcagttctcaaggcttctaccttttctatttgagccagccattgagaatgtgcattcactttctcggtcgccaaaacttcaatttgagcaataatttcttttttcttttctaaattctcttgttcagttcctctttgattttcgaataaaacttctcgtttatcatgcatttgcttggtcaaatcactgaatttattccaaatatcatctcgatgttctctagataccggtccaatatcctccttccagattcgatgtaaatcctgtagttctctgaaggctttgttaatatcagcttcagtaaccaattcttcaacacgcgctacaattttttgtttttgttctaagttgtgtttgaaatccaaatctctcgcttcccggtctaaatgcagataatcatagaaattttccacatgaaaatggaagttattccacacgtggttgtatttgtccttcggaattggcccggcagttttccatcgttctcttaaatcattaaaatgttttaaggtgtctttgatgttttcctgagggttaatcaactcttttaattcctcaacaatggccaaacgattttctaaatttgtttttagattcgtttgcaagctcttgaaatgggtatttttagtatctctaaaaagagagtaataagtatcaaattgagatttcaacggagaatgatattgaaattcttcgttagggtcttgattttctgctagaaattcttcttttttttcttcgaggaggtggttgtatttagctaaaaatgcttttttaatttcttcaatatgctgcttaaaagtcaaaattttgtcgctggaaactaaatttttcagttcgttgaccaatacttcaagtgataaggtatcataatcctgcatcggaatatcgtgactttctttgagtgtttcgtcttcactttcagctgcatttgtttgtgtaatggcatgaagcgcagttgtatttgctgtttctggcgctattacattctcttcggcgggaacagcagcttcgggttcatttgttggatcagtggcgtgagttgctaaaacgtttgattctaatgaattagattcaatagtatttttgtctaattttccgtctgcttcaggcaggttatcattcttttcttctaacattttttcaatgtgtaaggtttctaaatagattcaactcgaaagatactaaagcagtatgaaaatacaaaacaaaaacttaatttatagtcattttaggttaaatggctttttttttggagctatttcctgctgtccgctgtattcccaattaataaaaactacggctgaaaagccttgtttttctaaatcgggagatgccgcttccatcagggctaggcatttgggttaaaattatgaattgttttcaaaaaaaaagtcccaccgaagcaggacttaagattttcatctacggcatatagccttattgtgataagattaaagattagaaattttaatcagttgtaaatatacatataaattaattaggttgcaatgagggaaaccgtaaagcaggtaattattttctccgtagctttaaaaattcttacaaaatacagattgttatggcaaaaatattaggattggatttagggacaaatagcattgggtgggctttgattgatgataaattaaataaaattataggaattggaagtagaatatttccaatgggtgttgagaatttgggagatggagataatgaaatttccaaaaatgcaagtagaacaggtgcaagaggtgtacgacgccaattttttagaaggagattaaggaagagaatattgttaagatcactctcggaaaataatatgtgtcctatggttgcgcatgattttgaagattggaaaataaccaaacaatttccatctgaaaaattagctgtctggtttgcgttaaatccttatgaattaagacagaaagcattgactaataaattatcattggaagaaattggtcgaattttttatcacttaattcaaagaagaggttttttaagcaatagtagaaaaggaggaagcgatgatggagctatttttaaaggaaacgccaaagagggaaaaattggaattgatgatacattagaaagtattgaaggcaaatctttaggttcttatttgtttgaaatttatccaaaagaaaaccagccttttcaggatggattagaaagaatccgaaatagatatacaactcgaaaaatgtatattgatgaatttgagctaatttgggatacacaagccaaatttcatttcgttttaaataatgatttgaaaactctttttgggggtagaaaacaagacaattacaaagaagatggtattctatttcatcaacgaccattgcgttcccaaaagcatttggttgggaattgttcgttcgaaacttcaaaaaccaaatgccctataagtgctattcctgttgaaatatttagaatttggcagtgggtgaataccgttgaatacaacggaactaaaatttctaaacacgaaaaggacaaactaattgacctattgcttttatctgataaaattgagtttaagaaattacgaaaagtaattggcaaagaaagtgccgaattcaaattcaattataaagacgatgatcaaatagttggaacacatactatttctaatttatctaacaaaaaattctttggtaaaaaatggtttgagttttctgagaaagagcaagaagatatttggcacgttttgtatttttttgacagtaaatcgaatcttaaagactacgccatcaagaattggtattttaatgaagaacaggcaatcgccatttcaaaatttaatgtaaaagatggctatgcaagtttgagccgaaaagcaattggaaatattttgccatttcttcagctaggatacacctatgatgtggctgttgttatgggtggaattaaaaatacttttggagacaaatggcaaaatgattcatcagaaaataatcaaatacaactagatttaattgataatgttgaaggaattgttcggtctaaaatttcgggtggttttatagatactattaaagagttacttcggaaggactttttattaaatgaaaaacaattaaaaaaactatatcaccactctgcaacaattgatgttacagcattattagataaactaccagttggcaaagatgccgacaaggaaattcaagcaatcagaaatcctattgtaataacagctttgtttgaattgcgaaaattagtcaatgaattaattgaagagcatggggaattggacgagataaaagttgaaatggctcgtgatttgaaaatatctaaatcgcaacgaaataaaattcgtagagatcaaaaacgcttagaacgagaaaatgatagagtaaaaagcgaagtagaaaaatacacaagagtttcacatgataacattttgaaatttaaactttgggaagaatgtaagcaaacttgtccttatactggcgttacaattccggttagtaagctgtttactggcgaagtccaaatagagcatatccatccgtggagtcgttcgctaaacgacagtttcaataataaaacattgtgttatgctgatgaaaacagacgaaaaggagataaaacaccttttgaattttatggaaatgatgaattagattggatttccagaaaagaacgagctttaaaattgttttccgataccaaggaatatccaaatgcttaccaaaaattcaagcgatttgtacaaacaaaatttgatgatgatttttcatcaagacaattaaatgacactcgatttataagcaaagaagcttcaacgtatttgaaacaaatttgtaaaaaagtaaatgtttctcctggacaaatgaccgctaacttgcgacaaaaatggggtttgaatactgttttgaatgatgaaaatgctaaaactcgtgaagaccatcgtcatcacgccattgacgctttggttatggcttgtggcaagactagttatttgcaggaattatcaaaatggaatcgttacaatagaaactacgatttaaaagattttccaatgccttgggaaacgttccgatttgatgcagaaaaagcagtagataaaatcttgatttcgcacaaacgtattgctaaagacataactgttagatatacaaaagtggagaaaaacggcgtaactcatatcaataaaggggttgcagcaagaggacaattgcataaagaaactgtttttggaaaacgaaactttaatggagacgaagcctttcatgttaggaaatcaatagatagtttaacaacagaaaagcaattagaaaaagtagttgatgaagctattagaaagttaattcataaaaggattcaagaattaggcggatttgttaaaggcacaattcctgcaaatattttttttattgttgatgaaaacggagtaaagcaaccacaaattttcttgcctaatagaaatggtgcgccagttcctattttaaaaataagaatgaaagaaaatattggtggagcagaaaaattaaaggacaatgtaaaccaatgggtaaatcctagaaataatcatcatgttttaatttataaagatgaaaaaggaaatctaaaagaagaggtagtaactttttggacagttgtggaaagaaagagaactggacaaacagcatatcaattacctcctgatggaaaagaaatagttgcaacgttgcatattaatgatatgtttttactgggtttgaaagaagaagaaattgattggaaaaatccagattgtgatattttgaaagaatgtttatatcgagttcaaaagcttaccgctggagattattttttcagaaaacataaatcttcaacaataactgacgatgattataaacaaattagagggtttggagaaggcaaaactggatggttttcttttattcctataaaagtaaaaatttcagtttcgggaaaaatttcaaaaatttaattctagtacaaaaagttggtgtaaatttacaccaactaaaactagtattatggcaagacaaagtatcactttagccaatcagaatgatgagtggttaaaacagcaagtaacaaatgaagagtttactagcaaaagtgaagcggtaaattatctaatcaagcaagcacgtgagcgggaagaatatcacaactatgtacaaatgaaaatcgatagaggtttgaaaagtggttttagcaccaaaaccaaagaggaacttttggcagaaattaaaagtaggctaaatgtataagtatcatttatcttacgaagctgaagaggatattgtaagaatttttgagtacggtttaggaagatttggtttgtaacaagcaaataaatattacgatatattgtttgaatgttttaaaaactgcatcaaatccgtttatgtttccagttgttacaaaatacatggatgtaaaacgtttctgtgtttgtggaattgattccatttattacaatatcaaaggtgttgaaattgaaatcattacaatcatcggaagacaagatttttaaaggttctttgacatacagtttttcattgtcttaaacagccaaaccacaactgaaaggtatggcatccgcccagcagggatgcagtagctttcagttgtggtttgattaaagattagaaaacacgatattttataaaatataactacttatgcctgacatgttgtggtttgattaaagattagaaaacacgatattttggtaagattagaagccgttagcgtgacggttgtggtttgattaaagattagaaaacacgatattaccgcctcgataacaggggcggttttaaacgttgtggtttgattaaagattagaaaacacgatattacacggaaaagaattatcaatgactaatgagttgtggtttgattaaagattagaaaacacgatatttggtgtgtcttcttcggttttcatccatttgttgtggtttgattaaagattagaaaacacgatatttttgaattctttttcaataagatccaatccgttgtggtttgattaaagattagaaaacacgatattaaatgctagtaataaaactatagaaaaatggttgtggtttgattaaagattagaaaacacgatattaaagaaatcgcaaaacatttaaacacaatagttgtggtttgattaaagattagaaaacacgatattcaaaagcttacagcgaggatgtgactgaaggttgtggtttgattaaagattagaaaacacgatattgtattgctacaattttggcgtggcaggacagttgtggtttgattaaagattagaaaacacgatattttaattaatttagcaccaaagccagcgttggttgtggtttgattaaagattagaaaacacgatattttttttgattgcgttttctgattaagaattgttgtggtttgattaaagattagaaaacacgatattaagggcaaagtaatatccagaatgccaccggttgtggtttgattaaagattagaaaacacgatattattccccccaactgcatttctatcgtcgtagttgtggtttgattaaagattagaaaacacgatattaaatgtatattgaaaacattagtgaatttggttgtggtttgattaaagattagaaaacacgatattacttttgctattcgcatcatgcggaactcggttgtggtttgattaaagattagaaaacacgatattttggaacttttagaagtttgacaggaagcggttgtggtttgattaaagattagaaaacacgatattacacttccggaacttcacaaccttcaactagttgtggtttgattaaagattagaaaacacgatattgctttgctatacacttgccacgggaggcgggttgtggtttgattaaagattagaaaacacgatattcgcttgtgccatttgaatgattgtgtttgtgttgtggtttgattaaagattagaaaacacgatattgctggattcgaatattcttttgatggatccgttgtggtttgattaaagattagaaaacacgatattatttttatttttaacaaccttaacgttttgttgtggtttgattaaagattagaaaacacgatatttttatttatttcaagccgaaatcatactaggttgtggtttgattaaagattagaaaacacgatattgaaagccttataatcaagtaagcgaggaaggttgtggtttgattaaagattagaaaacacgatattgagcaactccatgcaacgtacatcctccacgttgtggtttgattaaagattagaaaacacgatattgaatgtgcattcatgttgaaagaaaagatcgttgtggtttgattaaagattagaaaacacgatattcttttccgtatcggcagtttttaacggatagttgtggtttgattaaagattagaaaacacgatattatttttaacctcgtctaaagtttctaatacgttgtggtttgattaaagattagaaaacacgatattattctttcaacaaagaagattgttgctgtgttgtggtttgattaaagattagaaaacacgatattagtaaaaacaaatacaaaaaattataacctgttgtggtttgattaaagattagaaaacacgatattagttggcttgttaccttctaattatcaaaggaatatggatgaatgtcgtataaaaaaatgcctcttttttggattgatatcccaatattgaggcatttttttatttctatcaataaaaattcgataaatggtagtagaatcatagtaagaggcaagattcaatgattaatttttagtgcaatctgcagggacagatcgcgacctgtccgtacgttatccagatgcaataggtattggggattttccgcaaaataatttatattttttacgatttgtgtgcaagataggaaatgttgttttgggaatgtgaatagggcaggaatagggcaggaatagggcagggacaggtcgcgacctgtccgtatgttagagattagtcgcaaaataatttatattttttacgatttgtgtgtaggataggaaatgttgttttgggaatgtgaatagggcaggaatagggcagggacaggtcgcgacctgtccgtacgttagtnnnnnnnnnnnnnnnnnnnnnnnnnnnnnnnnnnnnnnnnnnnnnnnnnnnnnnnnnnnnnnnnnnnnnnnnnnnnnnnnnnnnnnnnnnnnnnnncaagataggaaatgttgttttgggaatgtgaatagggcaggaatagggcagggacaggtcgcgacctgtccgtacgttagtgattattcgcaaaataatttatatttcgttacgatttgtgtacaaaatagaaaatgttgttttgggaatgttaatacggcaggaacaggtcgcgacctgtccgtacacgagccaatgaatccgtatatggaatggaatgaatatggttctattgcacaaaaacaatggaattggttggataatcagtatgcgtatgttattttacattcttttatagtaatgccgaatcatgtccacgcaattttggaaattgatagtaatttgatttctgattgtgaaataaaaataaaatcagtatcggaactaattggtgcttataaaacgacctcatcaaaacaaattcatttagccggtttgtctgattttgcctggcagcgttcttttcatgatcatataattagaaacgatgggtcttatgaaagaatttataattatatcgaaacaaatcctgagaggtggaatacagatgcgctttttgaaaaataaaattattgtttaaaacaattccaactgtgttggggcattactattttcctgtttggcttttcctaaatagttgataatcattccaaattgtttgtcggtaatacgtaaaacactaacttttcctaacgaaggaacgagtcggttaatgcgtttttcatgaacatcagcactttctccactcgcacaatgcctaatataaactgaaaattgcatcatgctaaagccatcttttaagagatttcctcgaaactgagaggcattccttttgtcttttttagtttctgtaggcaaatcgaaaaacacgaacagccacattattcggtatccgttaagttccataatttaggatatttaattttttttcggtgacctgtaaaacagtgctggagcgaactagccgttttttgcaatcctaccattaaagggcttttttcttctttgaaataaacagtttgtgtcagcatttgtaatagttccgcttttattgcggtgtttagttcttgttcttgataccggttcataatatcaaaaactttttcgtcaacaatgggacgaaaaggttccataatatcatcagcaagtgcaaaagcattgtatttacttttatgatgaataccaagtgtattcaataatccgcttccggaaagtgctctagctgtagcggctcttaaaatagcatacccgtagtttaaaaaattgttgggataatcaccataacgttctctttttatgccattttttgcatgattaggtaacggaaaatttttccaatattgttgtgcagcaacgccttccatatttgtggtgtcaccgcttaatactttgctagccagaaactcaaacgtatttttattttcagttatttttgctaacaattccccttgatttttaattttttcaataatagtttgttgccatagttgttttttcagaggaattgaagcttcgatttgatttttgaatatttcctgctgaatgtgatggctgttgaggttgagtaacattccattgggtaagtggttgctaccacaaataataatagcagtattattttctacaattaagttcatagcaggaatactcagataaatttcagcatgatcgagtaccagaaaaccaatgtcttctattggaatggtactttctcttatttctgattttagtattagctgttggttttttgtcgtgattgaggatttattttcgataagaattgttcttttgatcataatttaagccgttaaattaattgcaaatatttgattatcaatcaaattaacatatttaataatcagttattttacgggaaacctcaatctgccttttaaattgctgatataaaaaaagcgtctcgttttaaaacagtttgatgctgttttaaaacgagacgacctaaagaaattttaatactaattatttagtttaagcgagagttaaaacaataatcttgattacgctcgatttgacaagaaataaacttcttagttatttattccaaatcttccacgctttctctgcttgaaaaataagcatatccaaaccatttttgatttgtgctccttgctgtttggctttttttaggaattgtgtttctgcaggattgtaaatcaagtcaaatgcaatgtgctttcctgtgaaaaactcatacgggatcaatggaaacgcatccacatttggacttgttcctactggagtcgagttgatgatgatttggtaattgtcgaatgttgttgcgttgattcggttatactcaatcgcattttctttagcttctctcgacacaaaagtataaggaatgtccagttcatccaaagcaaaagcgactcctttagaagctcctcctgtgcctaaaatcaaggcttttttgtggtgcggttgcaacaggggttctaatgattttttgaaaccataataatcggtattataccctttcaacgttccttttttggtaattttgatggtatttacagcgccaattaattccgcttttttagataatttatccagaaacggaatgacggtctccttgtatggaatagttatacttaacccttttaaatttaaagtgttttttagtatctctggaagtgctgttatttctggaatatcaaaattttcataggtgcaaccagtaaaattttcattgttaaatttatcggtaaaatatcctttagaaaaagaataactaatattgcgacccagtaacccaaaacgttttctaactgtttctgtcattatttttttttatgttttgcaatgtagttttgcaccatttttttggcccaaactactggaaataaatcttctaaaaggatgtaattatcaaaatttaatcgtaaggcattgcttaaatggaattttgcttttgtattatctgttagcataaaatacaatcctgctaagcggtattcaacttcattttcttccggaaaatattctgaagcttgtaataaggtttgaatggcactttcgaattctcctaaaaattgtagaatatccacccagaataaccaggtgtcaagttcagtatcgccaaattcaactgctttcctgtatccaaattcagcttcttcaaagaagttcatttgcttattgatagtcgcaaagcgtttccaatacaagcgattttggttgtcaatcgctaatgctttattgacataaaataatgctttttggtaatttttttgacgtacgtaaaagtccgtgatggcaatccaacctttatctaagagtggatcttcatgcactgtttgattgaaatattttaaggctaaagctttgtttcctaatctttcataacattttcccattcgaagtaacgcatacgaagttgcatcatctaattcaatggttctgctataactttctatggctttctcgtatttttttaatcgttcaaaagcttttgctttttccatgaaagcaccaaggaattcatcatcaattaaagtagcgtaatcaaaggcacgaatcgcattttcatattcttttacaccataatgcaaacggcccagttggtgccaggcaatttcgctgtatggatttttgtcaatgtatttatttaaataagtaatcgcttcttggttttgatctaaaaattcaaaacaatacactacgttatacaaagcggattggtcttccagatcttcttctaaacacttgatgaagctttcttttgccagttcaagattgtccataaaaagatattccatgcctattaaattatagacatcagcataatcatctgtgtattttaacgcggtttgtaataattcaaccgccttttcgtgttggtctcttttggagcagatattggctttttgaatgtaaatttcttcattggttggttcaatggcatacaactcgttcaatagcttttcggctagttcgagtttgtcgtcataaactagcatttccacctgaactaattttagtccggtagattttgggtgctgttctaatgccagtttgagtgctttttttgctaaagcggccttacccatatcgaggtaatgaagaataatttcttcaaattcttcggagtcaaaaaagagtactttgttggttttcaacatggactcaaatttagacaatgataagttatagtcttcttcttcgttgcttaattgcatactgtgtgtttttaatttggcctaaataaatttagggaatcgtgcgtgtactgcgagggaaagttggaattgttgtgaacaatttaattaacaaaaaaagaggtagtttaaacgtatgccctagccctgataagagtggaaatccttttgctttttgctgacaaaaagtaaaagattaaaacggatagcaggaatagctcccaatttttttaattgttttgaataggtatttcaatatgtatccaatagtacaacttctgctatcaaaaatcgttaatcatttttcttcaatcattattccatccattacttctaatatgatgctgcaaccttctcgtatctcttgttcagaaatggtaagcggtggcgtaattcttatggcgcaatcttcaaataataaccagaataaaatgagtcctttgtcttgacatttaagaatcacttcgtttgttatatcggcactttgggtcattgcagccagcatcaatccttttcctcttatatcctgtatcaaaggatgtaccaaaagtgatctgaatagcttttctttctccatcgcctcatccatgagattggtctcggtaatttcctgcaaagtagccaagcaggctgacgcaatgacagggtggcctccaaaagtcgtgatatgacccagttttggattatcgctcaacaaatccatcattgctgatgaagccgtaaaagcacctacaggcatgccacctcccattccttttcccataactacgatatcaggaacaacatcataattttggaatccaaaaagttttccggttctcccaaaacctggctgaatttcgtccagaatcattatcgcgcccacttcagtacagcgttgacgaacttttttaaggaaatcattatgcggctgaataaatccggcgccaccttgaatggtttccagaataattcctgcagttttggtcgttattttttgtaaatcggcttcgttgttgaaggtaataaaatcaacatcaggtatcaatggacgaaaaatttgtttgcgttcttcaaatcccatgacgctcatagcacccattgtattgccatggtatgcgttatgacacgaaatcaattggcttcttccggtagttcttctagctagttttaaagcaccttcaatggcttctgttcctgaattgaccaaataagttttatctaaaggtgcgggcaggagcgaggctaacaatttgcaatactgaaccgccggactttgtgaatattcgccatagaccataacatgagaatatttgtctaactgatcctttatggcttgattgactctaggatgttggtgtcccaatgtgcaagcggaaactcccgccacaaaatccaagtatttcttagaattagtatcgtaaatgtaagagcctacagcatgcgagacttccatacccaatggatatggtgaggtttgtgcttggtattttaagaaatcgttgttcacggttatttttttaatcttttatttgttaaactgagagaatagtgactgaccagtatacctagcagactgaccactaatcccaaagagtcaggactgctcactgatcacttacttcttcttcttcttatcgtaattcagagtttcttttcggattttcataggaatatcctctttggcctctgccgctttagttgctttatctattttatcgttgtcttcattttcttcggcaggaaaaatatcgtccttggattttattcgttcctctcctcgccaaagcagtcctcttagaatacgtgcattttctggcaactctttctctggataaatatcgccatccacttgctggaaaaacgtaatagtttctatcgcattttcttctaaaataagattgattttgctgcttacattcttattgataccaatgagttcctgagcttcgttgcgcatgtaataaatgacttcggcattctttattatatcaacatcatggagttttccgtctttaaatttcccatagagattttgacccttgacttgattatatccagttcctatcgtgtctttggagactataaatgtgttattgagtactttgagcgaatctaatttttgggtattgttgtctcctatgagatgcatgacatctcctgtgatttggttttctgcgttccaaagtattggatttccaatcattttggtcaacgctgttttagaacttgaatgaatcgaatcacattttccgctcatatcagttttgaaaaaccggacattgttaaacgctctgataattcggtttccttcttttccagtaaccattaatttttttccatggatgtaaaccgagtcattttcgacaaaattcacggcaacagctcttttggttacgtacatagaatccagttttttatacacctcagcataatgcccttttataattccgcgattgatggaatccgttatttttacgtttcgcgttgccgatgcaaattcccgatttcggtcatagtacaaactgtcgcctttaatcacccgatcatcgtatttgatgtacgatttattcaggaaatgagccagatttt

SEQ ID NO: 2656 - DNA, 23375 bp, synthetic construct
  misc_feature 1..23375: note = Synthetic
  variation 13626..16777: note = n is a, c, g, or t
  source 1..23375: mol_type = other DNA
gattgggaggcttttgccgcctatgcatttaataaaagtcactctacttgctatgcctatattgcttatcaaacagcatatttaaaagcacattacccagcggaatatatggccgctgttttgagtaataatatgaatgatattaagcaagtaacgttcttcatggaagagtgtaaacgtatgggtctagaagtattgggtccagatgttaacgaatcgtattataagtttgctgttaatgctgctggtgcggtgcgttttggaatgggtgctgtaaaaggggttggtagggctgctgtggaaaccattgtggagcatagaaaaaaagacggtccttttaaatctgttttcgatgtatctaaacgaatagatttacgagcagcaaataaaaaggcattcgaaaatttagcagttgctggcggatttgattctcttggaagcacgcatagggcacaattttttcatgatgacggagacggaattacctttttagaaaaagcaataaaatatggcgctaagtttcaagaaaatgaaaattctagtcaggtaagtctttttggagaagcgagcgaagtacaaattcctgagcctattgttccaccttgtgaagaatggggaaccatggaaaaacttcgtcgtgaaaaagaagtagtagggatttatatttccgggcatcctttggatgattttaaatcggaaataaagtcgttctgtaatgcgggactatcccatttaaacgatttagaaagcattgtaaatagagaagtgtcctttgcaggtgtaattaccgatgtgcaacatcgtatttcaaaaaatggaaaaggatgggcggcgttcactatggaagattatacagatacctatgaattccggatttttggagaagaatacctaaaattcagacactttttaatgatcaattcttttgcttacgtaaaagtatatgtgaaggaaggttgggtaaatagggatactggcaaaaaaggagatccaagaatgcaattcaatagttttatgttattgcaagaggtaatggagacctatgctaaaaaattaaccattaaactaaatatagatcagctaaaagaggaaggtatttatacgcttaaagaaaccattaatatgcatcgaggcgatcattcattaaattttgtggtttatgaaatggatgaagaaattaaagtgaatttggttagtagaaaacaaaaagttcaaatttctagtgagcttttaacctgtttggaggagcaagaagtgctgtataaattaaattgatgattttcttaaaaaaaatagtagggttatttggagttaagttgtttagttaaaaagaacaaattttaaatcccttattttatgaaaaaaattaatttttttgctggtttagccttcattttacttagtgcatggtcgtgtcaaaaaggagaaacaacagatactccgtttaatgagttaagtacaacagaatctttggcattagttgcttctgtggatgaagtagatgctattatcgatgataatattttttactctgatgatttttttaatgaatcagattttacaggtaaaggcaatcattatgatcgttcagggtacttttctgactgtgccttttttgaaataacttcaaatgaaaatacagtaacagttataattagttttgaggaaggatgtaaagatcgtcgtggcaacgaattgtctggtaccattaccatgacgcgtacaaaagaatctggaaattacgaggcgtctgtagcgtttactgattttactattaatggatatattgttaatggaagtaaaacgtattcaaaaataattgagaatagcaatggtaatccagagagaacaataacaataaatatcactgtagaaacggatggtggtacaattacaaaaactggaactagaactagagaggttacagctggtggtgatacagatacttatcaagacgatgagataactataacaggttctggctcttatacatcagccgatggaattgttataactgctgaaattaccacacctttggttagaccagctgggtgtaaatttattgcacagggtgtaaaacaatatacaaatgcaggagtaatttctgtattggattatggtgatggaacttgtgataacctagcaacattaaccgcagcagatggttcggttacagaaatagaattaagacgagggagaaaagattgcaaagcaagtcatgattaaataatgacattaataaatacacagccattcaagttaattgaatggctttttttataaccatcaagtttattgatagtataataattaaaacgaatatatcgttagtaaggaaaaagtctaataattgactaaatttgcataattataaatacaaacaaaatggcattagaaataacagacgcaacttttgacgaagtagtcttaaaaagtgataaaccagtagtagttgatttttgggcagcatggtgcggaccttgtagaatggttggaccaatcatcgacgaagtgagtaatgaatacgaaggtaaagctgtagttggtaaagtagatgttgatgctaatcaagaatttgctgcaaaatacggtgtgcgtaacatacctacagtattagtgtttaaaggtggagaaattgttagtagacaagtaggagtatctccaaagaaagtctataccgatgcaattgatgctgctttataataaaaagcaatttcctttttaggaatttagaatataaaaaaaatcctgctttatgcaggatttttttgttgcttataacttaaaataagtaagggttcttattttaattacttcctaagatttaattatctttaaactatgaatattcagtcagagctttataaatctacattattccaaaacttggagttaatggcaaatcaagttgttgaaggctttataagtggaattcataaaagcccctttcatggtttttctgcagaatttgctgagcataaaatttataataatggagaaagtaccaaacatatagattggaaactttttgcaaaaaccgataaattatataccaaaagatacgaggaagaaaccaatcttcgttgtcatatgattttagataattcggcatcgatgtattatccggaagttaaaaatttaaacatagctaatcttaataaaataggatttggtgttttggctatagcggctttaatggcgattttaaagcgtcaacgtgatgcggtagggcttagtgtgtattctgatacttatgattattatagtgcggagaagggtagtgagcggcatcatcaaatgctgttggctaaactaaatgaaataggacaatcacagcggcctaaaagcagaacagaaacctatacgtatttacatttaattgcagaaaaaataaagcgtcgcagtcttatctttttattttcagatatgttgcaaacagagactgaggatgaaaagctttttgaagccttacgccatttaaaatataacaagcacgaagtggtattatttcatttaatggatgaaaaatatgaagtgaattttgattttgaaaatacaccacagcgcttcatagatgtggaaacaggggaagctataaatttatatgcagatactgtaaaagatgcgtatcaaaaaagcgtattaaactataaagaggaattaaaattaaaatgcgcacaatataaaattaaatacttgccagttgatgtacgcagagatttttctggtatattaaatacttacatgaccgaaaggcaaaaatttctataaataaaatcatataattaagctatgtctcttgctaataaaaatgcattgcctcaggtgattgcacttaagtctagaatagaaaatattactagcaaaggctatgcttttgggcatcaagacaccacctcttatggtattggttggagaaatgatgcagtaaattatcaaagtgatgtttacagcgttgcgggtgattttccattagtatacgggtttgatcttgggcgattagagcatggtaattcacttaatcttgatggcgttccttttgatgaaatgaaaatgcttatacaaaaagcacatcgcgatggaggaataataacgattagttggcatgctgataatcctgtttcgaaaggcgatagttgggatacaactccggcggtaaaacagttactggatgggggagattatgcgcttatctacaaaagctggataaaaagaattgccgattttatgttaagtctaaaagatgacgaaggcgagttaatacccattgcttttaggcccttacatgaaatgaatggattttggttctggtggggaaaccataattgtagtccagaagaatttaaagccttatggaggcatacttttaatctgttgacaaaagatttcatggcaagtaatttgctctttatatatgctccaaatatgattggcaacgctgaagagtatttggtcaattatcctggagatgaatatgtagatatgttgggtttagatatgtatcaacatggagctgctaaagaatttaagaaagacttaaagaaaaatatagaggtgttaaagcaagtggcagatgaaaaaatgttgccttttgcgcttaccgaagttggattggaaaaagtagaggatgctaattggtggactgttgtgttggatgaaattcttgaaaattcgggaattagctgggtgttgctatggcgtaatcacaccacaagtcatttttatgtgccataccctaatcaattaagtgtagcagattttatagcttttaaaaataaaagtcatgttctttttttaaatgatgtaaaataatataagatagatgaatttgtaatctattgatattgaatgattagcaatcaataaaagttgcttttgatattattttaagttttaagtgtattttttgatgaaaataatttgcgcaattaaataagcgatgtatatttgcaaccgcttaaagcaacggttcggtagttcagttggttagaatacctgcctgtcacgcagggggtcgcgggttcgagtcccgtccggaccgctaaaattttttcaaattttagtaaaagcccacaaacattaggtttgtgggcttttttattttcaaataataccatttaatatcaaaaaaaatgaccctcgcggtgagtgtggcggtgagtaatttatttgaaaaaagttactcaccagttagtgctaaacgcctgtatttgtaggacttacaattttttttattgcataatttgtgtacctttaaaaaggtaacaaggtgagtaattatgctaaatcagttttcagtcttattttatccgaaaagaagggatatggacaagcaagggaaaatacccctttatgttcgtattactgtttctggtaagcgtagtgaaagttatatccaaagacgtatagaacctgataattggaattctgatgctggaaaagcatttggggctacaacaaatatgcgagaactgaatcgctatatggatggaattcgcagcagcatttataaaattcacagtagatttattgaaaaggatattttttttacggctaaagacattcgagatgtctatactggcagagatgaaaagcttaaaatggtagttgaattatttcaagagcataacgatgatctttctcgattagtaggaaaagaatattcagcaggcacattgcaacgttataaaacttgtaaagcacatattgagaattaccttaaaaaagaatacaagaaatctgatattccagtacaagatatagatcataaatttataactgggtttgaatattatttaaagtcgcaaaagaagtgcgtccataatacggcaattaaatacatcataaattttaaaaaaattatacgtattgcttttgccaatgattggatttccaaagatccatttgtgcattggaaggcgagttggaaacgaatagaacgagaatttttaactcaaagggaacttaatacactggagaagaaaacttttacaattcaccgtttagagcaagtcaaagatatttttcttttttgttgctatacaggattggcttatgcagatgtagagaagctcaaaacagatgatattttattgggaatggatgggcgtagatggataaaaactaaacggaagaaaacaaatacccgtagtagcattcctttattgccagctgcggagtctattttggagaaatatgaagcgcatccattggtattggataaattgaatatgcttccagtattgagcaatcaaaaatccaatgcctatttaaaggagattgcacttttatgtggaattactaaaaacctcacaacacatttagcacgccatacctttgccacaacggttacgctttcaaatggcgttcctatagagtcagtaagtaaaatgttaggtcatacttctattaaaaccacccaacattatgctaaggttttggataaaaaaattggtgaggacatggaagggcttatggagcgatatacaaataatgcttaaagatttgtctgcatttacaaattgagctactaattcaagtttggtatttatcctttaaaaattcatttactttttttaaccaagagcattttccttttttaaagtctcaatagagcgcaaaaaaagatcaaatgaaataggatttgtcctgtagtttatttacttctttcagagccaatcgcattccctttttgatatagattatataaaggatttaaaattaggaaagggctataaataggagggcagcgccatctgttttatgcgcccgctaattttaaatactgttcatttagaatcaaaaagggaagggactcaaagaatactaagcgacaagttattgaaatgcaaaacgtataaagttcactaaaaagttgaacaagcgaacgtaagtcaaaaaggaattttccagaaaaaacatataaactcaaattactttttggcttgtgttcaagacttttagacgaaccttttttcctgtaatgtaatgaaaggaaatagggtgaggattaaaacggtttatagttttggacttgcttaataagcctatactgttatggttaaaaatgtgttacaattacatgatttgtcgcaaataattgccattttactgaggttttaagctgatttgtcgcaaactgtgagaaattgaggatttgaataatttgtaaaatgctgtatatgagggaattgaaaactagtgacatcgcgcagcgtgtcaccctcttgctattccctccttagcttaatatcaataaaattagagatatttttagttagaataaataagtcttttaatttgattctttagttgggaatacttcttttcagattaaataattaaaattaattttttctgttaatattataggatatggtttgtttttcaataagatttaatatggattgctttttaaaatatatgcgatttcctattcgaattgggttaataattccatctttagcccattggtataatgttggtaaacttaccttgaaatagtttgccgtttcttgcctagttaataaaatatctggatccgatttagttacttgattcaaataatcttcaattttaacaagtagcttttcggcaattatttctgttaattcatccgcagaaatttctgtaatttgtattgtttttgtttccatcgtaagtttaggtttctatatctttcgccaaataaattaatgtacgactctaaatcaatatttgataacgtgaacttcttccgccaccaataggaataaaaatattttgttcaaccaaattttgtaaatctcttgttgcagtagcttttgaagttcctgttatacccatatattttgttgcattcattccgccttcaaaaccatcaggaccttcttctaacattcttcggattacttttaattgacgttcattaagtgctgtttcaaattggtcgaaaaatttagctttttttaaggtaaattcaatttctttctctgtttgtatttgagcctttaaaactgttttggcaaaatagatgatccagggtgtaatttcattagaacgctgagcagattgtagggcattataatacgcttttttatcttgttcaatagttcttgataaacttaataaaattggtctttgaatgctttgtgataatgctttttcagaaattgctctaccaattcttccattaccatcctcaaatggatggatagattcaaaatagaggtgcgcaattgcagctctaataattggttttttaatggcatttctaccgactagtgacgtatcattaaaccaagttataaaagcattcatttccgcagctacttttttcgagggtggagcttcaaaatgtacaagttctctacctaatgcaccggaaacaatttgcatgggttcttcatgatttcgccatattccaattgcaatattttttgagcccttcatcaacatcgaatgccatgaaaataaagtttgagtgtttataggctccataaaactatctcgaacagcaatcataagctcagaaatgccttccgcttttttatctttggattgtggtaattctgtttgtaatcctaaatttctcttgatggaagacatcacatccttacgacttaaatattccccctcgatttcggaggtttttatagcctcagaaaccatcatattaatcatagtttcagtttgcatagcttctgggagcccctctagaataccacttatgcgtccagtacgttctgcaaattcaaagagtaagccttcaatagacgtagtttcatattgaaattttctccaatctttttgttgccaattgtacttcatgagccgattaaatgtcttattcggctcaaatatacgatttaattgagctaataagtgattttatttggctcaaaatgatttaaaaccttttttctaataaggcaagttatacttgtattatagattcacgtaatgtttatgaccactttttatttatttttaggacttaaataaaaatggaatgctaaaaaaaatactccttatacttcttattttcagtgctttcaagggatactcgcaagatgttaaaatcagtttagcgtcatggaatattaaagattttggacaaacaaaaagtagagaagaattagatgaaattgctgaaattcttcgtgatgtagatattattgcaatacaagaagttgttgcaggttatggtggcgcgcaagcagtagcgaaattgacagatatattaaatagaaaagggagtaagtgggattatgtaattagtagccctactaatagttcaaagtatgtaacggagcgctatgcatttgtttggaaaacaagggatattaaaataaaaaacagaggtagattaataaaggagttagattctctaatagatagagagccttttttattagatttctatttgggcacaaaaaagtttactgtgcttaattttcattcaagaccttttgataaagaccctgaaagtgaaataaaagcacttacagagtatgttaaaaattcttcgaattcttcaatgctcattgctggggattttaacgtagatcagaataaagctgtttttaacgacctaaaaaaaagtggctttaaagctgcagtaactggcaagaaaacaactataaaaagaacttgcgaccagaatgactatttaaattatgctattgataatattttctattctaagaatattaacaaacaagaagcaaaggttatagattttgtaggagtttgcggaaatctagataaagctagaaagttatcggatcatttacctgtttatttgaggttttctattgaatgaatcacaaaaaaaagtcccaccgaagcaggacaaaaggttttcacctacggcatatagccttattgtgataagattaaagattagaagttttaatctagtaacgaagatagttaaatacttttaaaaaaaagtacgcttttctgtaaaggactacaacaatttatttataagtttattttttataaagtgtagggcaaaatggcaaaaattttaggtttagatttagggacaaatagtattggctgggccttaatagacgatgttcaaaataaaattttaggtattggaagtagaatatttccaatgggtgttgagaatttgggtgatggggagaatgagatgtctaaaaatgcaagcagaacaggtgcacgaggtattaggagacaatttttcagaaaaagacttagaaaaaaaatattgctaaaagcactttcggagaataatatgtgtccgttggttgaaatggattttatagattggaaaaagacaaaacaatttccttcagaaaaattagctgtatggtttgcactaaatccttatgaacttagacaaaaagctttaatagaaaaacttagtctagaagaaatcggtagaattttttatcatttaattcaaagacgtgggtttttaagcaatagcaggaaaggtggtagtgaggatggagcaatttttaagggtaacgtaaaagatggcaaaataggtataacagaaactcaggaaaaaatcgagaataaaacattaggtgcttatttatttgatatttaccccaaagaaaatgaactttttcaagatggtttagaacgtattcggaatagatatacaacccgtaaaatgtatgttgatgaatttgaagtgatttgggaaagccaaaaacagtaccattctagcttaaatgaaaatttaaaaaccttgctgggagggaggaagatagatggctataaagaagatggtattatttttcatcaacgccctttgcgctctcaaaagcatttagttggcaattgttcatttgaaacttcaaaaaccaaatcaccaattagtgcaattgcttttgaacaatttcgagtttggcaatgggtaaatactgtagaatataatggaagcaaaatatcccaagaacaaaaagaaatagtagtaggttttctgtatgctaatgaaaagattgattttaaaaagattagaaaagtactaggaaaagaaagtgcggaattcaaatttaattataaggatgatgataaaattgttggcacacataccatctcaaacctatccaataaaaaattctttggtaaaaaatggttcgaattttcagaaaagaaacaagatgatatttggcatgttttatacttttttgatagcaaatctaacgttaaagaatatgcaataaaaaaatggaatttcacagcagaacaagctgaagcaatctcgaaatttaatgtaaaagatggttatgcgaatttaagtaaaaaagcaataaataatatattaccctttctgcaaattggtttcacttatgatgttgcagttgttatgggtggtattaaaaatacttttggtgcagattgggaaaaaatatcacatgaaaaaagaaactttttgattgataatattgaaggtatagttcgctcaaaaactaaaggcggatttattactataatcaaggatattcttctaaatgattacaatctgacagaaaatcaaatgaagaaattgtaccatcattcagcaacaatcgatgtttcaaaacttcttgaaaaacttccattgggcaaagatgctgataaagaaatacaagctattcgtaatcctattgttataactgcattatttgaactgcgaaaattagtaaacgaattaatcgacgataacggccagattgatcagattaaagtagaaatggctcgtgatttaaaaatatcgaaatctcagcgcaacaaaatccgaagagaccaaaagcgcttagaaaaagaaaatgatagagtaaaaacggaagttttaaaatataccaatttatcacatgataatattttaaaatttaaactttgggaagaatgtaaaaaaacatgtccctatacaggtaatgcaatatctgtgaaacaacttttttcaggcgaaatacaaattgaacatatacatccttggagtcgttcgttaaatgatagtttttcaaataaaacattatgctatgctgacgaaaatagagaaaaagcaaacaaaacaccttttgaattttatggttctgatgagaacaactggtcagctataaaagaacgtgcattaaaattgttttcagacactaaagaatatccaacagcgtaccaaaaattcaagcgatttatacagcaaaaattcgatgatgattttacttctaggcaactaaatgacacacgttatataagtaaagaagcaaaaaattacctcacaaaagtttgtaaaaaaataattgtttcccctggtcaagcaacttcaaatcttcgacataaatgggggttgaatactattttgaatgatgaaaatataaaatcgagagaagaccatagacaccatgctattgatgctttagtaatggcttgtactaaaaccgcctatgttcaagaattatcaaactggaataggtataatagaaactcagtattaaaagaatttccaatgccttgggagacctttagatatgatgcagaaaaagcaattaacagtattttggtttcccataaaagaatatcaaatgatattacggtaaggactcatatttcagagaaaaatggtgctaaatataaaaatgtaggtattgcagcaagaggtcaattgcataaagaaactgtttttggaaaaaggaattttaatggagaagaagcatttcatgtaagaaaatcgattgatagtttagaaactgccaaacaaattgataaagtagtagataaaaccacacgttttttaatattaaaacgagttcaagaattaggtggttttgtaaaaggtaaagttcctgtaaatacattttttgttgttgacgagaacggaataaatcagcctcaaatatttttgccaaacaaaaatggagatccagttccaattttgaaagtaagagtgaaagaaaatatcggaggggcagaaaaactaaaagaaaatataaatcaatgggtgaatcctagaaataatcatcatgtattaatttacaaagatgaaaaagaaaatttaaaagaagaagttgtgacattttggacagttgttgaacgcaaaaggactggtgaatcagcatacaagttgccaacagacggaaaagaaattgtcactactctccatattaatgatatgtttttactaggtttaaatgatgatgagattaattgggaaaatcctaataatgaaatttttaaagagcatttatatagaattcaaaagttatcgtcaaaattctacgaatttaggctatgttcacagtcttcgttggataataattatcaaccatattataatagtattagaggctttggtgcaggaaaaacaggatggtttacttttaaccctataaaagtaaagatttcggtttcaggaaaaataacaaaaatttaattttatagagttgtaaaaattaacaaaaactcaaattgattaaattattaccaaaaatcaaaaaaagctgagaaaagtgttctcacaaaaaataaaactcaatttaaagtaatttttgaaactaaaaagttcattgacataagattttcattttctcaaacagccgaaacacaatgaaaaatcttctgattttcagttacatattttacgttgtactttgattaaagattagaagacacgatattgacacnnnnnnnnnnnnnnnnnnnnnnnnnnnnnnnnnnnnnnnnnnnnnnnnnnnnnnnnnnnnnnnnnnnnnnnnnnnnnnnnnnnnnnnnnnnnnnnnnnnnnnnnnnnnnnnnnnnnnnnnnnnnnnnnnnnnnnnnnnnnnnnnnnnnnnnnnnnnnnnnnnnnnnnnnnnnnnnnnnnnnnnnnnnnnnnnnnnnnnnnnnnnnnnnnnnnnnnnnnnnnnnnnnnnnnnnnnnnnnnnnnnnnnnnnnnnnnnnnnnnnnnnnnnnnnnnnnnnnnnnnnnnnnnnnnnnnnnnnnnnnnnnnnnnnnnnnnnnnnnnnnnnnnnnnnnnnnnnnnnnnnnnnnnnnnnnnnnnnnnnnnnnnnnnnnnnnnnnnnnnnnnnnnnnnnnnnnnnnnnnnnnnnnnnnnnnnnnnnnnnnnnnnnnnnnnnnnnnnnnnnnnnnnnnnnnnnnnnnnnnnnnnnnnnnnnnnnnnnnnnnnnnnnnnnnnnnnnnnnnnnnnnnnnnnnnnnnnnnnnnnnnnnnnnnnnnnnnnnnnnnnnnnnnnnnnnnnnnnnnnnnnnnnnnnnnnnnnnnnnnnnnnnnnnnnnnnnnnnnnnnnnnnnnnnnnnnnnnnnnnnnnnnnnnnnnnnnnnnnnnnnnnnnnnnnnnnnnnnnnnnnnnnnnnnnnnnnnnnnnnnnnnnnnnnnnnnnnnnnnnnnnnnnnnnnnnnnnnnnnnnnnnnnnnnnnnnnnnnnnnnnnnnnnnnnnnnnnnnnnnnnnnnnnnnnnnnnnnnnnnnnnnnnnnnnnnnnnnnnnnnnnnnnnnnnnnnnnnnnnnnnnnnnnnnnnnnnnnnnnnnnnnnnnnnnnnnnnnnnnnnnnnnnnnnnnnnnnnnnnnnnnnnnnnnnnnnnnnnnnnnnnnnnnnnnnnnnnnnnnnnnnnnnnnnnnnnnnnnnnnnnnnnnnnnnnnnnnnnnnnnnnnnnnnnnnnnnnnnnnnnnnnnnnnnnnnnnnnnnnnnnnnnnnnnnnnnnnnnnnnnnnnnnnnnnnnnnnnnnnnnnnnnnnnnnnnnnnnnnnnnnnnnnnnnnnnnnnnnnnnnnnnnnnnnnnnnnnnnnnnnnnnnnnnnnnnnnnnnnnnnnnnnnnnnnnnnnnnnnnnnnnnnnnnnnnnnnnnnnnnnnnnnnnnnnnnnnnnnnnnnnnnnnnnnnnnnnnnnnnnnnnnnnnnnnnnnnnnnnnnnnnnnnnnnnnnnnnnnnnnnnnnnnnnnnnnnnnnnnnnnnnnnnnnnnnnnnnnnnnnnnnnnnnnnnnnnnnnnnnnnnnnnnnnnnnnnnnnnnnnnnnnnnnnnnnnnnnnnnnnnnnnnnnnnnnnnnnnnnnnnnnnnnnnnnnnnnnnnnnnnnnnnnnnnnnnnnnnnnnnnnnnnnnnnnnnnnnnnnnnnnnnnnnnnnnnnnnnnnnnnnnnnnnnnnnnnnnnnnnnnnnnnnnnnnnnnnnnnnnnnnnnnnnnnnnnnnnnnnnnnnnnnnnnnnnnnnnnnnnnnnnnnnnnnnnnnnnnnnnnnnnnnnnnnnnnnnnnnnnnnnnnnnnnnnnnnnnnnnnnnnnnnnnnnnnnnnnnnnnnnnnnnnnnnnnnnnnnnnnnnnnnnnnnnnnnnnnnnnnnnnnnnnnnnnnnnnnnnnnnnnnnnnnnnnnnnnnnnnnnnnnnnnnnnnnnnnnnnnnnnnnnnnnnnnnnnnnnnnnnnnnnnnnnnnnnnnnnnnnnnnnnnnnnnnnnnnnnnnnnnnnnnnnnnnnnnnnnnnnnnnnnnnnnnnnnnnnnnnnnnnnnnnnnnnnnnnnnnnnnnnnnnnnnnnnnnnnnnnnnnnnnnnnnnnnnnnnnnnnnnnnnnnnnnnnnnnnnnnnnnnnnnnnnnnnnnnnnnnnnnnnnnnnnnnnnnnnnnnnnnnnnnnnnnnnnnnnnnnnnnnnnnnnnnnnnnnnnnnnnnnnnnnnnnnnnnnnnnnnnnnnnnnnnnnnnnnnnnnnnnnnnnnnnnnnnnnnnnnnnnnnnnnnnnnnnnnnnnnnnnnnnnnnnnnnnnnnnnnnnnnnnnnnnnnnnnnnnnnnnnnnnnnnnnnnnnnnnnnnnnnnnnnnnnnnnnnnnnnnnnnnnnnnnnnnnnnnnnnnnnnnnnnnnnnnnnnnnnnnnnnnnnnnnnnnnnnnnnnnnnnnnnnnnnnnnnnnnnnnnnnnnnnnnnnnnnnnnnnnnnnnnnnnnnnnnnnnnnnnnnnnnnnnnnnnnnnnnnnnnnnnnnnnnnnnnnnnnnnnnnnnnnnnnnnnnnnnnnnnnnnnnnnnnnnnnnnnnnnnnnnnnnnnnnnnnnnnnnnnnnnnnnnnnnnnnnnnnnnnnnnnnnnnnnnnnnnnnnnnnnnnnnnnnnnnnnnnnnnnnnnnnnnnnnnnnnnnnnnnnnnnnnnnnnnnnnnnnnnnnnnnnnnnnnnnnnnnnnnnnnnnnnnnnnnnnnnnnnnnnnnnnnnnnnnnnnnnnnnnnnnnnnnnnnnnnnnnnnnnnnnnnnnnnnnnnnnnnnnnnnnnnnnnnnnnnnnnnnnnnnnnnnnnnnnnnnnnnnnnnnnnnnnnnnnnnnnnnnnnnnnnnnnnnnnnnnnnnnnnnnnnnnnnnnnnnnnnnnnnnnnnnnnnnnnnnnnnnnnnnnnnnnnnnnnnnnnnnnnnnnnnnnnnnnnnnnnnnnnnnnnnnnnnnnnnnnnnnnnnnnnnnnnnnnnnnnnnnnnnnnnnnnnnnnnnnnnnnnnnnnnnnnnnnnnnnnnnnnnnnnnnnnnnnnnnnnnnnnnnnnnnnnnnnnnnnnnnnnnnnnnnnnnnnnnnnnnnnnnnnnnnnnnnnnnnnnnnnnnnnnnnnnnnnnnnnnnnnnnnnnnnnnnnnnnnnnnnnnnnnnnnnnnnnnnnnnnnnnnnnnnnnnnnnnnnnnnnnnnnnnnnnnnnnnnnnnnnnnnnnnnnnnnnnnnnnnnnnnnnnnnnnnnnnnnnnnnnnnnnnnnnnnnnnnnnnnnnnnnnnnnnnnnnnnnnnnnnnnnnnnnnnnnnnnnnnnnnnnnnnnnnnnnnnnnnnnnnnnnnnnnnnnnnnnnnnnnnnnnnnnnnnnnnnnnnnnnnnnnnnnnnnnnnnnnnnnnnnnnnnnnnnnnnnnnnnttaagaatttaaaagaaaatatcgttaaaaaaaatgcttcttttttgcagtgataaggcaagattgaggcattttttgtttttaaaacaattctaattgcattggcggtggaggtttaggtacttcagctctgccccagaaatttaaaatattaccaaactgtttatctgtaatacgcaaaacactcactttcccaaatggtggtaataatgaatttattcgtttttcatgaacatctgcactttcgctacttgcgcaatgtctggtgtaaacggaatattgcatcatgtcaaaaccatcttttaaaagattttttctaaaaccagctgcattttttctatcctttgcggtttcagtaggtaggtcaaaaaatacaaataaccacataattcggtaaccgtttagttccacaatttagcgtacttaattttttttcgttccccagtataacattgttgtaatgagctagccgttttttgtaaagcaaccattaaggggcttttttcatctttaaaataaacggttcgcgtaagaatatttaaaagctcggattttatcaaagtatttaagtcttgttcgtcgtattgttgcatcaaattatatacacattcatcaactaacggtctataaggctccattatatcatcggctaatgcgaaagcattgtatttgtttttatggtgtattcctagagtgtttaataaaccgctacccgataatgccctagcagttgctgctctcaaaatagcatatccgtagtttaaaaaattgttaggatactcgccaaaacgttctcgtttaaatcctgcatcaaaaaaagatttccaataaaaattcgcagctacaccttccatattggaggtgtcaccacttaatacttttgacgataaaaattcgaacttatttttatgtttagttatttgttctagtaaaattccttgattttttattttttcttgcacagtttgttgccagagttttttctttaaaggggcactggcttcaatttgataggcgaaaagctgttgttgaatatgatgactatttaagtttaagaacatgccatttggtaagtgtactttattacataaaataactcctgaattattttcaattaaataatttaatgctggtatggtaatgtatgtttccggatgatcaataactataaaaccaatatcttcaattggaattgaggcttttcgatctgctgtttctatgcaaagttgtaaatttttacaagtaattactgctttcttctcaattaaaatggagcgtttaatcattttgaaaattttagaaagaagaagttttcactatattttttaaaaataataatcgtattctatcttaattgctaattctcggtaagtcttctaaaaggtttggggaaatcatttatcaacaatatttcctatgaataatataataatagtcagagttattaacatggaaaccaagcacccactatttttggtcctggaaaatgtcttacggtatgttaggccaggaattcctgttttaattgaatatccttttgaacttaaactgccactttttgttctaacgctaggtgagattcccgatttgctgatatttactcctaaacctttaattattttgactcttttattaaatctgattgccataattattcctttaaaataaaatcacgaatcactttttccatgttagatggcatatctgcctgttttatttcgaatttcttaactttcatttccactaaccatttactccaatatgctctaatcacatcttcttcataaggatttttatcatcaggattaatgcctaaaaccaatacctctaaattggaaagattttcatttgcagttacaaagccataatcttgctgatcaaatttctttttccaaccagatttgttaaagccaaaacttttaatgtcttgtggtgttaggtgtgtagttctattgccttctcttattaaagcgtctttatgataaatatatccatcagttaaaaccactagaatatttctgtaaccattttctacgcaataatcatccactttatttttgaaaaaccgccaagtatcagagccaacataatgatcatctttaattgctgcttcataaataagtgttgtaatactatcatattttttgcaggtttctaaaataccttttttagtaaccacatctttattgaagtatattttaagcttattaagcttttcgtttaaatttttatctgagggttctgggtctataaatacttgaattttatcatcaattttaatcatttttttattcatgatatgtgattcaaaattcaccgcaatggactttaaataaccaacatctctcatataatattccatcgctggggcagggtatttttcagggtttattctgtctgacaaatccaggagtatactaatatttaaattatcaatcgcagataccttgggaaaatcgtgctcatgaataagttcttcagccttaggttcatctttacaagaagtgataacaaaggataaaagcattagtgcggttaggaattggaaattctgtttcattttattagtttacaagtttatataatcgcccttcataactttcatccgcaatgtcatgttcttgcaaatgttttttctcctcagcagtacagagtgatagtaattgctctcttctttttaaatcgtcaaaattatcagctattccaagaaaccatccttttacatattctgcatgataagttaggtagtgtttgttggaaaatacaaagccatcaattgttctttgtaaatcgttaatttttccctctattcctgaaatatcttcctttattgggtttaatttttctgtctgtgaaataatttctagttcacaatttttgatatcttctcttttagacctaataaatgtttttattttatcgaagttgtcatattctttcataataaagtcaaacaccaacccccaaataatataaactacgaaacctgcaaaaataataccccaaaattctgcttttgtaaaagctatttgtacgttaaaatcaggtgagttaagtgtcttctcaatatcatatattttcttttcaatttgatatgcaagtattgcgtcaaaaataaaagtgactataaacaaagttgctatcttaacatatgaaagccagtttttatgtttttgaaacatatgaattaaataccccaagcccataaatgcaaaaggaatggtagccacaaaaacaccttctaaccagccatcatcaattgcttttgttaatgcattggcatcaaaaatggcattggttagttggtcagtatcgaatgttttgaaaaatgcagaataggaggcagatatataaaaaactaatagataaaatgtgataggaatcaaaacaatcaagccaagataaaattgtgcttttggttttttatcaacatcctctacatatttttctggattatgttttacttcggatatttcacttttgaaaattgaaatcttattttccaaagctgcaataccttcttcgataatgtcctttactgtttttcttttctttaattcaatttcatacttacttttttcttgaacataaggttccttcaattctttctggagcttttcatcttcacggcatttacccttataatccatgtaaacgtcttgtaaacaagccttaaatattgtatgatttcctgatgcttgttttgatgaaccatagccactttcaaaaaaagaaagtttaatttttttaacatcttcctctttaggtttaacaatttccttaggaagacttttttttagtgagaatatattttttaaagcactcatattagtcttgcattttagtaagtaattcagataaggagattttttcttttgcattttccaaaagaaactcacagatatcgtcaatgttctcttccaaaaactcaaatttcttgcagtacttttttaaggtatttatttcatcgtctgtaaccacttggtctgcccaaatcatcagcgctaaatcatacagatactcgattttatcgtctaaagattctggaattactgactcttgagaagggtttaataagatttcatttaattgatctttagtaagccctctttcttcggcaaaattgtaaagcatctttaattcgagcacatcgaaattgtcatctgcaaaagccatttgatacaatcttaaaaagtgactttttagcccagttgatatatttaatttattcatagttttaatattgtccattttcgcaagcgatattgtcattatctctgtcaaggtttgaatagcaacttttatcaccatcaaaagctgcttgagcttctgcttgattagaaaagtcagcacattttttagattcgcaattagattctgaagtacaggagaggcctattaatccatgcaaaattataagtaaaatacctaaacaaccttttttgctatctactttaaattttgtttttacactgcctttgtttacaaaatgaccttgaacataagttccatcttttttgtaataccctttacggtaactcattttagttactgatagttaagtcaattacttctgcgttaggagcatctctctgtacggcatcaataccatctttacaactctgttttgaattatacatctcgctcgttgctataatctctccgttaccttttgatcttagattgaaataaaatttaccgtttgaacttttcttgatttcaaattttggataagccatgatatatagaatttattgattaattctccaaacctaaactctttgaaacacaaaaccttacagatttctgtaatgtaaaaagataatagaactatgttttcgtcattccgtacttactaaaatgtgattgtaataaacaaacccaattgtattagtcagattaactttaactttcacccaatttcctgtcatcgcaagaaaagtaagattctgttctttttttaaaacctcaattatggaataagaagttcctggaccgctccttagatttaatgctgtaatatttactaataagttttttagataatacttggaagaagtgtcattcggtagatcatatgcattcgtttttgatttggaggtatatgaatttgattgtttcttttcactactagaattatgctttggtttgctactttctttagatttataatttttctttcttgaacaaactccacaagatcctccagaactacaatgaccgcatctactgcaattagtacacgcagaacaataactagaacctacacatttgcctacagtttctccacaagaataagcaatagtaaaattttcttgacttaaagaagaattagaaagtattaccataaatgttagcatcacaaattgttttatatttttcataaaaaaagtatttattctatgggaactcgaattttagtgtctttaatatccattttattactagcctctaaatctgtttaaaactgatattctattccattggttagtaaagcaaatctagttttggtcgtatgaaaatatcggaatagttgtgaattatgcggtttgagtttttctttccaatttttacattcgattataatgcttggctactgattttagaaaatagcataatcaactttctcaccctttttaaggccaatatctgcggtgaattctggaactacttctgtaggattaaaagaatcataacccaaaatatttataaagggcaatacaaaagcgggttttatagattcctctatatctattttatcttttagttgatttattttttcagctaatgattttagttggttttggatttccataaatgtgttacattttggtttttacttcgttcaataattctaaaaacagttcaaattcacttccttttagcaaaaccaatgatttcctgtcatatttttctatttgaagatatatcttccattcatttttactccaatagcaccctgcttcaaatccacttctacttttaaaactaatttctgtgtagttggtggcattaatcggtaatactttgtttttgattattattaaggacttgattaaaccatcaatttcatctgaatctagctgtgctattttggtttctgtagaataagacccttttatatcggttgtaattcttaaggacttaatggaatcaccagaaatcatattagttatttttaaaattatgatttcggtgttattatttatttttccaacatccaggaattccttttctattaaagttccagcttgcgaagaaaatatttctgcattactcaattccttacttttatcctgagatactcctaggctaaaaatgagaagaaaaaagatagtattgattgataatttcatattattatttgagaaaacttaatttttacaaccattcttatcgcaagtaattctatcgcttgtgtttatccaatgactttggttttctgatgtgttaaaaccgcatccagttttgcctcctttggttcctgaatggacttcatttgttggagtatgtttaactgccataatttatttttttccttttggtgctctttgagataaagcactaccagctgcttttttactatcctttcctgttc

SEQ ID NO: 2657 - DNA, 23372 bp, synthetic construct
  source 1..23372: mol_type = other DNA
  misc_feature 1..23372: note = Synthetic
gttttagaattgatttttttaccacaccaaattctaccaaaacattgtgtcctgttccgatggtaattccttcagaaaacacatctgattttgcaggtgaatttagtgttttttgaattcctaatctggataaaattccttcaacataacctttgaataaaaagaaatcggaaggtttttgaggattagtccagttttcctgatttttgttccctgttaaaaacaaacttaaatgtttgtgttcttcgtatcctgaaaggaatttgtggtaggttttaccaaattcaaataactttaaatcggcatttttacgattgatattgtaagcaatggcttctaatcctgaaaacaataaagattgacgcatagttgccaaatcgttactcaatggattcaacattgttacattgtgctcttcttttagtatttcagaaagctgaacataagaagatgtcgttaaggaattggccatcatttcgtggaatccttgcgaattcaattggtttccaacgatattttgcaatttgtaatcttcgtttcttggagcgttaaatacagtcgcgtttaatttgtttgaaaaatcaattttgttgtatccatagactctaaggatttcttcaataacatcaatttctctttgtacatccacgcgataagccggaatagtcaaacctaatcctgcttccgaaacactgtttactttgatgtccaaagaaactaaaatttgtttgatagtatcttttgggattttttgtccaatgattttagttaccttatcaaaattcaaaaacactgagaaatcttcgattttcttagtgttgatgtcaacaatttccgaagtgatgttaccgccggctacttcctgaattaataaagcggcacgttttaaagcataagctgtaatggatggatcaattcctctttcaaatctaaaggaagcatcggtgctgatttgatgtcttttagctgtttttctaacgcttaccggattaaaataagcgctttctaagaaaatagcagtagtgtgattgcttactccggaatgttgtccgcctaaaactccggcaatacacaaaggtcctttttcatcgcaaatcattaagtcttcttcgtgtaaagttctttctacttcgtccagagtagtaaatttagttccggctaccactgtttttacatggattttaccgttgattttagcagcatcaaaagcatgtaatggttgtcctaaatcatgtaaaacataattcgttacatccacaatattgttttttggattgattccaatagctttcaaacggtcttgtaaccaagccggagatggtttaacagtaactcccgaaatagtaactccgcaataacgtggagccaaaagcggtgcttcaacattgacatcaatttttaaagtgcgcatatccactctaaaattacttacagatggcgtaatcaattcaacgctaactccgttttgaagtaaaccagctcttaaatcacgggcagtccccaggtgactcatggcatcggcgcggtttggcgttaagccaatttcgaaaacttcgtcattttctattttgaaaactttagcagcaggagttcccggagttaaatcgttatccaagaccataattccgtcatgactttctccaagacctaattcgtcttcggcgcaaatcattccgtgactttcctgtccgcggatttttcctttttttatggtaaatgaatttccttctttatcgtataaaacggttccaatagtcgctacaggtactttttgtcctgcggcaacattgcttgcaccacaaacaacttgtattggcgctccatttcctaagtcaacggtagttacttttaatttgtcggcatccggatgtttttcacatgtaagtacatgtccaactacaataccttctaatcctccttttacagattgatatttttcaacaacctctacttcaagtcctaaatcagtcagtaaagctgctgtttgttctgaattccaatcggttttaatgaattgttttaaccagttgtaagatattttcatttgaatattttaataaggttgcaaatataaggattgtcaaccgagcttcaaagtgattaaactttgttttctgtttattatcaataatattttttgttgaagtataattaatgttttgaaacaaaagtcagatgatttcttcgatgtgttttttgatgttttcggcaattttagtggttggtaaatcattatcgtcatgtccaaaaggctcttcaatttcttcagcaattaattccaaactggccaagacatagaaaataaaaataactacaggaattacaaaataaccgaggttaaaaacgtaaccaaacggaagtgtcatgacatagaaaaagatgaattttttcaaaaaagcactataagaataggggataggagtatttttaatgcgttcgcaggcgccacaaatatcggttaaagactggatttcactatttaaaataatcagttggtctcctgttattttttgacttttgtacagctcatttaccttcataaacaacattttagctacctgattcggacgatgtgaatggtggtcgtgcaatataatatcttcagcgagttgtttggcagtttcttcgtctttgagatgtttattcaggatagaagcgtaaacgggaatgatttttctgaaaaatgcccggtctttttcgtcttcaatgatagcatttagtttaatggccagatttcggctgttgtttaccaatgcgccccacatttttcggccttcccaccagcgatcataagcggtgttggttctgaaaacaagcaaaagtgaaatcacaaacccaagcattccatgcatcatcgaaatgttttttacatggctgtcatccggcaaatcccaatattccagttctaaataagcaactgctgtggagtaaattccaattaagatgattaaaggaaataattgtcggaaagtgtcggctttgtgaaaacgaaaaataaaagtaagccagtcttttggattgtatgaaatcatcaggggtatttttttagtcggaaactgtttttttagtttgcaaaaggagcgctttggtaagcacctaaatcgggcggtaaagttcgggtttttccgttaatgtccagtggaattaaataagccggatttccttttgcgaaagcggcggaagtattgttgatgttgagtttgttattggcaatgtctaaaaatcgcggattttgattcaaaataacattgttgtaatgactgttgtcgttgaaattgtataaagaattggaattgttggattcggattttaataagcaattgttgaattgaaattcaaaaagagcagcctcatttttatccaaaaacaattcgtcagcataagctccgtaaataatgcaattgttaaaagtggcctgagtcaaatccttagctgtcggcgttttgtctgttttgtaattgtttaaaagtaaagctttttgttgcgaaccgttccaatagttgttaatggtgcaatgggtaaattgataatttccgccatagatacagcctaaagtggctattccggcagtattaatgaccagattttcgccggtaattttggcattttgagctaaaattccatagttggacgaattgtaaatttggctgttttttaaactaatcgtggtgttgtcctgattgtcaattcgtagaccaattgttgcattttttatcgtaagatgattgattttatgattagtgcttccgtcacgaagccaaatcgttgcccattgtccgggtacattggcgtaatcagcttccaggcgatcgccttcaaaaatgatttcgttttccaatttagttgtttctgaaaccgctccgttacattgcaaagaagccgattgcggaacaattaaaccggaattagtatgaaaataaacccgtgctccggcgtcaaaaacgactgtttttccttcgggagcggtggcgaaaccataaattacataagctttttgattggtaaaatgcaattcgtttccattagttgggtcattttcatctaaataaaaaccattaaattcggtatcgtcaaaagttacggtttcagtagtgttattgtttactctttttgggtataaaaaaacagcatctttgactaatgtgagtagttttactttttgcaaattactaccgctgtcaaattcaatttcgtcggtgtataaaaaatcatccggattggcatcagcgatggcaggtgtcgtttcgataaaaatataaaggctgtctttggctaataaaacgatgtctgagaaaattttgttgttttgtccctgcatgccatcaacggttatacggtatttcgaagcaagtcctttgcctaattttatggttggaatattaatatctttcttgctgtgattgtacacttttaaaagataagtactcgaactaattgttgaaaagacagtgtctaaaaaaacggtatctcttgagaaaactaatttcccgttgctgggaacagtcgaaaaatctgttcggcaggaacaaatagtaaggagaattccgaaaataaaaagtagcgaaaaaggacgcatgtgttttgtttttttgtaaaaatagaaaaaaactcattcgttgacactttatttaatcggtttggagtgaatatagcggctattttcgagcggaatatttattcttttctttatttttacaagcaattaaattaaaagcatgacattcgataaagaaaaaattctggaatactgtaatcgtatttcaaaaaataccttaatggaaaccttaaatattcaatatgtagatgcaggtgaaggttttttaactgctacaatgcctgttaatccgagtgttcatcaaccgatggggctgttgcatggaggtgctacagtagctttagccgagagtgtaggcagcgcagcctcttttatttttattaatcctgaagtaagcgaagtgcgcggaatagaaatttcggccaatcatttaaaatccaaaagagaaggaatggttacggccacggctaaaattattcatcagggggccagcattcatttgtgggaaataagagttgtggatgaaaggaataatttggtttccttgtgcaaactcaccaatatggttttgcctaaaagaaagaaaacacactaaacactatacaactaacttttaataaaacaatgtatgattgatttttttataaaagtgaagcagcaggaagcccaaaaactaccttttgtgatttacagtaaaccttataaaacagaagtgagaggtttttttcaaaaaaatgatcatttgtattttgccgaaaccttagatgaaaccggttttgtctttgctccttttgatggcagtcagatgattttgatacccaagaaccaatcggtaatttgggaatcggatatagtttcatttgatgaaaatcattcacatgtttacgcttcggaagataatgttaaggaaaaatcgcattttgaaaatttgattcaaaaagcaattacagcgattaaaaatggcgaattgactaaggtggtgctttcccgaaaagaaattctggaggttccggattttgatttggttaccgcttttactaaattaattcaacgttttccaacagcattttgctattgctggtaccatccaaaaataggtttgtggatgggagccacgccggagcgtttgttaaaagcgagtaagaaaaagttttgtacgatggccttagccggaacacaaaattttgaaggaaaaaccgatgtgatttgggaacaaaaagaagtcgaagaacaacaatatgttaccgattatattttggaaaatcttaagggattaacttctgaagtagcaatttccagtccgtacactgttcaggcgggaaatgtattgcatattaaaaccgatattgaaggggttattaataaagaatccaggttaaatcaggtggtttcggttttgcatcctacacctgccgtatgtggtttgccaaaagaagcggcaaaggcatttattttggaaaatgaagattacaatcgggaatattatacgggatttttaggcgaattgaataaaaaagattttgccgagaaaaaacaaaaatccgacttgtatgtgaatttgcgttgcatgcaaattaagtacagacaggcgcatttgtacattggatgcgggattacgaaagaaagtattcctgagaaagaatggaatgaaagtgtgaataaatcgatgacgatgaaaagtgtgctttgaagttagaaggcagaaaatagaaaaaagagaaaagagaaacaaaataatgaaattagatatattagcgtttggagcgcatccggatgatgtagaattaggatgtgcggggactattttaaaagaagtttctttagggaaaaaagttggaattattgatttgacccgtggcgaattaggaacccgcggatcagctgaaatcagagatgaggaagcagccgcagcggctaaaatattaggtgtttcggttcgcgagaatttaaatatgagagatggtttttttgtgaatgatgaaaaacaccaaattgaaattattaaaatgattcgcaagtaccaacctgagattgttttatgcaatgcggtagatgaccgtcatattgatcatgcaaaagggagtaagttagtttccgatgcttgctttttatccggattgatgaaaatagaaacggagtcaggagggaagtttcaaaaagcctggcgccctaaagtggtttaccattacattcagtggaaaaatatcgaacctgattttgtagtggacatcaccggattcaccgaaaagaaaatcgaggccattttggcttatcgttcacaattttatgaccctaattccaatgaaccggagtcgccaattacctccaaaaacttttttgagagcttaaattatcgttccagagaccttgggcgcttggttggcttagaatttgcggaaggatttacagttgaaagattattggctgtcaatagtttagcggatttacgataatttttttttaatttttattaaaaaaatgtttggagaactcgatttctgttgtatctttgccaccgcaaacaagcaaacaacaaatggtggttgtagctcagctggttagagcatcggtttgtggtgccgagggtcgtgggttcgaaccccatcatccacccaaaattaaaagcctcttcgaaagaagaggctttttttgtgctttataattctgttttttatttccaactcgtttgaatttcgtttatcatggtttgcgaacctccgttataaaaaattccaaaaccgccccaaattgaaggtttgataagagcactaagaattgtttcctgttgattgtttgcagtaagtgaatctgtcggtttgttgctcaaagttgctgtcaaatgattgttttttacttccagactgatattgcaacgaccgttaaaagcgtgtgtggttacagctttgctgatttcatatgaaattccgttttgatattccaataaaatgcaatctacagcatcatggtgttttgtagttcggatgaaacgtaaggcatagcctgaatcggttttagcatcccatttaatcagaatgtccatgtacatatacgcaacactaaatccctgaccggcggttttaaatggtgtcacttggagattaaatgtcatgtcggtataatttctttttatgggagtgtagagcaggcgggcacttctgcctgttggtaaaagtccaaactgattggcagcaccatcaaatccttcgccaaaataccaggcgtcttttgggtttgaattattgatgtcttctttgtctaaaggagaaaaagtccaaaatccgggaataatttccaattgatttttggttgaactgtttttgaaatcagctatcaaggtatttttgtttgctgtaatttcattggctgaaatggctttttgagtcactatttttatagtttttccggcatcactgcgattgttttttggggcaagtgtcgccataatgtaataagacgaatcggcgatggttaatggatattctgttaaagggatattatctcttgaaaccgcaatttcaatcggatttccgcctttgttatcggtgcatcggtagtagtttatgattgtttggtctttgaaatcggtatttatcttatactgaacgttaagaattccattgttgatttttgcaaaatgaggagcttctgtaaaaatcggactttctaattttggcggactaattttaatcactacagccgcttctaagcctgatgtggttttggctgtaatgataacatttctggagtctccgtctaaaagatttggaataatttcgcattcgttgctgtttgcagaaggttttaattcaataatagttttgtcctgagaggctactgaccagtttatcttttcgggttgtacttcataatttccaaaacgaaaggcagaggcttttaataaagctttgtcttttttggtttctaaagttttttgagaggattcaattaatagttgtgtgggtaaaaaacgtagttttttgccttgttctttttcggcggttaaaacgatatttttgatgttcattggatcccaatcgtcatttccggctaaaagattgtaggtgttgtaaatagtttttcctttaaaattaaaccgataagcatttaaaacatccaaattgctcatatcgatagtcgattcgggatttttgttttcaattaacacaggattgttatttaaactaaccaaatattgataattgcgggttgtgagtggcagattatcattccagcccaaataaatcgggttttcggcagtgaattttgtatctataactgccagttgtccatttgctttggtaaaaaattgattcccgttggttaacgaatgtattttacaatttaaaaaagcagcaccagtaccttttgtccaataaaatggtttagaactgtaaaagtctaaggttgaattgagataaacagctgttccgcaaagcgcatcatcagttgattcaaagtggcagcggtcaaaaagaacccttttccctcccgtaaaaggacaaagattcagtcggctgataaatcggcagtttctggccagaattttatcgccatcacaatggatgagttgtgcctgtacaattgctgttgctctttttactctgttaagttcaggttttaaagggaagtttaaatctacattacaataatttccaaaagtgacattttcagcattggttccttcgccagatattttaaaaagcgtaaaattacctatagcgcctatagtttgcccgcgattagctgcaatgactacgttttcgggattgttggttaaacccaaaaagcgtaaccaatcgcatttaatatttaaggcataaggtacagttccatctccttccggttttctgatttccgggtcatcaggattgtcaacccagtacacgtttggagcaatgtacaaactcattggtgctatttccgttccgttgctaagttgttttactgcatcattgatagagttaaaaatataaggatatttggagagctgttctttactgaattgggcatctataaaaaaggcttttggtcctaatgagatggtttttccctgataactgatggttttccctgtaaaagtaattggaatttttgggtctaaagattgataggatgattttgtttgtgcatttaaaaaaaaggcaattaataaaaacagactgtaaaaaagtggtttattcataatcaagggtttggttgatagtaaatatacagtaatttttgtaaaatatctgagagagaaatggaagggaaagaaaaagtcccaccgaagcgggactaaagattttcatctacggcatatagccttattgtgataagattaaagattagaaattttaatctgttacaaatatagaaaaaattttaagaaaaatactgtgttgttgtgttttttttgtagttttttatttatatatttaactttttgtaaataataaatataaaatggcaaagattttaggattagatttagggacaaactcgattgggtgggctttaattgatgatgttcaaaataaaatattgggagttggaagtcggatttttccaatgggagttgagaatcttggagatggcgatggtgaaatatctaaaaatgcaagtcgtacaggaacacgcggggtgagaaggcaattttttagaagaagattaaggaaaaaagtgttattaaaagcactttcggaaaacaatatgtgtccaatgattacttcagattttgacaattggaaaaaaacaaagcaatttccatctgaaaaattagccagttggtttgctttgaatccttacgaattaagaaataaagctttaagcgaaaagttgacgttggaagaaattggacgaattttttatcatttaattcaaagacgtggttttttaagtaatagtcgaaaaggtggaaccgatgatggcgctatttttaaaggaaatccaaaagaaggaaaaatagggattacagatactcaagaaagtattcaggataaaactttgggttcttatttatttgaaatttatccaaaagaaaatcagccttttcaaaatgggttagaacgaattcgtaaccgatatacagtccgaaaaatgtatgtagatgaatttgaaatgatttgggaaaagcaagcacaatattattcaaatttaaacgaagatttaaaaaccttatttggtggcaggaaattagatggatacaaagaagatgggatattatttcatcaacgtcctttgcgttctcaaaaacatttggttggaaactgtgtttttgaacctaataaaaccaagtgccctataagcgccattccatttgagcaatttagagtttggcaatgggtgaataccgtggaatataacggaaagaaaatttctcaggttgagaaagaaaaaatagttgaatttttatatgcaaatgataaaacagattttaaaaaaatcagaaaagctataggtaaagaaagtactgaattcaagttcaattataaagatgatgataagattgtaggaacttatactgtttcccatttatctaataaaaaatattttggtaaaaaatggtttgaattttcggagaaagagcaagaagatatttggcacatattgtatttttttgatagtaaatctaacttaaaagaatatgctattaaaaattggaattttacagaagaacaagcagaatcgattgcaaaatttaatgtaaaagatggttattccagtttgagccgaaaagccatttcaaatattttgccttttttaaaattaggttttacctatgatgttgcagttgttcttggtggaattaaaaatgtttttggtcacgaatgggaaaaattatcggatgaaaaaagaaactttttaattgataatgtggaaggaattgtgcgttctaaaactaaaggaggatttattgatgttataaaagatattcttcgcaacgattataatatttcggataaccaattacgaaaattatatcatcattctgcaactatttatgttgctgaattgcttgagaaattaccagtagggaaagaggctgataaagaaattcaatccatcagaaatccaattgtaattacggctttgttcgaattacgaaagttagttaatgaattgattgacgattttggttcaattgatgaaataaaagtagagatggctcgtgatttaaaaatatctaaatcacaacgaaacaaaattcgtagagagcaaaaacgattagaaagagaaaatgacagggtaaaggcaaggttattagaagaaggacaacgaattacgcacgacaatattttattatataaattgtgggaagaatgtaaaaaaacctgtccctacacaggtaatccaattccgttatacaaactatttaccggagaaattcaaattgaacacattcatccttggagtcgttcattgaatgacagttttgcaaataaaacactttgttatgctgatgaaaacagaaaaaaaggagataaaaccccttatgagttttatggtaatgatgaatcaaattggtcagccatcaaagaaagagcattgaaattgttttcagatactaaagaatatccaaatgcgtatcaaaaatttaagcgatttgtgcaacataaatttgatgatgatttttcatctcgtcaattaaatgatacgcgatatatcagtaaagaagctaaaaattatttgtctaaaatatgtaaaaaagttgcagtttctccaggtcaggcgacttcgaacttgcgccaaaaatggggaatgaataatattttgaatgacgaaaacgaaaaaaccagagaagatcatcgtcatcatgcaattgatgctttagtaatggcttgtactaaaatttcgtatgttcaggaattatcaaaatggaaccgctataaccgtaatgccgaattgaaaaaattccctttgccttgggagactttttggagtgatgctaatcgagcagtagataaaattttaatttcccataaaaaagtttccaatgatattactggaagaactcatatcagtgagaaaaatggtaaaaagtataaaaatgttggtgttgctgccagaggacaattgcataaagaaactgtttatggtaaaaggacttttaatggtgaggaagcttttcatgttagaaaaacaatcgattcattaacaactgaaaaacaattggaaaaagtagttgatgaatcaattaagttattgattaaaaaaagagttcaggaattaggaggttttgtaaaaggagctattcctgctaataccttttttgtagttgatgaaaacggaattaaacaaccacaaattttcttgcctaataaaaatggagctcctgttcctgtgttaaaagtaagaatgaaagaaaacataggaggggcagaaaaattaaaagaaaatgtaaatcaatgggtaaatccaagaaataatcatcacgttttaatttacaaagatgaaaaaggaaatttgaaagaagaagtggtgacattttggacagttgtagaacgaaaacgaactgggcaatctgcatatcaattaccttttgatggaaaagaaattgtaactacgttacatattaatgatatgtttttattgggtttaaatgaagaggaaattaattgggaaaatccggattatgaggttttaaaagagcatttatatagggtgcagaagtttacatctggagattattattttagaattgcaaaaacttcatccattcaaaatgccatagaaaaacaacaaataaatagttttggttttggtaaaaatgggtggtcaactcataatccgattaaagtaaagatttcggtttcggggaaaatatcaaaagtatgatttgttgctattgataaaacttagttcattgacataatttttttcaaaatcttaaacatctcaaaccacaacggaaaatctgctgatttttcactgacggattttctgttgtggtttgattaaagattagaaaacacgatatttattgccgcttcttactttcacaatcaaagttgtggtttgattaaagattagaaaacacgatatttttttggagatttaataaatactcctgagagttgtggtttgattaaagattagaaaacacgatatttgttgataaattttcccatactccattaatgttgtggtttgattaaagattagaaaacacgatatttttttagattgaaataataaagaccgaatagttgtggtttgattaaagattagaaaacacgatattagcaaatatagaattaatgaaagcaaacgcgttgtggtttgattaaagattagaaaacacgatattattattattggtgatacattatcttctgtagttgtggtttgattaaagattagaaaacacgatatttgttatgctttttttcctgaaccaatgattgttgtggtttgattaaagattagaaaacacgatattgaagcagtagcagcaaacacacatcttatagttgtggtttgattaaagattagaaaacacgatattgtaacactaacatttaataacgaatctatagttgtggtttgattaaagattagaaaacacgatattgtggaggattcgtgcttttgctcctgctcggttgtggtttgattaaagattagaaaacacgatattctacccctgttcctgccgaatggatattaggttgtggtttgattaaagattagaaaacacgatattttatcgaattgaatgcagataaaccaaaagttgtggtttgattaaagattagaaaacacgatattaatccggatactaacgcttataccgatgctgttgtggtttgattaaagattagaaaacacgatattagtcctgactatatctattattagtagaaagttgtggtttgattaaagattagaaaacacgatattcgtgaggattttgaattgatggtcggtaatgttgtggtttgattaaagattagaaaacacgatattagacgttgtaaaattcactatttccgagttgttgtggtttgattaaagattagaaaacacgatattcaatttaaattacaccctgatgttctaattgttgtggtttgattaaagattagaaaacacgatatttatcaatggcttgtattgttttttccttcggttgtggtttgattaaagattagaaaacacgatattattagaaagaatcaaaaacaacaaacagccgttgtggtttgattaaagattagaaaacacgatattatagaagctttaatgttattaggaaaaatggttgtggtttgattaaagattagaaaacacgatatttaaatgataaaggtaatagggagactattgttgtggtttgattaaagattagaaaacacgatatttctaatgattaattttaaaagtttgtactgttgtggtttgattaaagattagaaaacacgatattcaggcgacataattggaatgttcggacaaagttgtggtttgattaaagattagaaaacacgatattgaaaactattttgacatagaaaacccagccgttgtggtttgattaaagattagaaaacacgatatttattagttttgacgaattaacctacgcagtgttgtggtttgattaaagattagaaaacacgatattcataagcaacttaccaacagtataaccagcgttgtggtttgattaaagattagaaaacacgatattaagcagcgaaaacaccagcacaccaatgatgttgtggtttgattaaagattagaaaacacgatattttttgaaaaaagattcatcacttcggtcaagttgtggtttgattaaagattagaaaacacgatattgattcaggggcacgcttctgttattggtgtgttgtggtttgattaaagattagaaaacacgatattagtgagttctaatattatgattctcactaagttgtggtttgattaaagattagaaaacacgatattggaagtaaacgaaataaaggatatgtaaacgttgtggtttgattaaagattagaaaacacgatattaaagttccaaaaatatacatggactggatagttgtggtttgattaaagattagaaaacacgatattctaaaaagaatcaaaaacaataaacaaaatgttgtggtttgattaaagattagaaaacacgatattcaattctcaatacattatttcactatgatagttgtggtttgattaaagattagaaaacacgatattgcaaattttattttccacgatacttctttagttgtggtttgattaaagattagaaaacacgatattcatactgtttaccactaagatcggggacgggttgtggtttgattaaagattagaaaacacgatattttctgagaatatttcaataatgaatctatgttgtggtttgattaaagattagaaaacacgatattttaacatcgtaaatatgactaaggaaattagttgtggtttgattaaagattagaaaacacgatattacttatctaaaacaggtagaagcaaaaggagttgtggtttgattaaagattagaaaacacgatattcgccattcgcagccattaaagccacaaccggttgtggtttgattaaagattagaaaacacgatattacaattatatgaatcccgccaccaatcaaagttgtggtttgattaaagattagaaaacacgatattcaattacaaatgaagtaattaataaagcgggttgtggtttgattaaagattagaaaacacgatattgtgcgttttgagcatccacaccaccgatatgttgtggtttgattaaagattagaaaacacgatattgtactgctccaatgtttgaagatgctaacgttgtggtttgattaaagattagaaaacacgatattccattcgctctttaaactaactactgtattgttgtggtttgattaaagattagaaaacacgatattaataaaaattaacagaatgaaaatttataagttgtggtttgattaaagattagaaaacacgatattaagaaataccaacgaaaacaaactttttcagttgtggtttgattaaagattagaaaacacgatatttagttgttaaattaaaagataaaatctaatgttgtggtttgattaaagattagaaaacacgatattgaaattggagaaaaagattctatttattctgttgtggtttgattaaagattagaaaacacgatattctatcttccccatcaactcctgcgcctatagttgtggtttgattaaagattagaaaacacgatattctcatcgattataattaacccaatatctctgttgtggtttgattaaagattagaaaacacgatatttcagtttcttgttttttatcaggtttggtagttgtggtttgattaaagattagaaaacacgatattactttgtaaaaatagaaataattattgatagttgtggtttgattaaagattagaaaacacgatattctccccatattgctttccataatcagtgtgttgtggtttgattaaagattagaaaacacgatattctataaaattacttcctgttctgaaatgtagttgtggtttgattaaagattagaaaacacgatattaaacaagttttttagaagatgttatttatcgttgtggtttgattaaagattagaaaacacgatattttattttttgaatgtatttgtacattttttgttgtggtttgattaaagattagaaaacacgatattaaaggggtttaatatgaatagagcatttacgttgtggtttgattaaagattagaaaacacgatattaaatttagaagctacttgtagagagagacagttgtggtttgattaaagattagaaaacacgatattttgaaaaatatcctgaattaattcgagtacgttgtggtttgattaaagattagaaaacacgatatttttttccctggtgcgaaatctgaaccaccgttgtggtttgattaaagattagaaaacacgatattttagatgccgcttcgtcaccttcgattaacgttgtggtttgattaaagattagaaaacacgatattcatcaagaaaatgcactgcgtatcgaactggttgtggtttgattaaagattagaaaacacgatattcaatggccctttagtatgcactagaaacatgttgtggtttgattaaagattagaaaacacgatatttagccgttccggctattattgggatgactagttgtggtttgattaaagattagaaaacacgatattagatactctcaaaagatacagctcgactacgttgtggtttgattaaagattagaaaacacgatatttaagatagataaaataattgtatcgagatgttgtggtttgattaaagattagaaaacacgatattggtttgaattcatttcgctattgttattagttgtggtttgattaaagattagaaaacacgatattaagaaagaaaccaataaaacaaaacgtcatgttgtggtttgattaaagattagaaaacacgatattttttaatatttaaaatatcatgagaacgatgttgtggtttgattaaagattagaaaacacgatattactattgatttttctaaattatttcttcctgttgtggtttgattaaagattagaaaacacgatatttccaatttttgacattaaaggcgcaggacggttgtggtttgattaaagattagaaaacacgatattagttggcatattaccttctgataatcataaaattagaaaagaatatcgtttgataaaatgcttcttttttggattgataacccaggattgaagcatttttttgtttgtaggattaaaataattctaattgtgtgggttgtggctctttggggacttccgctttaccccaaaagtttgaaatatttccaaattgtttatcggtaattctcaaaagacttacttttcctaagggtggtaaaagttggtgaattcttttttcatgtacatcggcgctctcgctgctggcgcagtggcgtacataaaccgagtattgcatcatcgagaaaccatcttttaagagattgtttctaaaaccggaagcatactttcggtcttttttggtctcggttggtaggtcaaaaaatacaaatagccacataattctataaccatttagttccataattttgggtatttgatttttttgcgttcaccggtataacattgttgcagggaactggcggttttttgaagagccaccatcaacggacttttctcgtctttaaagtacacggttcgtgtaagtagttgcagcagttccgattttatagtggtgttcagctcctgattgtcgaaattttgcatgatttcggcaactttttcatctacaattggtcgaaaaggttccataatatcatctgctagagcaaaagcgttgtatttgcttttgtgatgaattcctaaagtattgagtaaaccacttcctgataaggctctggctgtggcagctctgagaatggcataaccataattcaaaaaattattaggataatctccaaaacgttctcttttgaaatcctgttcaaagaaaactttccaatagaaattagctgcaacgccttccatatttgaactatcaccacttaaaactttggaagctaaaaaatcaaaattatttttcttagaggtgattttttgtaaaaggataccctgattagtaattttttcggttattgtttgttgccataattgtttttttaggggaaggctggcattaatttgatttttaaaaatttcctgttggatatgatggctgttgaggtttaaaaacatcccatttgggagatggtttttgctgcaaataatgacagaagtattattttcaatcagtaaattcatcgaaggaatactgatgtaaatttccggatgatctaaaaccagaaaaccaatatcttctatgggaatcgttttttcttttaactccgtttttaaaactaattgttggttttttgtagaaagtgaagttttgttctcaatcaaaattgtttttttcaacataatagtagtaatttaaaggttaagtttaaaatttacagttgttttaagaacttgatttagggagaatctttttttagacttttctaaagttactataaaattttaagaaaatcactataaaatgtattctttgttggacgctcagaaataaaattactttttgttgaaaaaaaaatcccattttgaagtcctgttcaaaatgggattttttagtttgttgaaaatattttaaaaaagctttttccagggattgtcacttctaaaagtaactgcaggcaagccttctttattgataaaattagactgagcggcttcattccatccaaaacgaaccgagtagggatgtgctatttcaggagaagatacaattacggtattgccttttatttcagctttggcgggtacatattctccgtcggctccggcaatgctaaaccaacttaatgattttccgtcacggctgactaaaccgcttccggtatttgaaaaactgatttcaatagtattgtttaccgttttcattttttggaatactggtccggaacaaactacatttttttgtccatacgctttgttagcagcaatcagactcaatcttcggccaacttcccatttgtatcccggatgcaattcggttatcgtgtcggttaaatcagtgatagtagcaagggcggtattttttaattttaaattcaaagcctgggcttcccagaattttggaagtgtttctgtagtaagcggtttgtctttggatgccgaataattataaggggcaatttgtacaaaatagaaaggtagttttttgtctttccagtcattgcgccaactctcaattaaagtttttaatttgtaagcataacttatattttcacccaaaaaacaattggattcgccctgataccataaatatcctttaagagtataaggaatcaacggttgaatcatcgtgtcgtaaaattttccgctgtctccaccgtcattactgagtttgtccaacattttcccgttttttaatttgggttcaaagtctaattttggagtttgaatccaaggctcgatacggcttcccggtacagctgccgaaatcattccgataggaacatggagtttgttgtataaatctttagcaaaataataacccacagccgaaaaatcgactaaagagcgtcccatggcggcgtcccaacctaaatgttccggatccgaatccatgtattttcttcgatccagaaagatgcggatattggtattatttgctttggttaaatcgtcttccggcggatgatatcctttggttttggtttcataattactgtatttgcgcatcgcatattccatgttggattgtccggaacacagccatacttctcccaccaaaatattttttaaaacaatagtattttttcctttaataatcatttcccgagcttcgaatgaggccttcaacggattgaggtttatcatccaattcccggacttatcggtaattgtgcttttgttttgtccggcaaaagcaaccgaaattttctcgcccgcagttgccgttccccaaattgccacttttttcttttgttgtaacaccatattgtgtcctaaaattttaggtagtgttatttcggcaaaaattgtggaagtaaataagaagaaagcacttaacagaaataggtttttttttaaagtcataattaattgtaaatgatttttagtctttttttgactcacaaataatgccaaatcgggtacaatcgcggttttttaatgttaaatccccgattgtacccgaatttgataataataaattgttgtctttttattttttatttattccagatttcccaggctttttcggcctgaaaaataagcatatctaagccgtttttaatttgtgcgccacgttctttggcattttttaaaaattgggtttcagccggattgtaaatcaaatcgtaagcgatatgtttgtcagtaaagaattcataaggaatctcaggacaggcttcaatatttgggcttgtacctattggtgtcgaattgataatgatttggtattcttgaaaaatatcggaattcagctgattataatcgatggctttttcagatgcttttcgggaaacaaaggtgtatccaattcctaattcttccaaggcaaaagcaactcctttagaagcgcctccggttcccagaattaaggcttttttatgatgcggttgtaataaaggttttaaggattttaggaatccaaaataatcggtgttgtaaccttttaattttccttttttagtgaatttaatggtgtttacagctccaattttagtggcctttttagataatttgtctaaaaaaggaattacttcttctttgtacggaatggtaacattcatcccgcttagattttcagtatttttaatgatatcaggaaatgcaccgatttcctgaatatcaaagttttcgtaggtgtagccctggtatttttcgttttcgaatttttttgtaaaatgtcctttagaaaaggaataactgatattgcgccccagtagcccgaagcgctttttagaattttgggtcattattgtttattgtgtttttcgatataattttgcaccattttttgctcccaaactaccggaaataaatcttcaatcaggacatagttgtcaaaattcaaacgaagcgcattgcttaagtgaattttagcttttcgatcatcattaatcataaaatatagtccggataaacggtattcgatttcgctttcttccggaaaataatcggtggcttctaataaggtgtgaatagccgtttcaaattcgcctaaaaattgtaaaatatcaacccaaaacaaccaggtgtcaatttcggtatctccaaattctactgcttttcgatagccaaattcagcttcttcaaaaaagttcatctgtttgttgatagttgcatatcttttccagtacaagcgattttgattgtcgatagccaatgctttattgacataaaacaaagctttttggaagttttgctcacgcaaataaaaatcggtaatggcaatccaacctttgtccaataacggatcttcgtgaacggtttgattgtaaaatttcaatgcctcagctttgtgtcccagtttttcatggcattttcctattcgaagcaaggcataagaagtagcgtcttctaattcgatagttctattgtaactttcgatggcttcttctaatttgcctaaacgctccagcgctttggctttttccatgaaagcacctaaaaattcatcatcaattaaagtggcgtagtcaaaagcacgaatggcattttcgtaatcttttagtccgtaatgcaaacggcctttttggtgccaggcaatttcgctgtacggatttttttcaatatactcgtctaagaattttatggcttcttcgttttggtctaaaaattcaaagcaatagacaacattgtacaaggcagactgatcttcgatatcttcttccagacatttgataaaactttccttggccatttccagattgtccataaagaggtattccatcccgattaaattatacacatcggcataatcatcggtgtattgtaaagcaatttttaacaattcaacggctttttcatgttggtctcttttagaacagatatttgccttttgaatgtaaatttcttcattgtgcggttcaatggcatatagttcgttaagtaatttctcggctatatccaatttgtcatcataaaccagcatttctacctgaaccagttttaaacctgtagatttagggtgttggtctaatgcta

SEQ ID NO: 2658 - DNA, 23372 bp, synthetic construct
  source 1..23372: mol_type = other DNA
  variation 19334..19335: note = n is a, c, g, or t
  misc_feature 1..23372: note = Synthetic
cttcattccctcagccagaaaaaatccgccgagaaaaagccaaatcacaccgtctgaccatgtttgaacatagcgtttagcatccatggtgctttcttgccccatggtaaaaacaagaaaaccaacaatcaagattccaactgcaaacggaggaatggcttcagtaatccataatccgatagcaaaaaacaataaaaacaaaacatagtcttgcgttttagtaaaatcaccatcgcgtaatgtgaatgttaaaataatggcaaccaatgcagaaagaaggaaaagtatggttctgctttgacgggcaacttttaattgaattttagagagttgtttgatggagtaatttctggaatcggacataccttcaaatttttatcaaatttaagttgttttattgcgttttgaactgatgtttgtcatttttattttaacttcatacgcaaacgttttcaaagatatttcgttatttttgcacaataaaaggatgatttctctccaaaaagaaggaattgataaaatttgtattcaaaattctatagtatgtcagtagtagaaaaaatcagttcaaacgagttaatttcacttgaaaaccaatatggtgctcacaattatcatccgttacccgttgttttaaatagaggcgaaggtgtttttgtttgggatgttgaagggaaaaagtattatgactttctgtcggcatattctgccgtaaatcaggggcattgtcatccaaaaattataaatgcattggtaaatcaagcccaaaccttaacacttacttcgagagcattttataatgataagttaggaaaatatgagcaatttataaccgaattattcggattcgataaagtgttacccatgaacacaggagctgaagctgtagaaacagccatcaaaatctgtagaaaatgggcttatgaaaagaaaggaattccggaacatgaagccattattgtggtttgtgaaaataattttcacggtagaacaaccacaattatttcattttcaaatgatgaaaatgcccgaaagaattttggaccttacacagcaggatttgttaaaatcgcttacgatgacgtagcagcttttaaaactcttttagaatcttctaaaaatatcgccggaatattggtagaaccaattcaaggtgaagccggtgtttatgttccttcaaacgattatttgatgcaaataaaagagttgtgtaaccaacacaatgtattgtttatcgccgatgaaattcaaaccggaatagcgagaacaggttccttattggcggtttgtggtgattgtagttgcgaagctcaatgtgaaagacaagacacatatgctactccagatattctaattttaggaaaagcagtttctggtggtgtatatcccgtttcggctgttttagccaatgatgcaattatgaatgtcataaaaccaggacaacatgggtccacttttggtggaaatccacttgcggcggctgttgcaacggcagctttagaagtggttgctgatgaaaaattagctcaaaatgccagaaggttgggtaaactttttagagcgaaattaaatgactacatacaatcaagttcaattgtttctttggtaagaggaaaaggtttattaaatgcgattgttatcaatgattctgaagacagttcaaccgcttgggatatttgtatgaaattagcagaaaatggcttgttggccaaaccaacacatggcaatataattcgttttgcaccgcctttagtcatgaccgaagaacaattattagattgtgtctccatcatcattcaaacgttgaaagattttgaaaagtaagaatagaaaatccacgcttaatgaacatgccccaaaaagtgtctaactttttggggcatgttcatttctcagtagtttttatttataaaagttctttatttaattcggataaactttcaatgcttcttttaaaatgcgtaccgatttaattaaatcttctttctttagtacgtaagcaattctcacttcatccaaacctacatcgggtgtggaatagaatccggcggcaggggcaaccattactgtttcgccattaaaatcatagctttctaataaccattgtgcaaaatcatcggcgttttttacgggtaatttagcgatgcaataaaaggctccttttggcttggctaccatcacgccatcaatttggtttaattctgtgattagggtgtctctacgctctttgtattctgaaattacttcgtcaaaataactttgtggggtatctaatgcggcttcgctagcaatttgagcaaaggttggcgggctcaatcgggcttgagcaaacttcatggctgtgctcatcagctctttgtttttggaaacaatgcaaccaatacgtgctccacacatgctgtatcgttttgaaacggaatcaatcataacggcatgttgctctaaaccgggaatgttcataactgaataatgttcatcaccatcataggtaaactctctgtatacttcgtcagcaattaaaaacaaatcgtgttttttaaccaattcggccaattgcatgatttcttctttggtatataaataacccgttggattacccggattacaaattaggattgctttagtttttggtgtaattaatttttcgaagtcagcaataggaggtaaggcaaaaccttcttcaatggttgaaattaccggcaccacttttacacccgaagcagttgaaaaaccattgtagttggcataaaaaggttcggggataataatttcatcaccggcatccatcgtgcttcccatagcaaacaacaaggcttcagaaccaccggtagtgatgatgatgtcttcggttgcaataggcaaactgtggttggtataataagccgataacttttttctgtagctttcaaatcctgcagaatggctgtactccaatactttaaaatccagatttttgatagcattcatggctacttccggtgttttaatgtcgggttgaccaatgtttaaatggtagacttttacacctttcttttttgctatttcagaataaggaaccaattttcggattggtgattccggcattgcttttccttttgatgatattgatggcatgatttttattttaagtatgcaaagttgcaatttttttgataaacacccaatgcattcttttatattttgaatatttagtatatttaacccgttgcatgtaattcaattttctagttttttaaaccacatagatatagtttagttagattctcgcctattgtgtagatcatagctatgaatggctaagaattggtttatttctatgtatttatagatgtccaagtggttatcttgaccctgtttaaaaaaaaatcatatttgtattaattacacccaacgggttatatttaataaattataagttatgctaaaaaaaatatttttgtttatctcgattttatcgtcatttttaattgtcgggcaaaatgaattccgtttaaaatctaatactaataaattaaagattccttttaagcaagtcaataatctattatttattgaagtagtagtaaatgataaacctttgacttttttgttggatacaggtgtgacacaaaccattttgtttagtttagaagaaacagatcaggttaaattttttaatgttgaaaaaacaatgttaaaaggtttaggaaaggagaatgctattactgcattacgttctaaaggaaatacattaaaaatttctgataaatttattgatacaaatcatgaagttttgattgtactcgaagaagatgttaacttttcttctatggttggaattccggttaatggtgttttaggatatcatttttttaaagattttttaatagaaattgattatgatagaaatgtgctttatgttcataaaaataatgagaaatttaaaaagattattgataagaactacaaagcttttcccatttcgatcgaagaacgaaagccttatttgcaagcatctctagttttgtctgattcaaccctctcagcaaaattgttggtggatgttggtaatagtgatgcattgtggttgtttgagaattatgcgattcgtttacaagaacccaattttgaagattttttgggtaggggttttagtggtgatatctttggtaaaaggacaagaatatcgaaattggctcttgctgattttgttttagaaaatccaattgttgcttttcctgattctatttcaattaagaatgtaaagttagttcctgaaagggttgggtcgattggggctgaaatatggaggaggtttaatttggtttttgattatggctcttctatgctgtacttaaaaaagaatagcaattatggagatgtatttagttttaatatgagtggtcttgagattcatcatgtaggaaagcaatggattcaaaagccagttgaaaataactcttcaaaaatatcctttcattcgagtgatacatctactccaagagcagcttctatggctttggaatttaagcttatatcggtttatagaattgcgaatgtgcgtgtaaattctcctgctgctttagcgggtttgcaaaaagatgatatattggtgtcgattaataaaaagcctgcttatatgttttctttgcagaatatcaatgctttattgaaatcaagggaagggaagttactgaaatttgaagtggaacgtaaagggcagattataaaaacagaatttgtaatgaagaaaattttataaaaaaatccacattagcatttgaggtgctgctgtggattaattttattttgaatttttaaaatctaaattctactgcatcggtcccgtttttttctgctctaagacattaacttgtttcttctccagaacatcgcctttgattttcaaatgaatctttccaccatcgtagtttactgcattgctttccaccgtaatgcttttacggataggacctacagccatgttgtattttacttcaatttggcctgtttttccgggtaaaataggttcttttggtcttgacggaacggtacaaccacaagtagattgcacgttattgattatcaacggagcatcgccagtgttggtgaattcaaaaacacgaattccggaatccactcctttgtaaactttgccatagtcaatggtattgttttccgctttaaactcaattttgggtccggtttggcttattgctgttaaacttataaaaaccagacataatagtagtacttttttcataatttcgatttttgggtagtgtaaaattactttatttttttattaaaaattcaaatagcatttcttttttgaaactctaccgaaatccttacttttgcaacttatgcaaaaaccaatccaaacttagttttgatgttttttgtttttttttaaaccaagtaaaatcaatgtttctttagtaaagaaactataatataaaatttgattatgtctattcctgctcaatttaaagccaaagaagccgaagaaaaatggtatgcttactggatgcaaaataattattttcattcggagcctgatcatcgtgaaccgtacactattgtaatcccaccgccaaacgtaacagggatgcttcacatgggccatatgttgaacaatacgatacaggatgtgttgattcgaaaagcccgtttgaaaggcttaaatgcctgttgggtaccgggaactgaccatgcttctattgctacagaagcaaaagtggtagccaaattaaaagcagaaggcatcaataaagaagatttgacccgagaggattttttgaaacacgcttgggaatggacggataaacatggcggcatcatcttggaacaacttaaaaagttaggggcttcctgtgactgggaacgcaccaaatttacgatggacgatgatatgtcggcttctgtaattcattcgtttgttgacttgtataacaaaggtttgatttatcgcgggtatcgcatggtgaattgggatccggaagcaaagacgaccttgtctgacgaagaagtaatttttgaagagcgtcaagggaaattgtattatatccgctatgggatagaaaacagtaccgaatcggtggtgattgctacaacacggcccgaaactattttgggcgatacggcaatttgtatcaacccgaatgacgaacgatttacgcatttgaaaggtaagaaagccctagttccgatatgtaatcgtgtgatccctatcatttttgatgagtatgtggatatggaatttggaaccggttgtttgaaagtaactccggctcatgatgtgaatgataaggaattgggtaacaaacaccaattggaaatcatcgatatttttaatgagaatgccactttgaacagttttggtttgcattatgaaggcaaagaccgttttgtggttcgtgaggaaattgtagtcgaactggagcaattgcaacaccttgtaaaaattgaaaaccacatcaataaagtaggaacttcagaacgcacaaaagcggttattgagcctagattgtctgaccagtggttcttaaaaatggaagatttggtgaaacctgctataaaagccgtgttggaaaccgaagatgtgaaattgtatccgaaccgatttaataatacctatcgtcattggttggagaacatacgcgattggaatatttcccgtcagttgtggtggggacaacaaattccggcttattattatggcgatggaaaagaagattttgtggttgcaactaccaaagaagaagcattagccttagcaaaagtgaaagcgaacaaacctgatttgactttgaccgatttaaaacaagatgctgatgcattggatacttggttttcgtcgtggttatggccaatggctgtttttggaggtattttagagcctgagaacaaagattttaagtattattatcctaccaatgatttggttaccggaccggatattttatttttctgggtggctcgaatgattattgccggttatgaatatacgggcgaaaaaccgtttacgaatgtttatttgaccggattggttcgcgataagcaacgcagaaaaatgtcgaaacaattgggtaactccccggatcctttggatttaattgagaagtttggtgccgatggagttcgtgtaggtttgcttttgagtgcttctgccggaaacgacattatgtttgatgaagaattgtgtagcaacggaaaagcgtttgctaataaaatatggaatgcctttcgtttgattaaaggatgggaagtagctgatttaccacagcctgatagctccaaagtggcgattgcatggtatgaggcaaagtttcaaaaagtgttgttggagattgaagacaattttgaaaaataccgattgtcggatgctttaatggcaatttacaaattggtttgggacgatttttgttcgtggttattggaaatcattaagcctggttaccaacagccgattgacaaagctacgtttgataaggccattgaaatgttggaaaacaacatgaaattattacatccgtttatgccgtttttaacggaagagatttggcaatatatcacacctagaacaaaagaagaagctcttattgtttcgcagtggcctgcacaaaagccgtttaacgatacgttgattacggattttgattttgccatggaggttattgccggaatacgaactattcgaaaagataaaaacattccttttaaggatgcgattgaattgaaggtgatcaataatgaaaaagcaacggctgctttggatagtattgtggcaaagttggtgaacagcacttcgattacttatgttaacgaaacggtggaaggagcgttgacattccgcgtaaaatcgaatgaatattttattccgattacgggagcttttaatgtggaagaggaaattgctaaattgagtgacgaattgaagtacacgcaaggctttttgaagtcggttcaaggaaagttgttaaatgagaaattcatgagttcggctcccgagaaagtggtggccaatgaacgtcaaaaagaagcggatgctttggctaaaatagcgatgattgaacaaagtttggcgaatttgaagtaggtgtttagcttgttttaagttgccaatttgtttggtagtttataaaatgaaaccctagtatttcttagtacaattttttatattgactgagattattagggttcttttatttttgaggtttggtttgatattaattaatgtactttgtttggaatagggtataattcaccaattttttcagcttgtagttaactactgtttatcttcttttgtttatcattcttttaatttcttcactatctaaaccacaatagacacaaaattctacaatagtgacgtattgatgttctgatttgtttgaaaattttttgattttttggattaagtctcttccatagcgttcgcttcgaccaagaattatacttatgtcttttggaaaaatggttgttctttccattggttcaggatatttaaagttaattatttggggattgtaacttttttgtcattttttatttatttcatcagttatttgtttttattccttcaatactattctcatactttatctatacttggctgatactttgttgatactttgctagtacttggctgatacattagtgctactcaataaccgctaattgcaaaggtgatcaaacaatcaaattgaagctttttttggtttatatagccaaaataactaccttaaaattggctgttttaagataaaagagaatagaaaaaaagggggattgtttttggaaagcacaccctttgtgtaagaaagggagtgctaaattaaaaataatattggaaaaaacaaatttttttggcaaaatcggcaaatatggtatttaatggcaaggtgtattttttgtattgtattgactatcatagctttgttccattattaatcaataaatttttttaattatggctaagcaaaaaggcttatttaaggttgaaggaacgttagatgacgttactttttacaaaagaggagaatcttattttatcagaaacaaaggaggcgtttcgagacagcgagttttgaatgacccctcatttgcaagaacccgggagaatggttcagagtttgcaaatgttgctgcatcgggaaaaatgctacgcaatgctaattctgttttgataaaaaaggcaaaagacggttcgctaacacgacgcttgatgcatgtgttggctaaggttaaaaattcggacactgtttctgccagaggtcagcgaaatgttaacgatggtttgtcaacaatagaaggcaaagctttcttgaagaattttgattttaatagttttactccattgaaagctattatgcaggcaccttatgaattggatactgtgacgggaactgttactattactgatttggttccgatggatatgttgacttttccaaactatgcttctagggttacgtttaaggtgggatttatgaatttggatttgttgaacggggattatacaatcacatatagccctgaagtgacgcttccgattgatatgaccaccagtagccctgttataacaccgactggtgttccgacaggaagtggctatgacttttatttcttgttggttgagttttcgcaggaaataaatggtgtgttttatgctttaaatgacgaaacgtttaactcgttgacgttgcttgaagtggtttaatcttttgtttgcgtttttttaaaactcctcatttatggggagttttttttgtagggacaggtcgcgacctgtccttacgtgacctgtccgtaggcacaaaaaaaaagtcccaccgaagcaggactaaagattttcatctacggcatatagccttattgtgataagattaaagattagaataaaattatctgatgcaaatatataaaaaaacttttttaattggattacggatttccgtaaattactactaattttttttcttatttttagggattgaataaaaacgacacagttatgagtaaaattttaggattagatttggggacaaatagtattgggtgggcattgattgatgataatcaaaatagaattttaggcgtcggaagtagaatatttcccatgggtgttgaaaatttaggagatggagatggagaagtttctaaaaatgccagtaggacaggtgcaaggggagttaggaggcaattttttagaagaagattgagaaagaaagtattactaaaagctctttcagaacacaatatgtgtccaatggttactattgattttgaagattggaaaaaatctaaacaatttccatctgaaaagttgtcaaattggttttctcttaatccttatgaattacgacacaaagcattaagtgaaaaattgacattagaagaaataggtagaatattgtatcacttaattcaacgaaggggttttttgagtaatagcagaaaaggaggaagcgatgatggagctatttttaaaggaaacccaaaagagggtaaaatagggattacagaaacacaagaaagtatacaagacaaatctttgggttcttatttgtttgaaatttatcctaaagagaaccagccttttgaaggtggtttggaacgtatccgaaatagatatacaatccgaaaaatgtatgttgatgaatttgaattgatttggaataaacaatcgcaatttcatagttctcttaatgatgatttaaaaacactattaggagggagaaagttagatggttataaggaagatggtattttgtttcatcaacgacctttgcgttctcaaaaacatttagtaggtaattgttcttttgaaccaaccaaaactaaatgtccaattagtgccattccttttgaaatgtttagaatttggcaatgggtaaacacccttgagtataacggaaaaaaaattactcaagaagaaaaggaaaagattgttgaatttatgtgtgctaacgaaaagccagattttaaaagaatcagaaaagttattggaaaggaaagtgctgaatttaaatttaattataaagatgatgataagatagttggcacacatacaatatctaatttatctaataagaagttttttggtaaagcatggtttgatttttcggaaaaagaacaagaagatatttggcatgttttatatttttttgatagtaaatctaatttgaaagattatgcaattaagcattggaattttaacgaagcacaggcaagtgatgtttcaaagtttaatgtgaaagatggttattccagtttgagcagaaaagcaatttcaaatattctaccttttttaaaactaggttttacttatgatgtttctgtagttttgggtggaattaaaaatgtttttggttcagaatgggaaaaattatctgaggaaaagagaaattatttgattgataatgttgagggaattgttcgttcaaaaattaaaggaggttttattgatgttattaaaggtattttaagaaacgactattctatttcagataaccaactgcgaaaactttatcatcactctgcgactattgatgcggttgagttgctagataaactacctgtaggtaaagaagctgataaagaaatccaagctattagaaatccaattgttattactgctctgtttgaattacgaaagttggttaacgaattaattgatgaacatggaaaacttgatgaaataaaagttgaaatggcaagagatttaaaaatatctaaatcacaacgtaataaaattcgaagagaacaaaaaagattagaaagagaaaatgacagagtaaaagatcggttagttgaaaataacattcgcattactcatgacaatattttgctttataagttatgggaagaatgtaaaaaaacatgtccttataccggtaaaccaatttctgttactcaattgttttctggggaagttcaaatagaacacattcatccttggagtcgttcactaaatgacagtttcagtaataaaacactatgttatgctgacgaaaatagaaaaaaagggaatctaacgccatttgaattttatggaagtgatgaaactaattggtcagcaattaaagaaagagctttaaagttgttttctgacacaaaagaatatccgaatgcttatcaaaaattcaaacgttttgttcaggttaaatttgatgatgatttttcgtctcgacaattaaacgatactagatatattagtaaagaagcaaaaaattatttatcaagaatttgtaaaaacgtcattgtttctcctgggcaagctacttctaatttgagacaaaaatggggaatgaataatatattgagcgatgaaaatgagaaaaccagagatgatcatagacaccacgcagttgacgctttagttatggcttgtacaaaagtatcctatgttcaagaattagcaaaatggaatcgatataatagaaattctgaattgaaaaattttccattaccatgggagaccttccgatttgatgctgaaaaagctgtagagaaaattttaatttctcacaagaaagtttctaatgacattactgttagaacccacattacagagaaaaatggcatcaaatataaaaatgttggagtcgccgctaggggacaattgcataaagaaaccgtatttggaaaacggacgtttaatggagaagaggcatatcatgttagaaaatctatagatagtttagaaacagctaaacaaattgaaaaagttgttgatgaaactattaaacagttaattttaaaacgagttaatgaattgggtggttttgtaaaagataaagttccagccaatacttttttcattgttgatgaaaaaggaattaagcaaccacaactatttttaccaaataaaaatggtcaacctattcccgttttaaaagtaagagtaaaagaaagtgttggaagagcagaacaattaaaagctaatgtaaatcaatgggtaaatcctagaaataatcatcatgtattaatatataaagatgaacatggaaacttaaaagaagatgtggttactttttggacagttgtagaacgaaaacgtacaggacaatcaatttatcaattgccaattaatggaaaagaaataattacttcattacatacaaatgatatgttcataataggattgaatgaggatgaaataaactgggaattaattgattttaatttgataaatcatcatttatacagagtacaaaaaacttcaaaaaaagaaaaatcatttgagtttaattttagattaggtatagcatcatcattagataataaaagccaagaaatttcgattcaaagttttaaaaaatggattgagttaaatccaattaaagtaaaaatttcagtttcaggaaaaattcaaaaagtttaacttaattaaagttctttgacataagatttttataatcttaagcaaccaaaccacaacggagtttcggcgatagctcacaccgttgtggtttgattaaagattagaaaacacgatattcaaagtaggacaagaagtaacagttgatgtgttgtggtttgattaaagattagaaaacacgatattgaaaaactaaccgatagagagatgcttttgttgtggtttgattaaagattagaaaacacgatattaaaaaagtagatattaaaaaatatcaagaagttgtggtttgattaaagattagaaaacacgatatttcatcgcaaggaacaaacatccataattctgttgtggtttgattaaagattagaaaacacgatattcaagagagtggagtctttctcaacagacagttgtggtttgattaaagattagaaaacacgatattttacaacttcacatgagtagctttgtttcgttgtggtttgattaaagattagaaaacacgatattgtttcccaatgtttcaatgccagagcaacagttgtggtttgattaaagattagaaaacacgatatttgtacttgctaaatcatctgcaaaattatagttgtggtttgattaaagattagaaaacacgatatttatgaaatagttccaaaaatggttacctcagttgtggtttgattaaagattagaaaacacgatatttatcaagtttgtgagaagcactgcacctaagttgtggtttgattaaagattagaaaacacgatattccaaatcaatgacagaggtaagacacgaacgttgtggtttgattaaagattagaaaacacgatatttaaccaaaaatgcgtttaacagcacttttagttgtggtttgattaaagattagaaaacacgatattatgcagcagctttcaatgcaccgtaaaaaggttgtggtttgattaaagattagaaaacacgatatttacctctttccctacttgaattgattgtccgttgtggtttgattaaagattagaaaacacgatattgttcgctgaggctttttaaaccaaagttatgttgtggtttgattaaagattagaaaacacgatattttccaataaattaatattgacaatacagtgttgtggtttgattaaagattagaaaacacgatattgaacctactgatttaatagatgctatattagttgtggtttgattaaagattagaaaacacgatattaattttgattttaatgtttgccaatcagacgttgtggtttgattaaagattagaaaacacgatattaagtgatgggcatatcatacggctactttagttgtggtttgattaaagattagaaaacacgatattttgtataaggaaaaaaacaaactcctctccgttgtggtttgattaaagattagaaaacacgatattaaagtgatgtttattttttcatcgcttgtagttgtggtttgattaaagattagaaaacacgatatttagtaattagtagctttgtaacgttgtagtgttgtggtttgattaaagattagaaaacacgatattctatattgagatagagtacaaaggcaacgagttgtggtttgattaaagattagaaaacacgatatttaaatcatatgttttcattagaccaacaatgttgtggtttgattaaagattagaaaacacgatattttaaatgctcaatcggtcgttcaaaatgttgttgtggtttgattaaagattagaaaacacgatattccatccatgatttttgagatgtcacggttcgttgtggtttgattaaagattagaaaacacgatattttttctgaaggtttgactttgttgaatggagttgtggtttgattaaagattagaaaacacgatattgcgatggaacttcagatacagtggaatatcgttgtggtttgattaaagattagaaaacacgatattcaagacactaaaacccaaaccaggagaaccgttgtggtttgattaaagattagaaaacacgatatttaaatgaaagaagtattcaccaaagccaggttgtggtttgattaaagattagaaaacacgatatttttgtagggtttttatcttcaaacaacgggttgtggtttgattaaagattagaaaacacgatattattaaattgatgcgtaaactggctacatctgttgtggtttgattaaagattagaaaacacgatattcaaggtggtgcagccgcaatggtaaacgtgttgtggtttgattaaagattagaaaacacgatattaagcaagacttcacaatggctttccttgctgttgtggtttgattaaagattagaaaacacgatattccgtgactagagattctgaatcgtcagtgggttgtggtttgattaaagattagaaaacacgatatttattgcggatcttgaaactaccattgatttgttgtggtttgattaaagattagaaaacacgatattttcagaaacgcaattcaaagcggttgctatgttgtggtttgattaaagattagaaaacacgatattcaaattcgttttcaaaataccgcccgaacggttgtggtttgattaaagattagaaaacacgatattttggttattgatgcatataacaaggacccagttgtggtttgattaaagattagaaaacacgatatttaatttgttgcggaccatctttgcaagtccgttgtggtttgattaaagattagaaaacacgatattgaattataccaagattctaagacattacgtgttgtggtttgattaaagattagaaaacacgatattaagcaagacttcacaatggctttccttgctgttgtggtttgattaaagattagaaaacacgatatttcactaacccttttttgttgctccattcccgttgtggtttgattaaagattagaaaacacgatattagatttttgcgtacttttgtcaacacagaggttgtggtttgattaaagattagaaaacacgatatttgactttttagaatgtatcgatgtagatttgttgtggtttgattaaagattagaaaacacgatatttcgtgaagaaaatgttgtaactcgtgatgcgttgtggtttgattaaagattagaaaacacgatattcacccccattctcattagccaaaccacctgtgttgtggtttgattaaagattagaaaacacgatgtttgttaccggagaggtgtatctttttgatagttgtggtttgattaaagattagaaaacacgatattgaaattcgtgacaaatattgttgctgagcagttgtggtttgattaaagattagaaaacacgatattcttgctatttcgggccaaacattgttatcggttgtggtttgattaaagattagaaaacacgatattggtttccaaatgtttcaatgccagagcaacgttgtggtttgattaaagattagaaaacacgttattgtaacaccggtatggaacgctctgaaacaagttgtggtttgattaaagattagaaaacacgatattcaatatggttttgtaaagtttcactccgttgttgtggtttgattaaagattagaaaacacgatattttgcctctcatttgtttggagggtgtttagttgtggtttgattaaagattagaaaacacgatattataacaccggtatggaacgctctgaaaccagttgtggtttgattaaagattagaaaacacgatattattggtaattataatgctcgtggtacgcagttgtggtttgattaaagattagaaaacacgatatttgcagtcaatttcattgctaacttatttcagttgtggtttgattaaagattagaaaacacgatattggggttcgttatcagatagttgaacttgagttgtggtttgattaaagattagaaaacacgatattgaggtgtcgcaaaagcaagttgaagaaacgttgtggtttgattaaagattagaaaacacgatatttctgaaaatcaaaaaggaaatggatatgatgttgtggtttgattaaagattagaaaacacgatattagtacataaatcagagtatgttattccgcagttgtggtttgattaaagattagaaaacacgatatttggctcttgaactttcaggttataaaagtagttgtggtttgattaaagattagaaaacacgatatttcatgtcgtaatcaaaagcatatccggatagttgtggtttgattaaagattagaaaacacgatatttattgcggaaaataaagcaaaggcagttgagttgtggtttgattaaagattagaaaacacgatgttccgtgttctaatactttgatctgtgttgacgttgtggtttgattaaagattagaaaacacgatattgaaaagaaacaactcacaatcagaatcaaggttgtggtttgattaaagattagaaaacacgatattttcgcctctgtataagaagtgttggctccgttgtggtttgattaaagattagaaaacacgatatttccaatcatgtatgaaagctggaatctcccgttgtggtttgattaaagattagaaaacacgatattagacgttgtaaatcctgcctcttgttgggtgttgtggtttgattaaagattagaaaacacgatattcaattgcatcgccactcgctaaggcttgtagttgtggtttgattaaagattagaaaacacgatatttcggaaaatattactaacgttaaacagtttgttgtggtttgattaaagattagaaaacacgatatttttcataatcaattccgagttgttaacgggttgtggtttgattaaagattagaaaacacgatatttcttgaatttcattaaaacttctacaacaagttgtggtttgattaaagattagaaaacacgatattttcgctaatccttcaaagttataaagaacagttgtggtttgattaaagattagaaaacacgatatttgtttgagttaggttgcgactccctgatgcgttgtggtttgattaaagattagaaaacacgatattaaattaattattacaaacagaaaggagtttgttgtggtttgattaaagattagaaaacacgatattgaattgattaaatttgaaagattagaaggggttgtggtttgattaaagattagaaaacacgatatttatatcttagtaattataatttaatatgatgttgtggtttgattaaagattagaaaacacgatatttaaagttgcttccatttgctccttacgttcgttgtggtttgattaaagattagaaaacacgatatttattgcggaaaataaagcaaaggcagttcagttgtggtttgattaaagattagaaaacacgatattttgacagagtcacaagcccagcaatttacagttgtggtttgattaaagattagaaaacacgatattcctattcaactttattgctatcggacaagtgttgtggtttgattaaagattagaaaacacgatattattttcaaggtggggactggattactttacgttgtggtttgattaaagattagaaaacacgatattgttcgaacggattaaggaatgtccaagcttgttgtggtttgattaaagattagaaaacacgatattcacggtaagaagctgtaaatacaacaggcggttgtggtttgattaaagattagaaaacacgatattccttaatataaaaatcaattagcgtttgctgttgtggtttgattaaagattagaaaacacgatattagcattacctattgcgtcgcctaatgagctgttgtggtttgattaaagattagaaaacacgatattggaaatacttttatcactacctaacgggtgttgtggtttgattaaagattagaaaacacgatatttttctaccttgacaagtacccaactcaacagttgtggtttgattaaagatnnagattagaaaacacgatattagttggcctgttaccttctactactcaagagaatatagtgttatatcgtgataaaaaatgcctcttttacagaatgataagctgtgattgaggcatttttttgtttgtaggggtggggacaggtcgcgacctgtccctcatggggtgatggaatttgaataggacaggtcgcgacctgtccgtacacgacctgtccgtacacgacctgtccgtacacgacctgtccgtacacgacctatccgtacacgacctatccgtacacgacctgtccgtacaaaacttgttgtttggatttttataaatattttgtttgttgtgttattatctttatttttgaaataatataagccaataaaatagtacaagccatgaaaaatcgcaaaagaaatcgaatgaaaggattcgattattccagtaataatttgtatttcgttacaaattgtgtgaaagataatgtgtgttgtttggggcgtgttatcattgttggtacaggacgcgttgggacagtacgcgtagggacaggtcgcgacctgtccgtacaggattcccaaaatcaagattcccaaaatcaagatttcgaaattaatcatgttgttgaattaaatcaatttggtttattggtagaagaaagaatcaattggttgatgagtcagtatgcatatgttgacattcataattatgtgattatgcctaatcattttcatcttattcttgaaatagatagccaaaaagtaaaagataaagagatcaaaattaaatcgttgtcgagtttaatgggggctttgaaaacaactacttctaaattaattcatgaagcaggctttcaggaatttgaatggcatcgctcttttcatgatcatatcattagaaatgaattttcttatttgaatatattcaattatatttctaacaatcccgagagatgggatgatgatgttttttttaaaaaggtttaaaacaactctaattgtgtgggttgcggttctttaggcacttcacattttccccagaagttgagaatatttccgaattgtttgtcggttattcttaaaacacttactttacctaaaggtggcaatagtttgtttattcgtttttcatgtacgtctgcactttcgctacttgcacagtgacgcacatatacggaatattgcatcatactgaaaccatcctttaagaggttctttctaaagcctgacgcatttcgtcggtctttcttagtttctgttggtaagtcgaaaaatacaaatagccacataattctgtatccgtttagctccataattttggatattttattttttttctatctcctgaatagcattgttgcaacgaacttgctgttttttgtaatgctaccatcagcggacttttctcttctttaaaatagaccgttcgcgttagaatttgcagcatttcagatttgagctgtgtgtttagttcttgctctttgtagttgttcattaactcatataccttttcatctactataggacgaaagggttccataatgtcatctgccaaagcaaaagcattgtatttgcttttgtgatgtatgccaagagtattgagtaatccactaccagataatgctctggcagttgccgctctaagaatggcatagccataatttaaaaagttgttagggtagtctccaaaacgttctcgtttgaagttaatttggttcactagttcggtgtcgtttgggtcaaaaaaagttttccaatattgactggctgcaacgccctccatgtttgtggtgtcaccactttgaacttttgaagcgaggtaatcaaagtggttcttttttttggtaatcttctgcagtagtattccttggtttttaattttttcatttattgtttgttgccaaagttgtttttttaatggcaagcttgcttctatttggttgcgaaatatttcttgttggatgtgatggctgttgaggttaaggaacattccattaggaaggtgattggtgttgcagattataatggctgtattgttttcaatcatcagattcattgccggaatgctaatgtatgtttcgacattgtcaattactaaaaacccgatatcttcaacaggcacggtagtttcccttgtttctgttttgattacgagttgtaggtttttagtggaaagtgaggctttgttttcgattaatagtgttctttttagcataaaaattttcttaaaattaatacaagatactaaaaatcaaataaatagggtttttttggtgttgatgggagtggacaggtcgcgacctgtccgtacataatctgtctgtacataatctttcagaatgctaccagcatatatgaaatctgccagaggctgtttttttttgctacttatccttatctaaatttttcaaggatttgttgatttatgggcaaaaccaattgctatttcttccaagttaaaatagaacaattgttaaaaaaagtaatggtgttgaatttattcgattgatttctttatttttaacagactaataccacaaatttacctctttttgaaaccaaattataccgctacgttttgtaaattccatcactgtgtactgctactttttattttattaagtagttctgttagaagtcaatttataattaaaccggagagcacttttgaacaagtgtcgctgcatccttatgctacacttgcccgattgggtgctgaatcgatttcacttgatgctgtattgcaactggatgccaattggtttgcaaccttgcccaacagcacaactgatttaggatttacttctgaccattattggttgcgtttttcgatacgcaatgaattaactactactaaaatctattttttagaggcgtgtcggcctattgttgatgtagctgaattgtatactatcgatgcaaacggtgttataaccaaacaagtaagcggtgatgctattcctttttcgcaacgcgattttaaaaacaggaaaaccatttttaaagtggcgattgcacctaatacaactaaccaatattaccttcatttgaagagtgatggcgaggcaattaatgccggattggtgttgcggtcttatgagaacttgatggaaaccagtatgtttgagcaattggtttttggcgttttttatgggattttaggtattgcggctattatttacttgtttttcttttttgctcttggacaacgcagttttttatactacagtttgtatgttgtttttattggcttgctacaattttcattagatggattgttttttcaatttataaccccaagttcgggctggctgtcattaaatgcggtaattctttctgcttgtatcgccaatttctttttagggaggtatgctcaggtttttttgaaagtaaaagaatatagttcctttttgaatagtgcattttatgtggtttatgttttggacttcttgttattgatttcgttgtttgttcatcctggtgctttggcttattcttatccgctggctaacttgtttgggttgctattgctgttgttaattatttcgtctgtagtagtaatttatgtaaagacccgaaaagttgattatttttttgctataggtattttctttttaattgctggatttgtggtttttatattaaaaaatttcagtgtgttgccggttactttttggacggaaaacggttcgaaattgggcaccggtttggaggttgttttcttatcgttatccatggcaaacttaataagaaaattacgtgatgaacgggaggaaatgcaaggcatagcccttcaaaaagcagaagaaatgaatgatatgaagacctattttctttccaacatcagtcatgaattgcgaactcctttgaatgctattttgaatttgtctaaaattttgatgaaagaaaccacagaacctattgtgcagaaaaatgccatgatgatcaaagactcttcctataatcttttgagctcagtaaacgatattttggatttttcgaagatagaaaaaggggagttacagttggataaagagccgtttttgtt

SEQ ID NO: 2659 - DNA, 23369 bp, synthetic construct
  misc_feature 1..23369: note = Synthetic
  source 1..23369: mol_type = other DNA
  variation 13478..16753: note = n is a, c, g, or t
aactaagatttatgatgagtagtaataatgaaaatgagcgattagagactgtacagcgttttttgcagctcgattataataagtcaaccgaatttcaagatattgtggatcttgcatcacagttgtgtgaaatgtcggttgcccttatcacccttttggataaaaatgttaactggcttaaagttagatcaggggttgatttggaagtaatgcctagggaaacttctttttgccaatatggtattcaacaggataatattctcattattccggatgcaaccaaggattcgagatttaataataatcctttggttcaatctgatccaaatctgagattttatgccggggctcctttaattctaaaaaatggattaaaactaggtactctttgcttatttgatttaaaacctaataatttgacagtgttacagcagaaaacacttagtgttctttcacgtcaagtcacatttcttatggagctagaactaagccataaattgttacaacaacagattaaggaaacggagtcaaaaaatgaatcgctaagaaaaattgcccaattccaatcgcaccagataaggcaaccattaacagcaataatgggattgattgagctagtgaacgatggcgctcaacctgtagatgaaggttggttaaaaatgttttccaaagctattaataattttgacacaacaatacatgatatcgtatctgaatccattggtagtgaagatttatagcgaatttcttttaatattggataattaatgatgctgatttatttgttatatgtcactttttgtccaaaagcactaatgctaaaaaaaagaagaattatgtttgttttttatctcagttctttggtgtatatccatactatgtgttaaagttaaaattaataaagtaagaaatagtcttcatcaactctttttagccattataaatattttttctccaaatcgagcctcgggtattgttcataactggttgaaatctgtataggagcctaataggaattcatcatttgatggtaaatagcaacattcaaaattgcgatacatttaaattgatacattttgatgtagattgatgtaagaatctgttaatcaagtatttgtgaataacttacgatgttattttcttcttatactccaagcttttactacttttatcccaacactcccatatgggaaagcaaaagcgcttttgttcattttataaccttaaaatacaattaagatggacacaattttaatactagatcgcttagatcgtttagaaaaattattagtaggtcaaaaagaagttttgacctttgatgaagcttgtgactatacaggaatttcaagaagtttcttgtataaattaaccgcaaaaggtgagattcctcattccaaacccaacggtaaactgctgttttttgagaaaacgaaacttgtgaattggttacttcaaaacaaagtatcgcctgctacactttaatgcttagaattcattttctgtaagacctatttaagttctttaagcagttaccaattaacaacaccttagtcaaggtgaaaaaatccattgttatgaataaacagacgccctatatccgtgtaggtacttcgtattataaacatgtcaaggctccaacaatagccgggcactttaatgaagtcctggtgcattggaatattgaaacgatacggcaagattgtggaaaagactatatcagtcaaattcctaaatatgatgggtttacctgtatgcccaatcatattgcttataagcgagagcatgaaaaattctacaatacgtattccccattaagcaaagtacctacacaaggaactattgagagctcaagaaaatttatccaacacatttttgggaagcatgaggagttgggtctggattacttgcaattattgtttgtccgacccatccagatattacccatactttgtttggtatccaaacagcgctccacagggaaaagcacttttttgaaatggctaaaaaccatctttgagaacaaccttacctatcttaccaatgatagtttcagcagccaattcaatgcggattgggcaaataaattattgatatgtattgacgaagtgctttttaataaggaagaactaaccgaacggatcaaatacttgagcactaccaatattaatacgctcgaagcaaaagggaaggataaaagggaagtagagttttttggaaagtttatcctctgtagtaataatgaggataactttattaagatcgatggcaatgaaactcggttttgggtattgaaggtgccaacgcttgttgatgaggatacggggtttctggaagcacttatagcagaagttccggcattcctattttttctgcaacatcggaaactcacgacccaaaataagacccgaatgtggttcactccccaacagctaagaaccggggccttaaaaaagttggtgcagaacaatcgcaaccgagtagaaaaagaattagctagcttgctactgagtgccatggaacattttgacctcgaagaaatacatctctgtcccttagatgcacttcatattttaaataagacccgtatcagaacggatttgacccagcttagacgattactaaaaagggaatggagactggagaacaaggacaactcgctaagctatcagaagattacgatttggcaggatggttctatgcaattaacggatgtaaaaggaaggtattttacggtggaaaaatcgtttctattagaaaattttgatgaaccgatgacaggctaggttaaaaccaatgcctgtcgctattgcggccgtcatcagtatatcatcttttgttcatcaaaataataaatgatgcggaataaaccatcaaaaaaatcaagaatgatgaactgatgaagaaattgatgacatgggaagtacagtatgtaaagggattcgaagcaaattacatcaaaacatcaaaaatttactaaaaactagttggctgatgaaaaaagaaagaacacctaaattatcgtgtgaaagagcccgagctttttccatcgaaaaggcgctggcaaaactcgggcactttccgacccaatcaacggagaaagaagcttggtttctgagtcctttcaggtcagaatcccaagcctctttcaaggtatctaaggaacttaatcgttggtacgaccatggcgcaggaaagggtggtaatgtcatcgatttggtgtgcctgatcaaaaagacctcggtcaaagaaacccttaactggttggaaaaggatcaaatctctttttcttttcagcagcagtgtgttttagaaaagccaaaaagggatgggctgcaagtgttatacgtacaaccgattcagcattatgggctcatcaggtatttgttggaacgaaaaattgctatggctacagcagctatgctttgtaaggaggttcattatctacatcaggggagacggtacttcgctgtaggattgaaaaatgtttcaggtggttgggaactgcgtaatcgatattttaaaaactccagttccccaaaagatgtgacccatatcaaaaatggaagggagaaactaatcgtaacggaagggatgttcgatatgctctctatactagaaacctctaaatgtcttaaagaacactatgattttttggtattgaactccacaacctttctagaaaaagccatgtcctatttagatgattatgaccaaatagaactctatttagacactgatgaaaatggcaaacggacgactgaaaacttattaggatacactagtaagtgcagagataaatctggactttatagcagctataaagatgttaacgaatggcacatggaaaacgcaaaaaatagacatgggacgtaagcgcaagatgtgtcattgtcatgacaatcttgcttttactcccgatggttgcaaaagaaaatgaaaaaaacgaagaagaccgttattcagtttagatgtggcatctatgaaaaaaagctacttaaaaaacgcgcccaaaaagcaggtttatcgttaagcgaattttgtttacgagccgctttagatatcaaggttattgagatattaaaccaagagcaagtcgagtgttataaaactttaatgaagtatagtaacaattttaccgcgattggaaacatgtatcgcaaacataatcctcaattaactgaagaggtgtatgcgcttgctaaagaaataaaagaacacttaaataatttcaagcaatgatcggaaaagggaaatcgatagcacatactgcggcttctatgaaatatggatggaatcaagaaaaggatgcaaccgtagttttaaaacaacatttggtgggggataatccaaaggaaatctctaacgaatttaaaattatacaacaaatgaataccaagtgcgagaagaacaccatcagctttgttttaagtcccactatagaagatggtaaaaaactgacagataaacggcttggagaaatagccaaagaattcattaaagaaatgaagcttacagaccatcaggccatcgcttttgttcacaaagacaaagaacacatccatattcatttatacgtcaacagaattgattttaaagggaaagcttatgcggataattttatagggaaacgagcaagttttcatgctgaaaaaatagccagagctatgggcttgaaaacagttaaagaggttcagaacgaaaaattacatagactaaaacatattcgagctgaaatgaagcagctacatgataccgtactccgtttagaaaagcctcgttcttttgaacaatacatcactaaaatgaaagtcaaagatgtgaaggtgattccaagcatcaataaagccaataagctacaagggtttagatttgaatataagggtgtcaatttaaaaggtagtgaagtccatagatcgatgtctggtggaaaaattggcgctgaattggcgaataatacaccccaatatatgagcaaggctagtgtgaacacggtcaatattctagggaaaggacttgagatgagtgtaagtttagtggcaagtatcgctaaatcggcggttaagaaagtaatatcaaaaggaattgacataggactatagtcatggcgaaaatcgatgaattatcagaattattaattgaagaattgagtgacttcaaactacaaataaataaactagaagcggtatcaaacgaaatacagtctatggtaattaagcccgatatcagtgaattaaaatcgtatatggatgcagcattacagcttcaaaacgaaattgtaaaagatcaaaacctaagactaggcgctatttcgaataagctaaccgattccaataggtatccgaaatggttggtagggctactgagtttatcactaatggcaattttacttgtaacgggttacagcatctatcaactccaacgcattccagaaatgaaacaactcgaatatgaaaaggggcgaaaagaaatggtggatcatttttatgaattcctggaaagtgatgctccctccaaaaaagcctatttgaagtggaaatcagaagaaaatgttccttaaaaataagtagtatgcgccctatccgattttttattaagtaaaggagtcgtaaaacaaatagtcagattatataagattttgtacgtaagatgcactatagagggattatttaaccacctatttttttaaaaaaatcagataaggtaatacccctagcttcacaaattctctttaaagtttccacaggtattcgatattccctaatgttttttattttccttacagtactctcgtcgatattatgcaacatagcaaaggcattttgggatttaccttcctttaaccagggatgtagccactccttagttatataagtacatatttcaacatttatattaatcatataaacaaaggaaatggatgacttataaaaaacttcggtcgttcgaccgtaatttaaagatatttattatattagccattgaattattaaattagcgaaacttcttctagtaaaaaattagaagcattcgctttgaatctcgcatcagaaactggtaatttttaacgacgagagaataagtgtaaacgctcacgacccggggcgtgggcttgcttattgtcgtgcggtataccagtaccttgatgcggtaagttgagactccacgccctttttgtttgtagagaaaggtctcgcttctcaaccttttcaaagctatctgctcttcctaactactaagaactcgctgacgttagtatagctaaattcaatttaaatgagatcttatgtcgttcgatacttttgaattattaaagaaaggttgtcctgctgcctttgcggatattcatgccaaatacagcaggagtatcttctggttgggcatgggctacatccgagatcaatttgtcatagaatccttggttcaggatacttttttaaaattatgggtgcatcgagatcgcatagaaacctctaagcatattttccttttcttacgctttgtgatgaaaagggaatgtattacctattatacacgccctaaaaataagtttttaagagcagtccactccttagataaatttgaaaactatcaggactatatggtagggtacgaccccatccgtgaccgtgaacacttaaaaacccaagcgaaggaagaacaagccttccagagggttcaaagcttgttacccctattggacgctgaaggtagccatttgattgagctatgtttaacctatggctttcaatataaagctattgctgaggctatgggcatcactattacagaaactagcaataggattaaaaaggcgattaatgatctcaagaccattatcgaccaaggagaaatccttgaatccaaacaaggaggtactcaaataaagcatcaaggggttatgaccgataagcaagctgaagtattgaaactccgctgtgaagcgaagtattcctttgcggcaatagccaaagcactcaacctatcccaaaaggaagtacaccgtatgtttatggaggcctatcggcttatacaagacaaaaacgaacagcaactacaatcggcttgatatggaaaagacgacactcaaactgtcccgaaagattcagctcttggttgacctgcccaccaaggaagaacgaaaggaggcgctagataaactgtaccaatggcagaacaggtgttttagggcagccaatcttattgttacccatttgtatgtacaggaaatgattaaggaattcttttacctatcggaagggataaaatacaaactagccgatgaaaaaaaagatgaattaggaatcttacaacgttctcgtatcaataccacctatcgtatggtatccaatcgctttaagggagaaatccctaccaacatcttatccaacctcaataatgtgttgctctcttcctttaatcaaaacagaccacaatactggagaggggaacgttccttaaaaaacttccgtagggatatggcttttccctttagcttggagggtataagaggactagcctatgatgaagagaaaaaggcatttacctttcgcttatttcagattccttttaagacgtatttagggaatgaccatacggacaaacgagtgttgttggagcgggtcatacaaggaaaaaccaagctttgtatgtcaaacatgaaactaaaggagggtaaaatcttttggttaccgatttttgaaattgaaaaagaagaacactgcctaagaccagaactcatagcagaggcttctttgtcgctagaatatcccattgtggtgaaaaccaataccgcaaagcttaccataggtactagagaagagttcctgtacagaaggctagccatacaggcatcgaggaaaagagcacagggtggggcaagctattctagatcaggcaaaggaaccacaagaaaagtaaaggcagtggataagtttcatgatatggaaaacaagtatgtacgccatcggatccatgtgtatagtaggagacttatcgacttctgtgtgaagcatcaggtgggaacgcttctattggtcaatcaagaaacgaagataggaatagccaaagaggaggagtttgtcttacgaaattggagctattatgatttaatgacgaagataaagtacaaggctgagaaggcaggtattgaacttattgtagactgagtatgaacatatcgagggtgcttgtacaccctcaaggtgaggtctaggacactcactaaatgcgaacagcatatacaacgcgtgggctcacttttttttgttaagcctagattaaagatagcatgaaggaataggggctgttatgaacagggctagctaagaccgggttttggggtataaccataagttaggactagcgaattattggcaatggcactatgctataaatacctaaagggattacagcgttagtactaggaattcttttctttttcagcggcacaaaatcctcactaagtcattgtaatccttatgtcaaatctttgattgcttcattgcgtaacgttttcctcacactttatagtattagttttggtaaggatttgggttttgatgcgaacccaaatgagtataacaatattgaaggtgtaatcaggtagtaattttaaaaatgttattaaatggatgatgaataaaagttcaagtagttttcaccctaataaatttgatttcgtttcaaatgactcagaaaatctttctagtattccaagaaattacctgttcgttatgcaaattagaaatgtaaattttcaatggatgtattattatatccaaatctcttccaatctttttgttggcaattgtatttcatgagccaattaaatgcattatttggctcaatctcctaaataatatcctattttcaaatttcattaaaaagtatgggttaaagttttgtgaaattcctagtcatttatcctttacgaatttacgtaatggacgatagttggtttttctctattttagatttaaattatgataaaatgttaaaaaaaatacttcttatacttttagtttttcttgcctttaatggatatgctcagaacgacaatatcagtttagtatcatggaatattagagattttggacaaacaaaaagcagtgaagaattagatgaaattactgaaattgttagagatgtagatattattgccatacaagaagtagttgcaggttatggtggggcacaggcggttgcaaaattaacagatatactaaacagaaagggtagtaagtgggattatgtgattagtaaccctactcatagttcaaagtatgtgacggagcgatatgcttttatttggaaaaccaagcatataaaaataaaaaacagaggcagattagtaaaggagttagattctctaatagatagagaaccttttttgttagatttctatttgagtgaaaagaagtttaccatacttaattttcattcaaggccttttgataaagacccagaaagcgaaataaaagcactaaccaattatattacaaactcttcaaattcagctttactaatcgctggagattttaatgttgatgaaaagaaagaggtttttgatacgttgaaaagtaatggttttaatgcctcaatttcgaatcagaaaacaactttgaaaaaggcatgtactcaaaatgagtatttaaaccaccctatcgataatatattttactctcggggaataaataaattaaaaagtaaggttatcgattttgttaatgtttgcgataatcttgataaagctagaaagctgtctgaccatttacctgtttatttgaagttttcgattgaatgattggcaaaaaaaagtcccaccgaagcaggactaaaggttttcacctacggcatatagccttattgtgataagattaaagattagaagttttaatctattaacgaagatagttaaatacttttaaaatatattacgcttttgtgtaaaggactacaacaatttatttataagtttatatttcataatgtgtagggtaaaatggcaaaaattttaggattagatttaggaacaaatagtattggttgggccctaatagacgatgttcaaaataaaattttaggtattggaagtagaatatttccaatgggtgttgaaaatttgggtgatggagacaatgagatgtccaaaaatgcaagcagaacaggtgcacgtggtattaggagacaatttttcagaaaaagacttagaaaaaaaatattactaaaagcactttcggagaataatatgtgtccattggttgaaatggattttatagattggaaaaaaactaaaaactttccttcagaaaaattatcatcttggtttgcattaaatccttatgaattaaggcaaaaggctttgttggagaaactcactttggaagaaattggtagaattttttatcatataattcaaagacgtgggtttctaagtaatagtcgcaaaggagggagtgaagaaggtgcaatatttaagggaaatgcgaaagacggtaaaatagggataacagaaacccaagaaaaaataggaggcacaacattagggtcatacttatttgatctttatcctaaaaaaaatgaaccttttcaaaacggtttggatcgaattagaaatagatatacaactcgtaggatgtatgttgatgaatttgaagtgatttgggaaagtcaaaaacagtatcattctagtttaaatcaaaatttaaagaccctgtttggtggtagaaaaatagatggatataaagaagatggtattatttttcatcaacgccctttgcgttctcaaaagaatttagttggcaattgttcgtttgaaccctcaaaaaataaatgcccaattagcgctattgcttttgaacaatttcgtgtttggcaatgggtaaatacggtagagtataatggaaataaaatatcccaagaacaaaaagaaataattgtagattttttatatgctcatgaaaagccagattttaaaaagattagaaaagtactaggaaaagaaagtgcagaattcaaattcaactataaggatgatgataaaattgttggtacacataccatctcaaatttatcaaataaaaaattctttggaaaggaatggtttgaattttcagaaaaagagcaggaggatatttggcatgttttgtatttttttgatagtaaatcaaacttaaaggaatatgctgttcgtaaatggaattttaatgaagaacaagcccaagccatttcaaaatttaacttaaaagatggttatgcaagtttaagtcgaaaagctattttaaatatcttaccatttctacaaatgggtttcacttatgatgttgcagttgttatcggtggaataaaaaatgcttttgggttagtttgggaaaaactatcagaggagaaaagaaactttttaattgataatgttgagggtattgtgcgttctagaactaaaggtggttttataaatatcatcaaagatattctccgtaatgattttaatatttcagataatcaaatgaagaagttgtatcatcattcagcaaaaatcgatgcatcagaacttcttgagaaacttccaattaacaaagatgcagataaagaaatacaagctatacgaaatcctattgttatcactgcattatttgaattacgaaaattagtgaatgaattgattgacgaccatgggaaaattgatgaaataaaagtagaaatggctcgtgatttaaaaatttctaaagcacagcgtaataaaattcgtagggatcaaaaacgactagaaaaagaaaatgatagggtaaaagttgaggttttaaaatacacgaacatatctcatgataatattttaaaatttaaactttgggaagaatcaaaaaaaacatgcccttatacaggcaaagccatttcaattgagcaacttttttcaggagaaatacaaatagagcatatacatccttggagtcgttcattaaatgatagtttttctaataaaacattatgttatgcggatgaaaatagaaaaaagggaaacaaaacaccttttgaattttatagttctgatgaaaacaattggtcagcaataaaagagcgcgctttaaaattattttcagatactaaagaatatccaacagcataccacaagtttaaaaaatttgtacagcaaaaatttgatgatgattttacttctcgacaactaaatgacacacgttatataagtaaagaagcaaaaaactatttggcaaaagtttgtaaaaatataattgtttctcccggtcaagcaacttcaaaccttcgtcgtaaatgggggttgaatactattttgaatgatgaaaatataaaatcgagagaagaccatagacaccatgctattgatgctttagtaatggcttgcactaaaacagtttatgttcaagaattatcaaagtggaataggtataataaagactcagtattaagagaatttccaatgccttgggaaacctttagatatgacgcagaaaaagcacttgagaatattttggtttcccataaaagagtatcaaatgatattacggtaaggactcatatttcagagaaaaacggtaataaatataaaaatgtgggtgttgcagccagaggtcaattgcataaagaaactgtttttggaaaaagagattttaatggtgaagaagcatttcatgtaagaaaatcaattgatagtttagaaaccccaaaacaaattgataaagtagtagataaaaccacacgttttttaatattaaaacgagttcaagaattaggaggttttgtaaaaggtaaagttcctttaaatacattttttgtagttgacgaaaatgggataaaacagccacaaatatttttgccaaataaaaatggaaatccagttccaattttgaaagtaagaatgaaagaaaatattggcggggcagaaaaattaaaagaaaatataaatcaatgggtaaatcctagaaataatcatcatgtattaatttacaaagatgaaagagaaaatttaaaagaagaagttgttacattttggacggttgttgaacgcaaaagaactggtgaatcagcatacaagttaccaacagacggtaaagaaattgttactacgctccatattaatgatatgtttctactaggtttaaatgataatgatattaattgggaagatcttgattatgaaattttgaaagagcatctatatagagtacaaaagcttacatctggggattattttttcaggaagcacgtttcttctactgttacagatgcaaactttattcaaattagaggatttggggaaggtaaaacaggttgggttagatttaatccaattaaaattaaattaacagtttcaggcaaggtgtcaaagcaaatttaattctacttacaccttttagataagaattcaaaagttcattgacataaataaatttaatatttatattaaaatcaagagttcaatattcaattcaaaatagtttagcttnnnnnnnnnnnnnnnnnnnnnnnnnnnnnnnnnnnnnnnnnnnnnnnnnnnnnnnnnnnnnnnnnnnnnnnnnnnnnnnnnnnnnnnnnnnnnnnnnnnnnnnnnnnnnnnnnnnnnnnnnnnnnnnnnnnnnnnnnnnnnnnnnnnnnnnnnnnnnnnnnnnnnnnnnnnnnnnnnnnnnnnnnnnnnnnnnnnnnnnnnnnnnnnnnnnnnnnnnnnnnnnnnnnnnnnnnnnnnnnnnnnnnnnnnnnnnnnnnnnnnnnnnnnnnnnnnnnnnnnnnnnnnnnnnnnnnnnnnnnnnnnnnnnnnnnnnnnnnnnnnnnnnnnnnnnnnnnnnnnnnnnnnnnnnnnnnnnnnnnnnnnnnnnnnnnnnnnnnnnnnnnnnnnnnnnnnnnnnnnnnnnnnnnnnnnnnnnnnnnnnnnnnnnnnnnnnnnnnnnnnnnnnnnnnnnnnnnnnnnnnnnnnnnnnnnnnnnnnnnnnnnnnnnnnnnnnnnnnnnnnnnnnnnnnnnnnnnnnnnnnnnnnnnnnnnnnnnnnnnnnnnnnnnnnnnnnnnnnnnnnnnnnnnnnnnnnnnnnnnnnnnnnnnnnnnnnnnnnnnnnnnnnnnnnnnnnnnnnnnnnnnnnnnnnnnnnnnnnnnnnnnnnnnnnnnnnnnnnnnnnnnnnnnnnnnnnnnnnnnnnnnnnnnnnnnnnnnnnnnnnnnnnnnnnnnnnnnnnnnnnnnnnnnnnnnnnnnnnnnnnnnnnnnnnnnnnnnnnnnnnnnnnnnnnnnnnnnnnnnnnnnnnnnnnnnnnnnnnnnnnnnnnnnnnnnnnnnnnnnnnnnnnnnnnnnnnnnnnnnnnnnnnnnnnnnnnnnnnnnnnnnnnnnnnnnnnnnnnnnnnnnnnnnnnnnnnnnnnnnnnnnnnnnnnnnnnnnnnnnnnnnnnnnnnnnnnnnnnnnnnnnnnnnnnnnnnnnnnnnnnnnnnnnnnnnnnnnnnnnnnnnnnnnnnnnnnnnnnnnnnnnnnnnnnnnnnnnnnnnnnnnnnnnnnnnnnnnnnnnnnnnnnnnnnnnnnnnnnnnnnnnnnnnnnnnnnnnnnnnnnnnnnnnnnnnnnnnnnnnnnnnnnnnnnnnnnnnnnnnnnnnnnnnnnnnnnnnnnnnnnnnnnnnnnnnnnnnnnnnnnnnnnnnnnnnnnnnnnnnnnnnnnnnnnnnnnnnnnnnnnnnnnnnnnnnnnnnnnnnnnnnnnnnnnnnnnnnnnnnnnnnnnnnnnnnnnnnnnnnnnnnnnnnnnnnnnnnnnnnnnnnnnnnnnnnnnnnnnnnnnnnnnnnnnnnnnnnnnnnnnnnnnnnnnnnnnnnnnnnnnnnnnnnnnnnnnnnnnnnnnnnnnnnnnnnnnnnnnnnnnnnnnnnnnnnnnnnnnnnnnnnnnnnnnnnnnnnnnnnnnnnnnnnnnnnnnnnnnnnnnnnnnnnnnnnnnnnnnnnnnnnnnnnnnnnnnnnnnnnnnnnnnnnnnnnnnnnnnnnnnnnnnnnnnnnnnnnnnnnnnnnnnnnnnnnnnnnnnnnnnnnnnnnnnnnnnnnnnnnnnnnnnnnnnnnnnnnnnnnnnnnnnnnnnnnnnnnnnnnnnnnnnnnnnnnnnnnnnnnnnnnnnnnnnnnnnnnnnnnnnnnnnnnnnnnnnnnnnnnnnnnnnnnnnnnnnnnnnnnnnnnnnnnnnnnnnnnnnnnnnnnnnnnnnnnnnnnnnnnnnnnnnnnnnnnnnnnnnnnnnnnnnnnnnnnnnnnnnnnnnnnnnnnnnnnnnnnnnnnnnnnnnnnnnnnnnnnnnnnnnnnnnnnnnnnnnnnnnnnnnnnnnnnnnnnnnnnnnnnnnnnnnnnnnnnnnnnnnnnnnnnnnnnnnnnnnnnnnnnnnnnnnnnnnnnnnnnnnnnnnnnnnnnnnnnnnnnnnnnnnnnnnnnnnnnnnnnnnnnnnnnnnnnnnnnnnnnnnnnnnnnnnnnnnnnnnnnnnnnnnnnnnnnnnnnnnnnnnnnnnnnnnnnnnnnnnnnnnnnnnnnnnnnnnnnnnnnnnnnnnnnnnnnnnnnnnnnnnnnnnnnnnnnnnnnnnnnnnnnnnnnnnnnnnnnnnnnnnnnnnnnnnnnnnnnnnnnnnnnnnnnnnnnnnnnnnnnnnnnnnnnnnnnnnnnnnnnnnnnnnnnnnnnnnnnnnnnnnnnnnnnnnnnnnnnnnnnnnnnnnnnnnnnnnnnnnnnnnnnnnnnnnnnnnnnnnnnnnnnnnnnnnnnnnnnnnnnnnnnnnnnnnnnnnnnnnnnnnnnnnnnnnnnnnnnnnnnnnnnnnnnnnnnnnnnnnnnnnnnnnnnnnnnnnnnnnnnnnnnnnnnnnnnnnnnnnnnnnnnnnnnnnnnnnnnnnnnnnnnnnnnnnnnnnnnnnnnnnnnnnnnnnnnnnnnnnnnnnnnnnnnnnnnnnnnnnnnnnnnnnnnnnnnnnnnnnnnnnnnnnnnnnnnnnnnnnnnnnnnnnnnnnnnnnnnnnnnnnnnnnnnnnnnnnnnnnnnnnnnnnnnnnnnnnnnnnnnnnnnnnnnnnnnnnnnnnnnnnnnnnnnnnnnnnnnnnnnnnnnnnnnnnnnnnnnnnnnnnnnnnnnnnnnnnnnnnnnnnnnnnnnnnnnnnnnnnnnnnnnnnnnnnnnnnnnnnnnnnnnnnnnnnnnnnnnnnnnnnnnnnnnnnnnnnnnnnnnnnnnnnnnnnnnnnnnnnnnnnnnnnnnnnnnnnnnnnnnnnnnnnnnnnnnnnnnnnnnnnnnnnnnnnnnnnnnnnnnnnnnnnnnnnnnnnnnnnnnnnnnnnnnnnnnnnnnnnnnnnnnnnnnnnnnnnnnnnnnnnnnnnnnnnnnnnnnnnnnnnnnnnnnnnnnnnnnnnnnnnnnnnnnnnnnnnnnnnnnnnnnnnnnnnnnnnnnnnnnnnnnnnnnnnnnnnnnnnnnnnnnnnnnnnnnnnnnnnnnnnnnnnnnnnnnnnnnnnnnnnnnnnnnnnnnnnnnnnnnnnnnnnnnnnnnnnnnnnnnnnnnnnnnnnnnnnnnnnnnnnnnnnnnnnnnnnnnnnnnnnnnnnnnnnnnnnnnnnnnnnnnnnnnnnnnnnnnnnnnnnnnnnnnnnnnnnnnnnnnnnnnnnnnnnnnnnnnnnnnnnnnnnnnnnnnnnnnnnnnnnnnnnnnnnnnnnnnnnnnnnnnnnnnnnnnnnnnnnnnnnnnnnnnnnnnnnnnnnnnnnnnnnnnnnnnnnnnnnnnnnnnnnnnnnnnnnnnnnnnnnnnnnnnnnnnnnnnnnnnntagtgttgtggtttgattaaagattagaagacacgatattagttggtctgttaccttctgatatttaagagtttaaagaaaaatatcatgataaaaaatgccccttttaagtagtgataaggcttaattggggcgtttttttgttttaaaacaattctaattgcattggtggtgggggcttgggtacttcagctcttccccagaaatttaaaatattgccaaactgcttatctgtaatacgtaaaacactcacttttccaaatggtggtaatagtgagtttattcgtttttcatgaacatctgcactttcgctacttgcgcaatgtcttgtgtaaactgaatattgcatcatgtcaaatccgtcttttagaagattttttctaaaaccagccgcattttttctatcctttgctgtttcagtaggtaggtcaaaaaaaacaaatagccacataattcggtaaccgtttagttccacaatttggcatacttaatttttttacgcactccagtataacattgttgtaaagaactggccgttttttgtaatgcaaccattaatgggcttttttcttctttgaaataaacagtgcgagtaagaatatttaaaagatcagcttttataagtgtatttagttcttgctcatcatatttttgaatcagattatatacacattcatcgactattggtctatagggctccataatatcatcagcaagtgcaaaagcattgtatttgtttttatggtgtattcctaaagtgtttaataagccgctgccagataatgctctggcagtggctgcacgtaatatggcataaccgtaatttagaaaattgttggggtaatcaccaaaacgttctcttttaaatccagattcaaaaaatgatttccaataaaagcttgcagcaacaccttccatattagaagtatcaccacttaaaacttttgacgatagaaattcgaacttatttttgttcttagttatttgttctagtaaaatcccttgattttttattttttcttgtacagtttgttgccagagttttttctttaatggggcacttgcttcaatttgaaaggcaaaaagttgttgttgaatatgatgactatttaagtttaaaaacatgccatttggtaagtgtactttattgcataaaataacccctgaattattttcaattaaataatttaatgcaggtatagtaatgtatgtttccggatgatctataactaggaaaccaatatcttctattggtattgaggcctttcgatctgctgtatctatgcaaagctgtaaatttttacaggtaattacagctttcttctcaattaaaatagatcgtttaatcatttttaaaattttaaaaagaagaagttttcattatattttttttagaaataataatcgttttcttttttaattgccccttttcgttaagtcttctataaaattaacggtaatcatttttcaataatgttttctatgaatagtataataatagtcaaggtaattaacatggtaaccatacacccactatttttggccttggaaaatgttttgaggtatgttaagccaggaattccagttctaattgaatatccttttgaacttacacttcctcttttggttctaacgctaggagtaataccggatttgctgatattaattcctaatcctttacttagtttgactcttttattaaatctgaatgccatagtttattcctttaaaataaaatctcgtatcactttttccatattagaaggtaaatcagcttgtttaatgtcaaagttcttaacgttcatttctttaagccatttattccaatatgctctaattacatcttcttcatagggatttttatcatctggattaatacctaaaaccaatacctctatattggacagattttcatttgctgttataaaaccaaaatcttgttgttcatatttctctttccaaccggatttattaaaaccaaaacccttaatgtcttttggcgttaaatatgtggttctatttctctctttcattttagtgcctttatggtagatatatccatcggttaaaactattagaatatttctgtaaccatcaattatgcaataatcgttaaccttattcttaaaaaaacgccaagtatcagaaccaacatagtggtcatctttaatggcagcttcataaataagtgttgaaatactatcgtattttttgcaggtttctaaaatttcttttttagtcgctacatctttgttgaagacaattttaagtgcactaagcttctcgttcaaatttttatcggatggttcaggatcaataaatacttgaatcttatcatctatcttaatcattcttttattcatgatgtgggcttcaaaattctctgcaatggattttaaatacccaacatctctcatatagaattccattgctggcgcaggatatttctctggatttatcctgtcagacaaatccaagagtacactaatatttagattatcatttgcagaaacctttgggaattcatggttatgaataattttatcagacttaggataatctttacaagagaccataacaaaagacaagagcattaatagtattagggactggaaatactttttcattttattagtttactagtttatataaacgcccttcataactttcacccgctatatcatggtcttctaggtgttttttttcttctgaagcgcactgtgacaataactgatctctcctttttaaggcatcaaaattatctgcaatggcaagaaaccaaccttttacatattccgcatgataagtgagatagtgtttattggaaaatacaaaaccatctatagttcgttgtagatcgtttattttaccttcaattcctgaaatttcctcttttattgggttcagcttttctgtttgaactattatttctttttcactgttttttattttctctcttttagatctaataaatgatttaattttatcgaagttgtcatattccttcataataaaatcaaataccaacccccaaataatatagaccacgaaccctgcaaaaataataccccaaaattcagctttcgtaaaagctatttgtacattaaaatcaggtgaattcagtgttttctcaatatcataaatcttcttttcaatttgataagcaagtatggcgtcaaaaataaaggtaactataaacaaggttgctatcttggcataagaaagccagtttttatgtttttgaaacatatgtattaaataccccaatcccataaaggcaaaagggatggtgccaacaaacacaccttctaaccaaccatcatttattgcttttgttaaggcattggcatcaaaaattgcattggtaagttgctcagtattaaatgttttaaaaaaggcagaataggaggctgagatatagaaaactaacaagtaaaatgtaataggaatcaaaacaatcaaaccaaggtaaaattgcgcctttggcttcttatcaacatcctctacatatttttctggattatgttttacatccgctatttcgcttttgaaaattgaaatcttactttctaaagcagcaataccttcctcgataatgccctttactgtttttcttttcttcaattcaatttcgtacttacttctttcctgtacataaggttcttttaattccttctgtagcttttcatcttctctgcatttacccttataatccatatatacatcttgcaaacaagctttgaaaatcatatgattaccctcagcctgttttgaagagccatagccgctttcaaaaaatgaaagttttatatttttaacgtcttcctctatcgatttttctatttcctgaggattacttttttttatggagaatatattttttaaagtactcatatcattcttgcattttggtaattaattcttttaaggagattttttcttttgcattttccaaaagaaactcacagatatcatcaatgttctcttctaaaaactcaaatttcctgcagtatttttttaaggcatttgtttcatcttccgtgactataccatctgcccagatcatcagagctaaatcatatagatattcaattttctcatctaaggattcaggaactacagactcctgtgaagggtttaataaaatctcatttaattgatctttactaagccctctttcttccgcaaaattgtaaagcatctttaattcgagaacatcgaaattgtcatctgcaaaagccattagatataacctcaaaaagtgactttttaattcggttgatatattcattttaacatctatttaattttcacaagcgatattatcgttgtctctatctaaattggaataacaatctttatcagtttcatatgttgattgggcttctgcttgcgtagcgaagtctgaacattttttagattcacaagtagattccgaagaacaggagagacctatcaatgcagccagtaaaatgagaaaaatacctaaacaaccttttttgttatttcctttaaaaattttatttgatcggcctttgtttacaaaatgaccttgaacataggttccgtctttcttataatatccttttcggtaactcattttaatcggaattaaaatttctttatgataagtctattacttctgcattagaggcatctctttttacagcatcaataccatctttgcaactctgttttgcattatacatctcgctcgtcgctataacctctccattacctttggatcttagattggagtaaaatttaccgtttgaactttttttgatttcaaattttggattagccatgatttatatattttattgattaattattcaaacctaaactctttgaaagacaaaaccttacagatttccgtaatgcaaaaaaaaaagaactgttgttaacagttctttttgagtgacaattttaaggggtattttctaatcttcccaaccacataaggttctacccaattcttttgctttggttagtgttacttcataggtttttgtagaacaattagatagtcctctacatgcttttttgtaatggtactttttactactttttcctttacagatgtagacgttacttccaataatatttatagaaaaaagtgtcaagaatgttgctgtgattgcaaaaaacgggcatagtataccacccacagcggattaaagtgagcatagtgcggcgggtgaaagtgaaccacctgcagcggatgaaagtgaaccactaaaaatcgattctatttgtaaagctttaaatatcttttttataaaaagatattatggccaacaaacaaataaatatgcgaaaaataaaacagattttcaaactttacagtgaaggagtcagcaagcgtcaaataagcctacaattggggttatctcgaaataccatcactaaatatatagatttttttaagcggtaccaactgaccagctacgaagtgtccgctatgacacttgaggagctgaacaggctttttaaaacggatcaaaaaggcaagagtgggcaactattaaccctagaaaagtatttcccctattttgacaaagaactgcgcaaaacaggggtaaccaaagagctactctggcaagagtacctcaccaaacatccagatggctacaaactttcccagtttaggtattggtacagggaatgggtcaaagaagtctctccggttatgcattttacacataaagctggcgataaacttttcatcgattttacgggcaagaagctttccatagtagatcgctacacaggcgagatacaagatttagaggtctttgtatgtgtattgggaagtagtcaatacacatatgttgaggcgtgtgagagtcaaaaaaaagaagactttatcgcttgtatagaaaacgcgctttggttttatggcggtgttccacaggctttagtgcccgataatttgagggcagcagtaaccaaaagcagtcgttatgaacctaaagtaaatgaaacttttgtagattttgctgagcattatgaaacggcagtacttccaaccagagcctacagacccagggacaaggccattgttgaaaacgctgtacgcatcatatatacacgtgtatttgcgctattacgcaaccaaaccttccataccaagtctgaacttaacaaagctatattggaactgctacactcacataataacatgtcttttagaggacgtgaatattcccgctattcgttatttgaagagattgaaaaacatcagcttaaaccattgccagctaaacgctatgagattaaacgctacgctaatgcaacggtccataaaaacagccatatttattttagcaaggacaaacactattatagtctgccctatcagcatataggcaagcgtgtcaaagtggtttattcagatagcgcagtagagatttaccatcagcaggaactgcttactgtacatccaagaaccaagaaaaaatatggatatagcaccataaaggagcacatgccttcacaccaccgctttatcagcgagtggagcagcgaaaaatttattacctgggctaatcaaataggtggtcattgcaagacactgatcattaatatactagaaaagaaacaacacccagag

SEQ ID NO: 2660 - DNA, 22541 bp, synthetic construct
  source 1..22541: mol_type = other DNA
  misc_feature 1..22541: note = Synthetic
tcgctttctccgttccgctgaccataaaggaaatatgcctggctctgttgatcaccggcagggtcaatgaaatccggttttgtccgctatgcggatgttttgccgttacacagatactctgcgcatcgagcgctttgtcatcgccgggaaacagggaagcggtatggccgtcttcgcccaatccgagtaatatccagtcaaacaccggccagccggatattttttccacatgctgttcaatttcccgggtataccgttctacttcagtttccggatccgattctccccggattcgatgcaggttaaccgcggggattttgatttttgaaaaaaataattgttcggccataccaaaattactttcttcatgccccggtcgaacgcaccgttcatcgacccagtaaaaatgaaaattctgccagtctacctgttgaccgcgccaggccagatgctcaaataacgctttcggcgtagttccgccggacaaggcggtataaacaggtttctgctgttctgaggcctgggcggcatattttaaaaactggcggccaatggctctgactaatgcctgttgattttcaaatacatgtatatttgaatcactcataactatcccgaataaactcacttataattcacaataggtttcttccccggtcaggtttttacagggataacgccagtccatggaaggatcatcaaatagatttctggcttctttcggtccccatgttcccgccgggtaaccgtataatttaatttcaggatcattttcccacgcagaaataataggatcgataattttccaggattcttccaccgcgtcagcccgggcatataacgtgttatcgcctgcaaaagcatctaataaaagtctttcataggcttcgggaatagtggattcggcgagatcggaataatgaaaatccatgccgacttttttaattttaaaacctgcgccgggcattttcattccgaaattcaataatattccctcgtccggttgaattctaagaatcagttgattctcgattattaaattatccgcaatcattttaaataaatgatggggcgtttttttgaagtgcacaattacttcggtcactcttgccggcaatcttttgccggtgcgaacaaaaaatggtacaccgttccagcgccagttgtcaatgtaacattttacggcaacaaaagtttcggtcatcgaatcggcggggatacttttttcctgccggtagcttttaaccattttcccgcgtacccgggattcgatatactgacccctgatgacagaattccgggtatcttcgttagtaagcggccggaaagactgaaatactttcattttttcatcgcgcaccgctttttcattaaacagggcgggaggctccatggccacaatggcggcaatctgcaacagatgattttgtaccatatcccgcagggcgccggcggaatcataataaccgccgcgatcttcgatgcctgaattttccgccgcagtgatctcaatatgatggatatagttttgattccacaagggttcaaaaataccgttggcaaaacgaaaggccagaatattctgtacggtttccttacccaggtaatgatcgattctgaatacctgctcttcattaaaaatgcctgataaatgccggttgaggtctttggctgtttgtaaatcactaccaaagggcttttcgatgatcacccggcgccagttgtctttatccggtgctttgtgcagattatgccgggccaggttggttgtaatcggtatataatattcggaaggaacggccaggtagaacatataattgccatcgatatgttgtcgtttttccgtttcttctatccgcttttttaaaccgggataatcatcatcttttcccatatcgaaccggtgataaaaaactgactttagaaaattgttgcatttttcttcatcctcctgacgcctgtatccgaccgctttaatgccattccgtaaatgccggcggtaactatcgtcgttaaaatcctttcttcccaatcctaaaatgccgaattgatccggtaaaagattttgtctgaaaagactgtaaatggaggggattaatttccgggaggtcaggtcccctgaacctccgaaaataacaagaagaaaacgttcaggtgtccgcataaattttatcctgtctggttatctgttatcatcagtatgtgttgtctgcaatttattcaatttatgttttccaacaaacaaggcaagaaatatttcttcgcgggtacgggttacaattaatcagtcacacagagaatgagataaaactatgagaatctttgaagggcgttaccggtaattgccgttataaaactgaacaaaaatagtcggagataaaccatgaaacatcaaaataaattttttaccatccctgcttccggggtgcgcgctacggcattcctggtctttatcctgagtctggcggccatgatttacaattcctatatattaatcggcctgcttgcttatgactttttaatcagaacgcttggttattttaaaataagcattctggcccttattgcccgtaaaactattgcgcctcgtttgtcatttattaataattttaacagggttaatcctaaacgattcgccgcattaatcgggtttctgctcagcctgtccaccctgatttttcatatatttgaccttacaggatatatgaatattactttagcggttttggcttttttttcatttcttgaatcggccttcggtttttgcgccgggtgtaaattatacggtctgcttattaaaatgaagttaatcaaagatgaattatgtgaggattgtgtaatcagattccccggtaaaaaagcagcgtaaagactctgacatggaatcggaaaagggcggattattgttcccgtcgatcaagcgcatcggtagagagagatatatgacgccggtcttctccgcttctccggtctcttttatatttttcgtacatgtattgagcgtatttggttttatatatttcgagaagctgatccatcaaaacacccatagaatgctgcgacatcaggtaattctgaacattctcaatggtctctaagatttcaccgtcttccgccatgatctgaattttcattttttatctctgattaaaacaatttaaaactttacctataattcaatgctcgtcaaaaataacgcatcttattagttatttattttcaacgtgcaaagaattttaaaataaaaatgctccggaataaatttttccggagcaccatcattggaggagtgttaaagattttaattttatttcctattttatcagggaaagtttgcgcacttttacaccttccgtcgtagccaggcggcaaaaatatatacctgagggctgagaaccggcgttccattgtaaggtatgggttcccctggtgtactctcccatatcgagccgttttaccagttggcccagaatatttaaaatatctatggttaccaatccgttttttgccagactgaattgaatcgttgtgctgctgttaaacgggttgggataattatcgataagcataaaattaccggcagtccggctgttattacgaataacggtagattcccattttggctcgataaaaagtgtattaggaatcggtgaaaaattggtgttataaccggtttgagaatgcccgccgctgttcagaattctgccatcatttaaaagttggaacgatgaataagtaaggtaatacgcagcaggaaaagtataggttgtatcagacatggtaaccgtgctgtcggataaattaagagcaaatagatcaagttccgtaggatcaatgcctgcttttattgccggcaaatagactacgttgttaatcctgtcgacaaccggcgcataaaaactatgggttttggaattggccagtttattttttgtattaaatttagtaatagttttatcatccgtattcactgtaaataaggtgtaacacgtggaatcggctgatgaattatcatacgccattaataaatagttattatcatcgattttctgtacatccattaagcggttataggaatcattattcatcggaacccagttcggatcctgctcggaaaataaatagtcttttaagacggtaaatgtattcaatcccgggttataatattcgacctgcttgatggtatttccgccgtaggttgggcttccgccgataataatagcgccgccgtcctcagcaggcagaacaatcggattcgctcttgacgtatttaaggcgccggttgcagaaaaagtaccggcctcaggatcgtatatctcaccgtaagcgctgcttgttacattataccagccgccgacaatcagcactttgccgttgttcagcgtggcggcggccacattcatccgggcataaactaaagcgccggtcggcgtataggtttcagtctcgggatcatataattccgctgtgttataccccggcgccacacctgaatttgccgcaccggcggcgatgagaattttaccattattcaaacgggctacggcgccaaagtcatgcgggtaattcattgtatctatgacaaaagtatccggaccggtggtaaaaagatcactggtattaagtgaagtaaaaccggttccacgaccgccgacatgcaatacaccgccgtcatcaaaagttacggtgtaatggcccattctggctatgttcatatccgggcctgcggtgaattccggagaaaagctttgagcataaatgaaagttgcaaataatgtcagcatacaaatggttttggaaattgtaaacatgtgtccccctgattggttttgttctattcttattttttttgtataaatccttatcaaacatagttctataatcggtatgtaaatcttatgatttaaaaggaaaataaaagtggttaaaaactgataggtgcggttggggagggatataaattacagttaaatggatagtgtttttatgtcagacgggcagggaaaaataaaaggttgatccgccttcacggttgttaaccgctccgatcctgccgtcatgcgcttcgacaatcagtcggcagatgtagagtcccaatccgaatcctttgtgtttacggacttttccaagcacccggtaatatttgtcaaaaatgtattccagttcttcttcggggataccaggtccggaatcgatcacccggaagataataccggattcgtgttttgcggattcgccggtttcagcgataatacgaatgacgccccgctgcggcgtatagtttatagcgttggtgatcagattaaacagcacccgttccagccgcgggccgtcggcggtaatctccggtaaaacattcggaatctgcggcacaaattttatttcttttttatccgcctgaatccaaagtgattttaatacgcggtttaaacactcttttagattcaaaggcgatttgtagagtacaaattcttttctttcgaacacatgcaccagacttaattcttcaagcaaatgaataaggttttcccctagtttaagagcgttaccgatcattctcaactggccttcattcatttcgccgaatacctggttattcaataattccaggtaattgatgatactctgcgtcggcgatcttaaatcatggatcagaatagcggaaagatcagactgtgtctgtattttatgagccaggaaagccatgttgcgcatatactgatcaaaatatttaccctctttaatcaccttataatccaggttaaaatccatggagatatttttactgctttcaaatggtcccaggcaacaggttaacatagtgggggagtaactatgtatattgtttaaaaaatcagtcagatgcggaacagatttttgcgcaaaaaaaataaacaggtcaaattggccgttttccagggcttccaggcaggcttctttagaatgcaccgtttccagttgaaattgagcattattaaatacgtttaaaatccttttttccggagaagggccggcagaaaacaacaagatatttggtttggacagatacattatttacccggaacttttgatttaacggttaagaacagccgcgatattttccataacctcaaaacggcagcgcataatggttcggttgaattcataatcagatattaaaatgtcgttgattacactggcgtaatttataaaagcgctttttcccggttgtgatccagtttgatatttattcttaatttttatcggtaattaaataaaaatcagttatctcaaactcaggaaattatgataagtttcggtaaagattaattttctatggcaggataaaatttgacccagtcaatttcataaatggcggtatcggcgggagggccgtaaatccaggtttcctttgtccaggcgttaaaaaagaactgataaggcgacgtcagtctgaactgatcattataaacaactgtccgtatccgtttttgatctgcataccagcttacggaatcgggcagtatctggatagcccaaatatgaaatccgtccgatggattaaaatcaagcggcgcatcttgccaccagtaattggtttggccttcctcatgcagggcaaaatgaacttcaccttcattttcgccgaaagtataggtcagaaattcaatatcaacttcctcataagttgcaccgttccagtccatggtaaacatggaattcaaggtgcccggcacattcgacggttttaagcgggcttcccagcggccgtatccccagtcgtctttgcgggtctggatcgaaccgccccgatatggttctccgggtaaaacggtgagcgtaagttttccgtcaatggcctggcagcggttaacgtccatttgcgttccgttctgcatccaggacgcctggtgccagaccgtcgcgccgttgttgttttcccagtcaggatcattaaagtcttccacaaaagatggggtgtcgctgataacctgaacggcatttacgtccggcccggtctgatcctttttgcaggatataagagaaaagacgaaaacggttattaaagccgctttgattaggtaaatatagaatatcatattggatccttttaaaaagccgtttttacatctggatttttacccagttttccagcccgccggcaacgataatctcctgcgccgcccggccgaccgcgccgaacggatattttttaccatcggctgtaatgatggagtttttaaaatcaattacaatcgtgatatttgttttaaccgttaattggctggttccgaaccggcttttaagatcattgaccagctccggcgattcaatgattaaaaaaccgttgttgatggcgttgcgtttataggtttcgctgaacgatccggcaataaccgcctgaatacccttatatttcagggctgtggccgcttgttcgcgcgagcttccggttccgaaattaaatccaccgaccagaatatctcctttttcagcaaggcgcgaaaactgcggatcgtagttttccataaccacttccgcctgcttttccggtgtaatatcatccaggtaggtatattttcccgggtagatgccgtcggtgttcaggttatcctggtggcagaaaatcagggctccggaaatcagtccggggaaaccgtcgattatttccaggatggttttttcaacaggggattgttcgttaaccgttatgttgcccaccggtttccgatcatccatttcatacggcagatcaattttaccgcttatggccgatgcggccacgaccgcgggagaagccagataagcctgtgcattgggcgaacccatacggcctttaaaattacgattggtggcggagatgccgacttcgccgtcttccaaaagaccggcgcccaggccgatgcagggcccgcagcccgggggcaggggaatggctccggcatccaaaagcgcctgccagtcgccgcttttttcgctgtccgcctgcacttcgctcgaggcggcggcaatatagaattttacgcccggcgccacttttttacctttcataatcgcggcggcttcggcgatatcctcctgccggctgttcacgcacgacactaaataggctttatcgatttttatgttttgtttgcggatttcactgaccgccgtcataaccttaaccgaattcgggccggacacatggggacgcaccgaaccaagatccagctgaatggtttttgcataaaaagcgccggcgtcggctttgggcatatcggattgaagtgcttctatccgttgcatgttaatgcgcggatgcgccggttttccagcaggatttaaccgcttcgagcgggccttcagccagtttatggttgtttcatcgatcggaaatattccggccagggcgccccattccgtggtcatattagcgatgctcagcctgtgatcgaaggtaagcgattttacgccttcgccgcagaattcaaggccatgattcagcacttcatctttattgaaaaatccggccagagtgatgattacatctttgccggtaaccccggcaggcagttttccggtcagttccaccttggctacgggcggaacctgccaccaggttttacctgtcgcccagatagccgccgcgtcagtgcgcacgataggcgttcccaaacagcccgcgccgccgtacatattggaatggctgtccgaagccacggccagcgttccgggaaaggcgaatccttcctcgatcatgatctggtggccgatgcctctgccggcaggaaaaaaatggcagcccatggagcgggaaaattcttcgattttccggtacttggccaggtttttctcgctggtgtcctggatattatgatctaatgtatgcacaacctgatcgggatcggcgatttttttagcgccgatggaatagaatttggggatcaccgcgccggtgttatcgtgggtcatcacataagccgggcggatggtgatatagtcgccggcatgaacttccttatctttcggccagtttacggcgtatttctgtacgatcttttcgatcaggttctgaggcatagtacttctccgtattagtaatgtaaacgggaaaaatttatgaaatagtccggttagttcaaaacaaataaaggcattttgaattcattaatagagattattaaggagtcctttaaacagcatgacaagaatatgtcattccgaacttggtttggaatttaattcatagctcacttgaatttttaaaccatttgtatgagaggtaaactccggcgcatacatgcattgaacggtggctaccccgttttcaaaatttcctccatgagttacccataataaatattcgatttcatgttttccttgcggcaaataatcaaaaaagaaatttatagacgcatctttgatgctttcataatagccaattttgcttttatacctgtatccggagagcaaagtcacgggctcaaatgtcgcggcgcgccttgagaagaggaagaatccgtctgagaacgggaaggaggcgataaattagcggcaggtggctttaaattattaaatcagtaattaaaatggaaagtggcagaaagaaaattgtaatacagaatgtataagaaaccaaataaggtttttaaacagactttaggaacaacgatggaagaagcatggactaaaaataaggcaactcgttttaaaagcatattaaactttattaattttacttgcgatggacgtaaaacatttctataataattaaaaaatgttataaaaccttttttagatttagaggatataacatttttttgcaaaatacacttctttataaaatcctttcttaggaaacaactatgatgttttctaaaaaattaagcaaaaaaaataaattggtataaaaaaagccccacctaagcggggctcaagacataatgtctacggcatatagccttattgtgacaagatgcgtttaaataatacaataaaaattaaaacaatgcaatatttataaagatggagaaataaaatgggtaagattttaggacttgacttaggtacaaattccataggttgggcaattattgaagataaagaaaaaaagataataggaatgggcagcagaatatttcatgaaggtgtggtggatttaggaatgggacaaagggaaatttccaagaatgccagccgtacaaatgcccggggaatcagaagacaaatattcagaaaaaagatcagaaagctgtatttacttaaaattctttctaaaaataaactttgtccattggatacgaatgaggttaaaacatcaaattctgaaatattcaaaaacaaagaattaacagaatggtttaaaattaatccctatgaattaagggcaaaagcagttaatgagaaaattgaactgaatgaacttggcagaatattttaccacatgatacaacgcagaggattccagagtaacagccgaagcgcaggtaaagaagaaggtaaaatttatgaaggtgatgataaagaaggaaaaatagggataattaaaacccaggaaaaaatatctaataatactttaggcacctatttatatagcctttatcctgcagaaaattatccatttaaaaatagaaatgaaagaattagaaatcgatatacgacgagaaaaatgtatattgacgagtttgaaaccatttgggaaagacaaaaacaatatcatcctgaattaacaaccgaactgaaaacactaattggcggaaggaaaaaagatggatatcctgaagatggcgttttattccatcagcgtccgttaagatctcaaaaatatttgattggtaaatgtacgtttgagcataaaaaaacaaaatgccctaagagcgcaatccctttcgagctatttagaatccatcaatgggtaaatacaattgaatacaatgataagaaactatctaaagaagaaagagaaaaagttgtaaatctattattaagaagcgaaaaaatagaatttaaaaaaataagaaaggctattaataagctggacagttattatcaatttaactataaggatgatgacaaaataatgggagcgcatacaataagtcatctatcttctaaaaaattttttggcgaacagtggtttgcatttcccgaaaaacagcaggaagaaatatggcatgttctgttcttttttgaagacaaggataaattaaaacaatatgccatgagtaaatggggatttaacgaggaacaggcagaacagataagtaaatttaacttagccgatggatatgctaatctttcacgaaaagcgatcaataatattttaccgtttcttaaaaaaggttatacttacgatattgccgtagcgcttggcgggataaaaaatgcatttaacaagaaatggaatacactagatgatgatcatataagattaattgaagataatgtcgtcagtatagtaagaggccggtggaaaggtggttttattgaaaaactacgagagtttttgaaagatgaatttgagttgcaggaagaagaattaaaaaagttataccatcacagttcaaatattgaagtaaaaaccattctggaaaagttaccaaccggtaaggaagctgacaaagaaatacaaaatatcagaaatcctgttgtaatagccgctttgttcgagcttcgtaaattgatcaatgagattatagatttatacgggaagcctgatgagataaaaatagaactggcccgtgatttaaagatttccaaaacaaagcgcggtgaaataagacgtgagcaaaagagactggaagttgaaaatgaccggataaaaaaagagcttacgaatttaggaaaagagtttacccatgataatattctaaaatataaattatgggaagaatgcaatgggacctgcccttatacgggcagaaaaatcggtttgagtcagctttttaacggtgatgttcaaattgaacatattcatccgtggagtagatcactaaatgacagttttatgaataagaccctttgttttgctgatgagaacagggctaaaggggacaaaacgccttatgaatactactttaatgaatatggtgaagaaaaatggaatttagtaaaagcccaggccttaagctgttttaaaaataaacctaattaccctaatgcatacaataaattcaagcaatttgttaaacagacatttgatgatgattttataagcaggcagcttaatgacacaagatatatcagcagagaagcaagaacctatctatcgaaaatatgtgataaagttatggttgccccgggacaaatgacggcaaatttaagacagaaatgggggttaaacagtatactaagtgatgaagataaaaaaaccaggggcgaccatcgtcaccatgccattgacgcactggtgatggcttgttcaacggtttcacatttgcaggaacttagcagatggaatagataccgccggtcttcagagctaaaggatttccctatgccctggcagacatttttagaggaagcccgttattctgtctttaatatacttgtctcacatcgaaaagcagatatttattaacctgtagaacatttaccaccaaaaagaatggcaaggtttataaaaacaaaggaatcgccgcgcgcggaccgttgcataaagaaacgatttatggaaaacgaaaagcgcctgagcaggaagaagcgtatcatgttcgcaaacctatcgataatcttactacaaaaaaacatattgaaaaagtagttgacccgatcataaaaaaattgatttattcaaggattaaagacatcggcggctttgaacaaggcgataagattccatcaaatacgttttttattaccgatgaaattggaaaaaaaattccgcaaatatttttacccaataaacatggagaaccggttcctgtaaaaaaaatacgtatgaaggaaaatataggcggcgcagaacaattgaaagaagatattaaccaatatgtaaatccgcgtaataatcatcatgtacttatttataaggattttgatggaaatttaaaagaagaagtggttaccttttggaccgctgttcagcgaaagataaatggcaaaaaaattgtacaactaccggaagacgggagagaaattgttacaactttgcaaataaacgatatgtttctattaggagtaaatgagggcaatttaaatttacaaaatcaagaacagtataatttatcaattaaattatataaagttgaagcactttcttcaaaatattatgaatttagattaaacacagaggctagtgagtcccgagagtatgcaccatattatattagaatacaaagttttggtaaaggaaaaacaggctggcaaacctttaatcctattaaagtgaaggtttcgccaaccggtaaaatttcaaaacgaatttaatagcttcgggaaaactattatgttaaaacgcacgctgttattttccaatccctatcatttaagcgttaaaaacgcccaattggttaccgatgataaaaatacaaaagaaataaaaaccgttcctatcgaagacatcggttttatattattcgaacatccgcaaattacctttacccagatggtcatgcagttattggctgagaacaatacggctgtcattttttgcaataacaggtttatgccgtcttccatgctgctgcatttagagactaaccaggtacaggccgcgttgtttcgcaaccagataggagcgggcgcagcgcttaaaaatagtttatggcagcagaccgtgcaggcaaagttaagtaaccaggccggattattgaaaaagatggaacgcccctatcgcgacctggaactatttgtcggcacggttaaatccggggataaggggaatatggaagcctgggcggcgcggctgtactggccgcgattaatgggcgatgattttcaccgtggacgtgaaggcggacccccaaatgccttattaaactacgggtatgccatattacgtgccgccgtagcaagatcattaagcggatccggtttattgccgacttttggcatccatcatcgtaaccaatacaatgcttttgctttagcagacgacatcatggagccttaccggcccttcgtggatgaaatcgttctggagattatcaatgattttgatgaatgggatgagctgaataaagaaataaaaagccgtattctgcaggtgcttaccgtcgatgttacctttaaaaaaactaaaagacctttaatggtgggcttatcgcagaccagctcatccctggcccgttgttttaccaaagaaatcaggaaaattgattatcccaggctgttatgaatcaaacacgattaaacgcgtacagaattatgtggttatttgttttttttgatttaccgacaaatacgaaaaaggagcgcaaggcggcctctaaatttagaaacgacctgctgcgcgacggatttaccatgatgcagtacagcgtttatatccggcactgcgcttccaaagaaaacgccgaagtgcacagtcagcgggtgcgaacaatgatcccggaaaaggggcagattagtatattgatgattacggataaacaatatggcagtatcattaatttttggggcaacaaatcgccgccgcagacacgcatcggcgctcaattagaattgttttgaacaggcgtgttttcctgttatatttaaatgctctttgacaatcaggattaaaaaattgccgtccggccgcttcatgggatgtaaaaaaggcagattttaaaattaaaatttgcctgtaaaaccctgaaaataccgggtttttgccaacctatgttgtggcttgatgcaaaatatcgataactaacaattcatggcgcggagtccttcactacaccgctgttgtggcttgatgcaaaatatcgataactaacaatatcttcaaaaattgccgttaaatcatctggttgtggcttgatgcaaaatatcgataactaacaatcgagttactgaacaggttaaagggtttagagatgtggcttgatgcaaaatatcgataactaacaataaaaggggctatatggcaaagggaatcaggttgtggcttgatgcaaaatatcgataactaacaatcgttgccgtttccatctcctttgttgctttgttgtggcttgatgcaaaatatcgataactaacaattatacctccaccattttacgggttaattcgttgtggcttgatgcaaaatatcgataactaacaataagccgaaataatgacagccagacagagctgttgtggcttgatgcaaaatatcgataactaacaataatttccatgatatccgcatccgggctcagttgtggcttgatgcaaaatatcgataactaacaattttatttccaccattttccgggttaataccgttgtggcttgatgcaaaatatcgataactaacaatcaagggcggcgatacgctgcagatatttgagttgtggcttgatgcaaaatatcgataactaacaatatatatttatagtattgaaacgcgctgtcgttgtggcttgatgcaaaatatcgatgaataacaataatagcctgaaaaatatgaattattgtaatgttgtggcttgatgcaaaatatcgatgaataacaatttaagcgttacaaatatattttccttcgtcagttgtggcttgatgcaaaatatcgatgaataacaaaaatatactatgtatgaaattaattaccaactgcttttttgtccgaatcggaatttttaagtccccttactctgttttaaaaacaatacaaaatatatagtcataaaccaagggggaattatgaataatcatacacaaatatttgtcaatttgccggtaaaaaacctggacagagctatcggtttttttacaggattagggttaacgctcaacccggaatatacagaccaaaatgccgcctgcatggttatcagcgagaaaatattcgtaatgttgctaaccgaggaattttttaaaaccttcgctaaaaaagagatcgtcaatgccgctaaaagcacagaggctattgttgccctatccatggaaagcagggaagaggttaatgaaattgcggacaaagcattaaaaaccggcggcaaaatttccggtgatcctatggatcatggctggatgtacagcaggagttttgaggatccggacgggcacttgtgggaagttttctacatggatcctcagaagaagtgatctgctgaaaggaaaatattcctttaaaaatgatttgcagattttatattaaaacaatataattttcagacatgagcctgtataaaaggaatcggaaatccattcggttaaaagaatatgattatacacaacccggttggtattttataaccatttgcacccaaaaaagggaagtgttatttggggaaattgtaaatggtcaaatgaaattaaatgataccgggcggatgatatacgtggcatgggaatggttggcaaaacaatatcattacgtagaattggatgcatggacggttatgccaaatcatttacacggcattattataattcgtgaccgtaggggcggttcgcgaaccgcccctacgatgaaacgtaaaccaatcggtcgattgatcggcgcgtttaaaacggtatcaaccaaacatttaaatcaattgcataacacccccggtgcaaaattatggcaacgtaattatcacgaacatataattcgcaacgaacatgaattgaaccgtattcggaaatatattcgtgataacccattaaaatggcaggatgacagacattattcaaattgaattactttaagccaggattctgctaataaaatgtagatatatgattcatttcctcttaaattaacggaaacgtattccggaataaatgaaccatgaaaattaccgccgttgcccattccaatatcgccctggttaaatactggggcaagagggatgcccggctcaatcttcccgcggtgggctccatttcgcttaccctggacgctctgcacacgcacacttctgttcaatttgatgaaacatttaaatccgatacgttatttctgaatggcaaagaagcgggagaaaaggaaacaaaacgtatatccggatttttggatttaatccgggcaagaagcgggcaaaaatcaaaggcgcaggtggaaagcgaaaataattttcccacggcggcgggcctggcttcttccgcttccgggtttgccgcgctggcggcggcggcgtcaaaagcggccgggttgtctttaagcgatagagaactttccgttttagcccggctgggttcgggttcggcggcgcgttctgttttcgggggcatcgtggaaatgcataaaggccaaaaggcggacggctccgattcctttgccgaacctctttatccgccggattactgggatttgcgtctgcttatcgccgtaacttccgaggcaaaaaaatccatcggctcaaccgacgggatgacattatcaaaaaacacctcaccttattataaagcctgggtggattcgcatccggcggatcttgttggaatgaaaaaagcccttgaacataaagattttaccggactgggcgaaatcagcgagttcagttgtcttaaaatgcatgccttagcgttagccagtaatccgggcatgctttactggaatgagaccacattggcgggaattcatctgcttcgcgaaatcaggcggcatggaacggaagtttattttaccatcgacgccggaccgcaggtcaaagccatctgtctgccggaagccgtgaacaaagtaaaagaagcgcttggttctctggcgggcgtgaaacaggttatgcacactaaattaggcccgggcatcagaataatcggggaagaaaattgattgaagcatccgcgccggggaaaatgattttattgggcgagtacgccgtgctggaaggcgcgccggcgctggtctgcgccgtcgattgtcatgctcttgttaaacaacaattcaaccggcaaagggagttttcggtaacgtccccggtcattggcgcaaatatatcgccttttgtgatctccgaaaccggtaaaatcacgtttcatcccggcgtgccggccgagactgttaaaaaattaggattttttaaatcgctttttgaatgcctttataaggaagccgggacgtataacatcgaaattaaaccggcggatattgacctggataccagccagttttattcagcggaatggcgggcaaaattcggctttggttccagcgcggcgctggccgttgcattaacggcagcctttctgcagggcagcgcgatggataatccggaaccggtttttaaaacgacgcttaagacgcatcattttgcccagggcgagatgggcagcggtattgatgtggcggccagcgtttacggcggcatcttgctttataccatgaataagccggatgcagctgattttatttttccacgacgattgaaagagcggcaagatatttttatgatgcccgtttggacagggaagtcggccaatacccggcaaatggtcggcggtgtaggacaattgaaaaagaaccagcctcggctttatgataaaatgatgaacgaattaatccggatttcagaaaaaggctgtaacgcgtatgagaacggcagcgccgaagccttcctggaatgtatcgacaccttccgcgatacgctggccggattaggcgaacaaagcggcatgcccattgtttcggaagctcaccggaaaatacaggcggtttgctcaaaacagggcgttcattataaaccgtccggcgccggcggcggtgatattggcacggcgttttcaaccgacaaagacaggttgattaatgttgccaaagaccttgagttttatggcttccgccctttggaaaggaaaatcgaagggaaaggctaccaaacaaatcaaaaaaattaaaatataatagggataaagctaaatgaaaaagctatggttatgtttgatgttcatgtattcgacttttgccttctcccaggacaagcaagaaattgaaattatcaaagttcttgattgcaatcttttcctttcctctgattcccagttgatcaaactggcttatgtcaagtctccttctataacaacttctggtgaaacatcctgggctttatggataaaaacatttgcgacagtgcaattaataaaaaagcctttatattatatccctgtttattcaagtttaaatcgggatacgttatatgttcatttattcagaggtaaaaatgaaaatcttgaaaatatcaatgaatactatttaaggctgcaatgtggagaatattttaaaccgccggatttacccgatctgattgcttacagagatgccgttaataatcctttgccgaattcacctaaagtatcagatcctgattttgaagaaaattttataaataaaaaggtaaaggagaataaagaggctggaattaataaatccttaaattcagccaggtggtttcagctgggtgttgacatgatcacgaagtacgacgatttgcaatttcaattcagtatgaattatcgttttagaaataatataatttcaattggattagataattttaggtatattttttttgggaagttaaaaacaatctggggctgttatggtttttctaataactcacgctggatcgacgcttcatttagtgcgggtttaagttataatgagtcagttagaaatattggtttaatatttaagtttcaggctttaccgcatttccccacgggatttggtatgggattggttttaaccgttaatgccagtaaggaggcttcgtataattcactggcgcttgtcatcgcgttgggaagctggaaaaattaagcaaggaaacaatgatacttttattatgtattatgaatcggtaattttcatggttatcgccctttgggaatcaaaattgaagaaaagggtcaccaaacaaatcaaaaaaatttaaatacaataggggtagaatgaaatgaaaaaactctggttatgtttgatgctcatatattcgtctttcgccttctcccaggacctgcaggaaattgaaattatcaaagttcttgattgcaatcttttcctttcctctgattcccaattgatcaaactggcttacgttaagtctccttccgcaaaaattcatggcgaaacatcgtggacgttatggataaaaaaatttgcgacggtgcaattaataaacaggcctttgtattatatccctgtttattcaagtttaaatagggatacgttatatgttcatttatacagaggtaaaaaagaaaatcttgaaaatattaatgaatactatttaaggctgcaatgcggagaatactttaagccgccggatttacccgatctgatcgcttataaagatgccgttaataatcctttgccttattcacctaaagttatagaccctgattttgaagaaaagttcatagatgaacaggtacaggagaataaagaggctgaaattaataaaccggtaaatagagcagcatggattcaaataggattatttacattaagtacgcattatagaatgaataaatatgttgtttcccttggctatgatgcattctctggttctgttaataggcttagcaatatttggggggcctttggtctgtctgctaattctaattggattgatgcatcattgagtatgggtgtaagttcagcttccaggaaacattatactgaaaatgaaaatcatgatatcattaaatcaaaagggaatatgggccttatatttaaagggcaggttctgcctcattttaaacatgtttttggaatgggtcttgaattaacttataattggagcaaggataaagaatgttcatatggttgggcaacgattataatagcattaggtaattggagtaattaagtttaattatcaataaaaaacttaaacgttgaattagtcttatgagaattataaatcgaatgtaatcataaagaaattaaaccatttttttgcatcaggatgtaaattaaaattagtattaattatgaaagttcatgttatacccattattagacaggtcatacaaactttaaggaaattagcatgaattttttaatgaaggtagcattattacttctctggccgatattattatggtcagaaaacctggaaaaaattgatattgacgaaattcttgattgcaatctttttctttcttcagattcccagtattttaaaatggcttacctgcaatgtctttcaatacgggacggtgaaacagatctgacagaaaaaataatgaaggttctcaaatccaatattgcttctaatgctttaaggtatagacatgtttatcaaatcgatgatacaatgttggtacacttgtacttaaaatttccattaagtcttgagtccgtaaatgaattgtatctgaaaaaagggtttgccaaatactttaaaccggacgcgctggaagacaatttagaatatcgtgaattgtctgaggaggcgtcgaagaaatatatcggaatttggcaaaagaaagaaatgtcaacggatactcaacagcagcaggatggatcgaaaaaactacaatcggaatttcaagccaaaaatgtttttttggttcggtattcggataacgcaaatttcgatcctgatgacggcccttccgaactggtaaatcttgtatatgaagttcataaattaaaaacgggttttgaattttccgtttttacggaaaaacactatgtttatggcgaggaaggaggaatagaaaaatcagccggaattatcggccgtttttcgtggggctgggattaccttaggttaagactgggtttaggaattcttatcggaagcaacccagtgtttccaataatacctctgcccacagcgggagtcagattagggggaatagacaaattttatgtttcggctgattttatcgatgaatccaaattttcaaggtctaccataggcgtaaattacaagtttggttctaaattagatttaatcggcgccggaatagcagccggaggcgaaggcggctcggatttttatcttactgggcgttatgaattgcttaaaatggttttgttggaagcaaccgccaaatataatcgcaaatataaagatatgctcctgataggcggtttaggttttgttttttagacaggaaatgtaaaacaaaatatcttaaattattttcaagctaagattaaaaaagaacactgataaaaggatttatatgcccgattccagaatacccggtttttataaactctccgtgcaggaaagactgcgcgttttaaagagtaaaaaaatcctgaatgaggaagatttttccaaactgcgcaagggcggaagcattctgaaacccgaagattttgataaaatgattgaaaatgtgatcggcgtgtttggcctgccgatcggccttggtctgaattttctggttaatggaaaagattacatcgttccgatggttgtcgaagaaccttcaattgtcgccgcggtgagttccgccgccaaagtagtgcgcagcgccggaggattcagcgccgaaag

SEQ ID NO: 2661 - DNA, 18881 bp, synthetic construct
  source 1..18881: mol_type = other DNA
  misc_feature 1..18881: note = Synthetic
aaaaagtataattattttttaatatacttgtttacaatgtaacctgtaacaggttttaatgcttttcctgtttctggatgaactccatgagtgttaaagaattcaggttttccatttactttacaataccaatatagtgaatttccatttttaaaaaacgtagtggtatctgaaacttctattttgattaatttactttgattttcatcaaatggaattatatcatattgttttaataaaccttgctgattttcattagtacaattaactgcctcataatgatttttttgccactgcatacattgtggatctggtgctatcatgtttttagcagtatatccaatcgaagttaatccaattacacctaaaaatccaattgcaattttctttttaaaatttttacttgattctgacaaatgactttttatacttggtttatttgtttcttgattatttattgttaattcttctattttataattttcattttcaagctgaactccaaaagatttcgtgttaaaaacacgaaatggtcttggtttaaaatcgattaaaagtgccgtaatatttatagcttcaatatctgataaatcggtttctcctttaagaaaagtttcaataggtctaaacttatcagttagagattttagtctatttcgattagctgcttcatactcaaaaccaaagactaaattaaaacttaatttatcttctttatcatttgattcttttaatctttcttcacacaattgtctcaatttagctcttgatggactaattaaaaaactagaatattttccctgcttttcaaattcataatgagctttaattgcttttttgtaggcttctaaactttcagttcttgttgtcatataggaacaattaggaatcttttggaattataggaatttcaggaattccttataaacactcacacaaaaacgtaattcctttgcttcagaatcggttcttgttttaactagctattgaaacaaatgtacaaaactgatttcaaaaaagtgttgctacacagaaccgaatttttattcgggaagtataaaatgaaagttctgtagtagcacacttcaacttcccaaaacaaaagagtacccaaaaagagttgggtttaacaaattcaaaagactgatttcggaatagttccgaacagtcaaacttatgtccaatttttaaattttaaaaaaatgaaaaaatatttatttatagctgttatagctatcggtggttttacaacttcatgtacaacagataatgatgtgtttccaagttcaaaagcaaattcagaagtacaagagtttgattatactttaatgcagaaagagttagatactttgggtgatggtgatacgggagggcaaacaggaaacaatcctataaaaccataattttatcaatttctaattttatttaattaatttcgggaaataattttttaaaatgaatttcccgaaatttttaatttatcttttaatattacaatttgtttcttgtaaaaagaaagaaacagctaatttacctttagattataatttaaaagttgcagaatcactttacttatctaaaaaaagcaatcatgcttatgcttattataacaaatctttagattataatttagaaaataaaaatagtaaaagagcatcttattgtctgcttcaaatggcgaatattgaaaatttagaatcagattatatcaatagtgaagtaacaacaactaaagctattgctctttttaatgaagatactgatattgcttatcaaacaaatgcattaaatgtattaggacaaaactacactcaactttcaaattttgaagaagccttaaaagtttatgaccaagtaattagtattaatcctgatgaattaactaaatgtataacaaaaaacaatatcgcctatgtgtattcaaaaatggaaaaataccaagaggcaataaatattttatcagcaattgaaaaaaataaaacattacagaatagtcctattgattacgcaagggttcttcataataaaggatattatttgtttcatttaaaaaatgaaagtgcattagaatatttaacaaaagcgttaaaaattagagaaagtcattatgatgattctcaaattgtttcgtcatatatgcatttgtctattttttataaaaattcgaatccagatgaagcgtataagtgggcacaaaaagcatatacatcagcaacaaaagcatcaattgcagacgacagattagaagcattagatttgttatataaaagcactaataatgttgatttaaagaacaagcattataaggacttctttagaattaatgatagtttgaacaagtcgagacaaaaagctaaaaatcagttcgcaaaaattagatttgatactgaaaaagaaattaaaaaaagaaatgagtatcaagctaaaatgtatatttatattgtattattattatttacaattttaatattttttctaatatatagatttactattagaaaaaaccgcataaaaatcaaagaaactgcttatcaaacagaaactcgaattgctaaaaaattacatgacgaattagcaaacgatgttcataatactatagcttttgccgaaacacaagatttagagaatcgtttgaataaagatactttattagaaaacttagaaactatttacaaccgaaccagaaatatatcaaacgaaaataaagacattgatactggtgaattatatcttgaaaaattgaaagctatgcttgccacttataattcctcagatcgaaatgtaattgtaaatgtggatgcttttaatcatttaaaaacatcggaagaagtaaaagtaattgttcatcgtgtgttacaagaattaatggtcaacatgaaaaaacacagtcaatgttcattagccagtatttcgattaaatccaataagaaatctttgcaaatcaactattctgacaacggaattggaacagctaatttgttaaatttaaaaaatggtcttcaaaatgcggaaaaccgcattctttctataaacggaactattaattttgacactgcacctgaaaaaggatttaaagtaaaaattgagattccaaaacaatagtatatgtttaaaaaagttttaatagcagaagatttcgacagtattaatgtagccgtaaaacaaactcttgaatcgcttggagtagaagaaattcaatacgctaaatactgcgatgatgcactattaaaatttaaaaaggcaaaacaagataatgaaccttttgatttgctaataagcgatttatcttttgttgccgattatagaaaagtggaaattccttcaggagaaaaactcattgaaactattagaaacatagaacctgaactcaatgtgatagtttattcagttgaagataaagcctatactataaaaacactttttgaaaaacaaaagattaacgcatttgtacacaaaggaagaaacagcattagccaactcaaaacagctattgaaaccttactttacggaaaaatatttatttctcccgaattagcacatactttacaggataaaacaggtaaagaaattgatagttacgacattactttgctaactcacctttccaacggtgttgcaattgaagaaatggaagctttatttaaaaaattaaatattactccaaatagtaaaagtactattgaaaaacgtgtagctaaactcaaagattacttcaaagcaagcaacaacattcacttaattgctattgcaaaagatttaggtattatctaaattattcactatcaaattaaaaaaaaacaatcactttacggatttccgtaaggaatacttttttattggttttaagtttggtgaaaattttattctaatggaactacaatcacaacttaaatctttagctgataaaatcaatcaattaaaagataaaattgaaaccgaagaatcaacaaaacatgcttttgtattgccttttattaatcttttgggttatgatactttcaatcctacagaagttgtgcctgagtttacagctgatttaggtttaaaaaaaggagaaaaagtagattatgctattattcaaaatgaagagcctattttaattattgaatgtaaaaattggaaagagaaattgagtgtgcatagttcgcaattgtttcgttattttcatgtgtcaaaaactcgttttgcattattgactaacggtattcaatatcaatttttcactgatttagatgaaaaaaacaaaatggatgaaaaaccgttttttgagtttgatattaacaatttaaaggatagtgctgtaaacgagattgctaaatttcacaaatcgagttttgatgtcaataaaattttagacaatgccagttctttaaaatttatcaaagaaatcaggaaacaaatcgatgtcgaaattcagaatccatcaaatgaatttgttaggcttttcgcttcaaaaatctacaatgggagattaaccgaaaaggtaatggaagaattcaccgaattagtacaaaaagcttttggacaattaataggtgaaaaaatcaatgaaagattacattttgcacttaacaaagaagtcatcatccaagaaaaagaccaaattgaagagattgagcaaagcaaagtggttacaagtgacgaagaactggaagcttacagaattgtagttgctattttaagacgaaaactaccaacgcatcgaattgtttatagagatacgcaatcctatttcggaattcttttagacgacaacaatcgaaaacctttatgtcgtttacatctaaatggaggtaaaaaatatattggcttattccacaacgataaaaatgaaacgcgccaacccatggaaaccattgatgacatttatttgtttgaaaatgaattgttagagacggttgggttgtatgaattagagtaattaattaaaacaaaattatggcaaaaattgcagaaatcgaattaatcggttgttcaggaaaaaaatatactttttctatatatcctataactacctcttttgtaagtttgggtggagtttactacattagtaagagagttgatattaaaggaataggaaaccatacccatatttatttaggtgtaacggataacctttcaactagattcgataatcatcataaacaagattgcttcgaaaaagatcaagctaattgtgtatctatacttttatgtgatgatgaagatgaaagatttgaaattgaaaaagatttactttgtaattacaatttcaagtgtaatgaagtcctaaataattaattaaattttaaacactcttcggagtgtttttttatacaaaaaagtcccaccgaagcaggactaaaggttttcacctacggcatatagccttattgtgataagattaaagatttgaaattctaatctgttacaaatatagaaaaaaactttttcaatatgtttacggttttccgcatttacactaattttcttttccttatttttataaattgattttttaaagcgatacaaaatggcaaaaattttaggattagatttaggtacaaatagtattggttgggcattgattgatgatgttcaaaataaaattttaggaattggaagtagaatatttccaatgggtgttgaaaatttaggtgatggagatggcgaaatttctaaaaatgcaagtcgaacaggagcaagaggtgtaagacgacaatttttcagaagaaaattgagaaagaaagttttattgaaagcactagctgaaaataagatgtgtccaatggttactcaagattttgaagattggaaaaaaactaaagaatttcctttggaaaaattagccaattggttcgctttaaatccttatgaattacgtcaaaaagctttaaatgaaaaattatcactagaagaaataggtagaattttttatcatttaattcaaagacgtggatttttgagtaatagtagaaaaggaggaagtgatgacggagctatttttaaaggaaatccaaaagaaggtaaaattggaattactgaaacacaagaaagtatccaagatacaactttaggttcctatttgtttgaaatttatccgaaagaaaatcaaccttttcaagatggtttggaacgaattcgaaaccgatatactactcgaaaaatgtatgttgatgagtttgaattgatctggaataagcagtcacagtttcattctcaacttacgaacgaattaaaaaccttatttggtggaagaaaattggacggttacaaagaagatggaattttatttcatcaacgacctttacgttcacaaaaacatttggttggaaattgttcttttgagccttctaaaaccaaatgtcctattagtgccattccattcgaacaatttagagtttggcaatgggttaatacagttgaatataatggaaagaaaatttctcaagatgagaaagaaaaaatagttgagtttttatatgccaatgaaaagccagagttcaagaaaattagaaaggctattggtaaagaaagtgccgaattcaaattcaattataaagatgatgataaaattgtaggaactcataccatttcaaatttatccaataaaaagtactttggtaagaaatggtttgaattttctgaaaaaggacaagaagatatttggcatgtattatatttctttgatagtaaatctaacttaaaagaatatgccattaaaaattggaatttcactgaagaacaagcggaatcaatagcaaaatttaatgtgaaagacggttattctagtttgagtagaaaagcaatttcgaacattttaccatttttaaaattaggatttacttatgatgttgccgttgtgcttggtggaattaaaaatgtttttggttccgattgggaaaaattatctgaagaaaaaagaaattatttaattgataatgttgaaggaattgttcgttctaaaaccaaaggtggatttatagatattatcaaagatattttgagaaatgattatgctatttcggataatcaattacgaaaattatatcatcattctgcaactatagatgttgctgaattgttagaaaaattgcctgtagggaaagaagcggataaagaaatccaagccactcgaaatccaattgttattacagcattgtttgaattacgaaaattagtcaacgaattaattgatgaacacggcaagattgatgaaatcaaggttgaaatggcacgtgatttaaaaatttcaaaatcacaacgaaataaaattcgtagagaacaaaagcgattagaaaaagaaaacgatagagtaaaagcaaggctattagaagaaggacaaagaattactcatgataacattctattatataaattatgggaagaatgtaaacgtacttgtccatatacgggaaaaccaatatctgtaactcaattatttttaggtgaagttcaaattgaacatattcatccatggagtcgttcgttaaatgatagtttttcgaataaaacattatgttacgctgatgaaaaccgtaaaaaaggagacaaaacaccatttgagttttatggtaatgacgaagccaattggtcagcgataaaagaacgagctttaaaattattttcagatacgaaagaatatccaaatgcgtatcaaaaattcaaacgttttgttcagataaagtttgacgatgatttctcttcccgacaattaaatgatacacgatatataagtaaagaagccaaaaactatttatcgagaatttgtaaaaatgttatcgtttcacctggtcaagcaacatcaaacttgcgccaaaaatgggcaatgaataacattttaaatgatgagaatgaaaaaacaagagaagatcaccgtcatcatgcaattgatgcattagtaatggcttgtactaaagtttcatatgttcaagaattatcaaaatggaaccgttataacagaaattcagagttaaaaaacttcccattgccttgggaaacttttagaaaagatgccgaagttgcagttgacaaaatattgatttctcataaaaaggtttctaatgatattacagttcgaactcacaaatgtgaaaagaacggaaaaactcatgtaaatgttggagttgccgctcgtggacaattgcataaagaaaccgtttatggtaaaagaacatttaatggagaagaagcttttcatgttagaaaatcgattgattctttaaccacagaaaagcaattggataaagtagtagatggatttattaagctattaattagaaaaagaatccaagaattaggaggatttgttaaaggaaatataccggcgaatactttttttgttgtggatgaaaacggaataaaacgaccacaaatctttttacctaataaaaatggtgcacctgttccagttttaaaagtaagaatgaaagaaaatattggtggtgccgaaaaattaaaaaacaaggtaaaccaatgggtaaatccaagaaataatcatcacgtgttaatttacaaagatcaaaaaggaaacctaaaagaagaagtagttacattttggacagtggtagaacgcaaaagaacaggacaatctgcttatcaattgcctcttgatggcaatgaaatattaactacgttacatattaacgatatgttcttattaggtttaaatgaagacgaaatcaattgggaaaaacctgattatgaagttttaaaagagcatttgtatagagttcagaaattgacttctggagattatttttttagaaaacataaatcatccacagtaacagatgatgattttaaacaagttagaggttttggagatggaaaaacaggttggtttacgcataatccgattaaagtaaaaatttcagtttcagggaagattgaaaaagtataattttgataaataaaagttcattgacataaaaatcatcttaaaccactcaaaccacaactgagtttctacgaagtcactccgttgtggtttgattaaagatttgaaaacacgatattttatggtagatgttggcaacgtaaccaaaagttgtggtttgattaaagatttgaaaacacgatattaaacttttttatttatgaaaacaacaattgttgtggtttgattaaagatttgaaaacacgatattagatgctttaaaggctgaaatcgaatctttgttgtggtttgattaaagatttgaaaacacgatattttcttaaatcgccacgatttaacctatctagttgtggtttgattaaagatttgaaaacacgatatttaataattattaattctaagccctttaatgttgtggtttgattaaagatttgaaaacacgatattttttaaaataatcatattacttcttttattgttgtggtttgattaaagatttgaaaacacgatattaaatgcaatcagataaacaaaaagattttggttgtggtttgattaaagatttgaaaacacgatattagtggataaatactgcgaaagcattactagttgtggtttgattaaagatttgaaaacacgatattacagcagtagaatggttgcaaaaacaattagttgtggtttgattaaagatttgaaaacacgatattaatggtattaacttactttcaagtgcgaaggttgtggtttgattaaagatttgaaaacacgatattctggagcatcacactatatggtcattataggttgtggtttgattaaagatttgaaaacacgatattcagttcctgtatatccagcagtagcagcaggttgtggtttgattaaagatttgaaaacacgatattatttgatttaaacattagtattatacctaagttgtggtttgattaaagatttgaaaacacgatattaaaatttatatatcttttttaattctgagggttgtggtttgattaaagatttgaaaacacgatatttatgagttgtcaaaaattgaccagtcagagttgtggtttgattaaagatttgaaaacacgatatttaattaaatattcttttcttacttgctagtgttgtggtttgattaaagatttgaaaacacgatattaacttctgaagagttattgactttcttattgttgtggtttgattaaagatttgaaaacacgatattctgattacagcactaaaaaataacgtaactgttgtggtttgattaaagatttgaaaacacgatattttttgaaaacgcacaagatgctgtcctttggttgtggtttgattaaagatttgaaaacacgatattcttgaacaatttctcctaacgaaacgttaggttgtggtttgattaaagatttgaaaacacgatattaaaacggatttaatttaaacataccaggagttgtggtttgattaaagatttgaaaacacgatattaggaatttcagtaaatacttctgaaaataggttgtggtttgattaaagatttgaaaacacgatatttggctggacaaatagacctttttatgttaggttgtggtttgattaaagatttgaaaacacgatattcttaataaaatagcacttatatatgattaagttgtggtttgattaaagatttgaaaacacgatatttttttcaattttatgaaaagaataatcagcgttgtggtttgattaaagatttgaaaacacgatattacgatagtataaaaaaaaaccactatcgggttgtggtttgattaaagatttgaaaacacgatatttacatgacagcaagtaaccagtttggattggttgtggtttgattaaagatttgaaaacacgatattgatggagcttggaaattattaggctacgatgttgtggtttgattaaagatttgaaaacacgatattttggaactggtaatgttcgtcagttaggttgttgtggtttgattaaagatttgaaaacacgatattataacaaacgtttgtgcgaagtagtcaacgttgtggtttgattaaagatttgaaaacacgatattaaccgaagaggaaacagttgttccaggaacgttgtggtttgattaaagatttgaaaacacgatattttaccactttaaacacttaatttatgtcacgttgtggtttgattaaagatttgaaaacacgatattgaggtgttatacatgatgcaattagattgcgttgtggtttgattaaagatttgaaaacacgatattcaaagaaataacaccaacatacaccataagttgtggtttgattaaagatttgaaaacacgatattatgctgaaactaaagtagcacgttacattcgttgtggtttgattaaagatttgaaaacacgatattagtattcaaagtatagatcgtttattacatgttgtggtttgattaaagatttgaaaacacgatattcgtgctgacaaagcagttggagactttactgttgtggtttgattaaagatttgaaaacacgatatttaatttccatttttccacaccatacatcacgttgtggtttgattaaagatttgaaaacacgatattaaagaactaaaattcaaaacaactcaacttgttgtggtttgattaaagatttgaaaacacgatattatatttaaaaaataatatactagctaatgggttgtggtttgattaaagatttgaaaacacgatattagttggtatgttaccttctaataatcaataaattaaaagagaatatcgtatgaaaaaatgcttcttttttgcagtgataaggcgagattgaggcatttttttatttcaaaacaattccaattgggttggttgtggtgcttttggaacttcggctttaccccagaaattcaaaatattgccaaattgtttatcagtaattcgtaaaacacttactttgcctaaaggtggtaataaattgtaaattcttttttcatgtacatcagcactttcgccactagcacaatgacggacataaacagaatactgcatcatactaaaaccatcttttaataagctgtttctaaatcccgaagcgtttcttcggtcttttttagtttctgttggtaaatcgaaaaacacaaatagccacataattcggtatccatttagttccataattttggatattttattttcttccgatctcctgtataacatttttgtaaagagctcgcagttttctgcaaagcaaccatcaaaggacttttctcgtctttaaaataaaccgttcgggtaagaatttgaagcaattcagatttaatttgtgtgtttaattcttgctcggagtagttttgcataatttcggctactttttcatccacaattggtcgaaaaggttccattatatcatcagccaaagcaaaagcattgtatttacttttgtgatgtattcctaaagtattcagtaagccacttcccgacaatgctcttgcagtagcagctcttaatattgcatagccgtaattcaagaagttgtttggataatctccaaatcgttctcttttaaatttttgttcaaagaatactttccaataaaaacttgcagcaacaccttccatatttgagctgtctccacttaaaacttttgaagctaaaaagtcaaaattattttttttagatgttattttttgcaataatataccttgattagttattttttcaactatggtttgttgccaaagttgttttttaagcggaacacttgcgttaatttgattcttaaaaatttcttgctgaatatgatggctgttgaggtttaaaaacattccgtttggaagatgactcgtgttacaaataattactgaagtattattttctaccaataaattcattgctggtatactcaagtaaatttcagaatgatcaattactataaaaccaatatcttcaataggaattgaactttctctaatttcagttttaataactaattgaagatttttagtagaaattgatgctttgttttctaatagaattgattttttcagcatttttatttctaaattactttatgtcaggctattaaaattacgtgaatccgtaatgagatattttattttttaaatatttttataaaaaatcccctatgctaaaaaaatataatattttaattctattattctcccaaattttattctcccaagtaaaactcctttcttggaatgtagaaaacttaggtagttcaaaatctgaacaggatattgctttcattgtaaaaacaattaaagattatgatgttgtggtgttgcaagaaattgttgctggagacggtggtgcgcaaactgtggctaaattagcagatgaactcaacagaaaaggttcaaaatgggattacaccataagtgacccaacgagtagtagtgcctacaaaacagaacgctatgcttttttatggaaaacaagcaaagtcaaaaagattggtgatgcttggttagagaaaaaataccatttagaaatcgaccgagaaccctactattgtacttttgactataatggcaaacagtttacaattgctaattttcacgccataaccaaaagcaaacaacctgaaactgaaataaaatattttaaatttttgcctgctcaatatccaaaattaaatctattgtttgtaggagattttaattgtccgcaatcgcataccgtttttaatccattgaagaaaatgggatatacttgcgtgttcacaaaacaaaaaacctcattaaaaaaagaatgtgtagaagacgaatgtttggcttccgaatttgataatatttggtataacacttctaaaatcagcatcagtaattcaaaagcaattcacttttataaatcttttgaaacgctaaaagaagcaagagaaatctcagatcatattccaatttctacagaaattacaattaagtaattcgataggctttacggaaatccgtaaaatataatttttcttctaagttacttttgaagtaaatcttatgttatgaaaaaactatattcttcaagtagtattttattagtgttgttttttgtaattttcttcaattgcaaagaaaagaatacaaaaaaagaaaccattgaaaaagagcaaatcaagccttttttaaaaacaccaccaaaagacgatgtaacgtatcataaagacacaacaaaagaatatgaatacagaactggaacctcgggtgattatacttataactacaacacttatggctttgatgacgacggaaatgaagttactggtaatatagcagtagatgggaagtatggtaatggaattctcatcaaagctaatggagacgaaatagatataaccgttgaatggattggcaaaggaaaattacttgcaactgatgaagaaggaaacgaatatgaattatatgttgatgaagattaattcgtatatttaaaaatcaaaattttactatgaaaaagataattttactttccttgattttactacttacttcttttaattcaatagaaagcgatgtttacatatgtggggcaaaaggggcaaaaaaatatcacttttctaaaacatgtagaggttttagtagttgtaaacacgaagtaaaaaaagttactttaaaagaagccgagagttttggattaacgctttgtggttgggaggattaataagtatttatctgttttaatccgtattaatacgttttaataatattcagagtaaacatttttctatttttattaactatttattacttctttttctactttctttttttctaaataattaaaaaaacttactataacaatagtagtaattactatagtaagaaagtagttttttcttttaaaagtattattctcttctactaaattttcgtaagattgattattttctatcactacgacttctctaaaatccaccatcttttattattttaatgctatttttttctttgaaatatagaaattcataaattgcatagacatgtctgttatcatactttactacatgattgaaaacattgaaaaaaaaacctttcccttcaaggattttctcatctatttctattttatcgttattctttaaaagttctagcaaaagtctatgattgctatgaatttttttatcaataaccgctctactttctctcaatttatttgcttgttcattgtggtaatcagttttgttttttgcattagcaaaaatctgatttcttcgtttgggaataaactcttctccagagtataagcaagttttttttttaataagctttgtcatgtttaaaaagttttgaattgtttgaaagctttttagcttgcttctgagtaaaattctattttcttagaatcttggcttaacagaattaatgttctcttcggttaatgagtcataatggattagaactcttttgccaagtttaaaagccttaattcgatgatcacgaatcagacgatcgattgttttagcagaaactttaagataatttgctgcttcatatctggatagatattttggaggtataatttgtgaattcattggttattattttttgctaaataacaaacaaacgaaacgcaaaaacgtcccatttttttaataagaaaatataagaggacgtttttatattgatttattttgtatgaagattatttttagagttttgaaattttctaaacttatcttttaattcattttcttctaaatcaaggtattctctgtataaaagtacaattgttatatgtttaaaaaagggaaataatagtctgttttttcgtgtagagcttaaagaagaatctactttaatattctcatcaataattttaattaatcttttttttgacaatttgaaatcagaaaatagatataagtcatctattgtcttttcaattaaatttaagttatcagttttaaatgagttaaaaaatcttataatataatcgtttttagaatctatatcatatattgtgagatttcctttttcaagattaattgaaaattctataaattttttgtaaagttctttgaagtttatagttgtattgatactttgaatatttggggaatgagaataaaaataagtttctgataattttaaaaacatgaatttgtaagtgtaaattataatttcgtttaaaaattttttagaatcaattttaatgaatgaactatcttcataatcttttatcagttcttcaattttaattaaatcgattctatagtttaataagtttacaaattcttttttattggaaataaaagtagaagtaatttcctctaattttagtttatcaatttctggattaaaaattaataaaaggatacggcttaaaagtatttcgaaagagagctgagaagaatttaagttattgattacttgtaagaggtcttctttgaataaattattctgtgttgtaaataattcaattttatttattgagccatcaatgttgtttttaattacatgttgataatttctatttttgggtacaaaaatcttcttctttatgtcttcatatgagtataaattatcattatcaaatgcataaaattgataaaaaggaaataagcagagaaccaaagaatctttcataaaatttttaaaaatattttttttaaaattagaaaataaaaactattttagtaaagatattagattttggcacaaaaaagacacaaatctcaatgaaaaatccccaaaaccttattttataagggtttggggattaataagtgacctcgactggattcaaaccagtaaccttctgagccgtaatcagatgcgctattcagttgcgccacgaggccgttttttgtgagtgcaaatatagttataattgtgtaaattgcaagtctaaataagaaaaaatatataaaaaatgaacattgaaaactatatccgtgatattcaggattttccaaagccaggaattggtttcaaagatataacgccattattgattaatccagaagcaaaaaatgagtgtttggaattgttaatcagtacattacaagataaaaaaatcacaaaagttgtaggagtagagagtagaggtttcttttttggaatcttattggcacaaaaattaaatgcgggttttattcccgtaagaaaaccaaaaaaattgccttttgagacgataagtgcatcttatgctttagaatatggaaccgatacactagaaatgcatattgatgctattcaaaaaggagatagagttttagttcacgatgatgttttagccacaggaggaactgcaaaagcagtatgtgacttggttgagcaattaggaggagaaatcgtgcaaatgaatttcttaatggaattatcgtttttaaacggaagagaaaaattaggaaataaggaaatttttgcagcaataaaatattagtctaacgattttacagttacccaatatcgatacgcaattatagctttttgccatttttttgctttgataggatctaaaccttgtttggtaaaactgggtaaaagagctttgttaagtttggcaagtaatttatacatggttaaatttttggcaaatataagaaaataaaaaatcccgattcaatcgggatttttttggttatttggttttgacttcaatcttttttatgacaatgatattattttcatttgtttctttttcagttacttttaaataataaattttatcatgattcattgttaagaaatcttctgcattgttaagttttttcccattaacaaaaatgtctaattttccattttcaattttaacacttggttcgcctggaattttaagtctgtttcctccataaattacagattgattaccattttcagtttcaattattttagtgcttttatttcgatccatttctgctttagccttttgcatttccgccttcgctttttccatctcagctttagctttttccatttccgctttactcatttccatttccttttcaacttctttccatgagcctccttgaattgttttgatatttcgtttttgaatttcaattgattttttgccgttattgttgttaacgtttaccgattcaatttcttctctttcaactttgtctaattcttcttttgtcgcttttttaccattaatatagatttcggtatcttctgaaattccatttgaatttttagtaacaattcttatttcttttttgatgtcaccttttttaacatctactgatttgataatttcagcatctattttgtccatttcttctttagaaattattttgtcatcaagataaataatagttttaatttcatctgaaatagttgaatttcctttgaaaaccattattttttttccggttttatcattttcatccatctctatggcaccgtctaattccacgattttatctttcatttcttctttcgaatattcttttccattgatgatataaatagattcacctttgtctgattttttaatttcgatagtttgagtttcatcatttgctttcattttggcaaaaactgttgatatgttatttctatcgaaacccatattcccttttccgttttcatttatttctttgaaaaagcgaattggttcaatcgcttcatcacccttaatcgaaattcttcctgatgttttatctctatcttcaaatttagcttctaaagcaatgatttcgtttttagaatttcgtttgattttagaaattttaaggtcgataccaaattcttttttcaataattctgtttcttcttttatttgggcatcggttgtatttttatcaataacaaattcaataatttgatttgcttctgattttgaaattactacttccttcacttgtgcaatggtttcaatttggaataataacatgaaaccaactattagcggaagaatggtagcatacttccaaacatttcttttgtgggattgatttgtgtgtaacataacgattcgttttttgattaatgattgataaaattgattagtgatacttaagtcgtgt

SEQ ID NO: 2662 - DNA, 18826 bp, synthetic construct
  source 1..18826: mol_type = other DNA
  misc_feature 1..18826: note = Synthetic
aatgaaatacatctgttttatggatgagtttaaatggtatatggataatgataatattgaactttctgccggaaaacaagaagctcaggatgcctcaggagttgctttagaaggagcccaatttatttctgtacatgaagagcaagattcgcttagcttcttctcaactaaagcaaaatatgatatcagaaaaaaagtaatttatgccgatggtgttaagtttgtgaatattgctgatgcgatggtttatcctgatagttctaaattgattattgataaaaatgctcaaatgagaacgcttaacaatgctagaattgtagctagttacattactcaaaatcataatatttataatgcatccattaatgtctttggaaagaaaaaatatgcaggttcggggtatatagattatgttgatgaactcgaaaagtctcaaaccatttacttaaaatctattgctgtggatactaccggacaaactattgctaatgcagatattttggaagaagatgggtttaagttaagtccacagtatgagtattatggtaaagttgagctttatgctaataatcagtttttaacttttaatggtacagctagaatcttgcacgattgtgatttactaagtaaaaattggtttacctttaaaacaccaatagatccaaactcaatatatatacctgttgatagtacaactaaagatatagaaggaaataaactgttagcttctgtaatgttaagctcagattctttgggaatttattcaacattcttgaatcgtaaaataacgtatagtcatcaggaagttattcctgctcagggattcctttattttgataaagaaaatgaagaatatagaatttctaataaagataaattacaagaaatgtcttttggaggaaattacttaagcttaagtaccaaaacatgtaaaatttatggagaaggtacaattaatttaggcgcagaaacaggtcagtttgaaattgcttcggctggtgttgttcatcataaccaattagataacgaggcaattttcgatttagtaatgtcaaccaatttttttatggaagacaacgctatgaaaatattaactaaaaaattaacagaagcttctgcgttagaccctgtaaaattagatagaccaacatttgaaaaagggattaaagaattacttggaaaagatgaaggcgataaattgattgctcaactgaatttatatggggcttacaaaaaagtgccggaaacaatgagaaaaaccttggtttttaatgaagttaagttcaaatggaaccagcaagaaaaagcttataggtcttttggaaaaattggaattagcaacttaggcaaggatcaaattaataaatatgttgatggacatatagaaattgtaaagaaaagaagtggtgatattgttaccatttatttggaagtagataaaaacaattggtttttctttaattacactagaggaatacttcaggtaatttcttctgataatgattttaatactattattaaagaaactaaacctgataaaagaaaagctaaagccgaaaaaggtcagcaagcatatcagtttatgtattcttcagagaagaagaaaagagattttttaagaagttttgaataataattttaggaaaattaagtgttttttgcatcaatgcaataaaattgtacatttgccgaattgtagttattgcaatgagagatagatttttattaaaaatatacttagtcatactgttggtttttactagctcaacagtggcgtactcccaatataattcagaggaagagctaaagaaagcagcagataagttttttgctgaagagaattatattgaagcattaccactattttctcagttattaagtacttatccaaaagacttaaattacaactataaatatggagcttgttacctttatggtactagagataaagaaaaagccattaactatttaagttttgcagtttctcgcccaaatgtagatccattggcttattattatttagcaaaagcttatcatcataattatgaatttgcttcggcaatagtttattttaataaatataaaggaaaaactacttctaaagaacatcaaaaatatgaaatagacaggcagatagaaatgtgtaaaaatggtcaacagttgcttaaaaaaatcaataaaattggtgttatcagtaaaaaagaaattaaagaatccgaattttttaggagttatgacttaagaggtttgcaaggaaaagtaatcgtaaagccggatgaatttaaaatgaaagtagataagaaagaaaatgaatattctattttgtattcagaccctaacttaaatgtggttgtgttttcttcttatggagacaaaggttctaataaagacatctataaaattgaaaaaattgggattaatcagttttctgatccaataagtttaggagatgtgattaatacgccttacgatgaagattatgcttttcttcatcccgatggaaaaacactttatttttcttctaaaggacataacagcatgggaggttatgacattttcaaatctatttacgacaatgcttctggtacttggtcaactccggtaaatttagattttcctattaatacgcctgatgatgatattttatatatcagcgatattgataatcagttggcatattttgcatcttcaagagcaagtaaacaaaatgaacttaccgtttataaggttaaggtagaacctgagccgcttcataaccctattattaaaggcttgtttgtttctgaagaaaatccatcacttaaaaacgctactatttctattgtagatgctatggataataccaaatatggtgtttataatacagatgaaaacaacggagaatatttattgacctttcctgctgatgagaaaaaatataaattgattgttgaaaccactaatgatgcaccaattcattctgcaattattgaattacctaaaatgacagggtttaaacttttaaaacaagaattattgttggtaggaacaggagataatgagaagttagtaattaagaacctgtttgaccaagaggacgaatttgatatttctaatccaattattgttcagaatttacttaaacagcaagctaagttagatgtaaatatctctgaagaagatgctttaaaatctattaatgaaacttcttcaacattggcagctaacgaaacttcaagttctgaatatgctgactactctgatgataaactaagagcagttgccagtaaaaaagtaaatgaattacttcagaaaactaaaaagtctgaagaagaaaaagacttttattttaattatgctgctacaaaaactaatgaagctaaaaatcaatacaatcaagatactaaaaataaagatgtagttgctgaagatgtaaacacagcatcaatagcgttgaaattagcacgagtaacccaaaatgaagctgttgaaagaaattcagacaaacctaagttgttagaatatcaacaaaaattagaagcagcaataagttcaggaaataggagcgaagcagagttaataatggcagaaatagaaaaaattgaggctgctgcttattttgaaacttcagcggttgatgtagaaactaagttggcagatgaaaaattaaaaatttctaaagccgattaccaaaaacaacgagacattgtaataggctataccaatagaaaattagagttagaaaaatctattacagctattgaatctcaaattgaggaaactaaaaagtctaaagataaagaagccttacaagaccagttggctacttataaaatagatttagaggatttagaatttcagatagaaaaatctaaagcaaaagaattacttgcaaaacaagaatttgataaagctaaaaatgaagcgaatttactggcaaatgttgttgatgcagcaaaaaaacaaactacaaaatctccaacgcttgctaatgaagcaattcttgctacagaaagtaacattaagttttttgaggaagaaggtgtgttaggttattatccggctacaagttcatcaccaaatacaagcgttacttctactagcttagtagccatgaaagatgattacgaaattattgatgataacggaaatttaatcgattacaatacaaaatacgccaatcaggtggatgagaacgataataatccaacagcaataattgatattaacaaacaatggatagctgctattgaggaagatattgagataaaaaatagcttgaaaaatagtgcaaaaactgttggagaaaaagaagagttatcaaaaatagttaaccaattagagacattaaagcagcaaaaacaagaagaaattgacttgcaaactaacttagcacttcaaaaccaaactaataataatgttagttctaatgaaaatacagtagcagacaataacaataataccgctaacaccccttcttcttcaaaaacaaacactaaaaaatacgaaacttcaattatagataaagatggaaatgttattaattacaatgctcagtttttagaagagttagagcaacttccagctgatgaacaaacagctaaactttttgctcagaaagctgaaatttataataaatgggcagatgcaactgaacaagaaattaccttaaagaaaatcgaacttgttgaggcagatgccaatgaagctcctgaaattcaggaagatttagatgaattagcttcagatttacaagataaacaagaatttacggctttatttttaacacaagcaaaagcactggcagctacagaagatgaattagcttatgtggaagatatcgaaaataaaattgccgggaataatgttgaaagtaatgagttggctagtaatgaaactaataacaacaatcaaaacaacattacttcatccaatcagaaagttaatgctacaaagtataataacattacaattaacaatgatggaagtgtaaatgattatgctactgaatatgaaaatcaattagcagatttagaattacgttctgataataaagttaaaattagtgaagaacaagttgcggtaactaccaattggattgaagctatagatgaagaaatagcttatcagaacgagcgattgatagctactgatgatgaaaatgagaaagcaactattgagaatagaattgctgatttaaaagagcagaaatcaacacaaattgcacaattaaatactttccaaacagaacttatagcagttaaatcaacatcgactaatgagactgctaatgaagttgcagtaaatgaaacaactacttcaaacacaacagctcaaaaccaagttaataagggaaattcatctttaacttataactcaactaatgccaaaaacatacttgctaatgttgatgaccttacagccgaagtaaattcattaagagagaaagcggataacacagaagatgaagcgtataaaacagcaaacacaactgaaaaagaagagaaattagctgaagcagaagaaattaataatcaagcaaacgataaggaaattgaaatagcaaccttgtacgaaagagctaactcaacagaatttaaagataaccaaactactgtagatgcacttttaaaatccattggcggacagtcaacagacaataattacattatggctgaaatgcttaatgatgagtcggttaatttgttcaatgaagcttcagatgctcgtaaacaagcagttgctatcaataattttaaccagaaaaaagacttgttagatgaagctaataaattagaaaaagaagctatagaaaaacaacaaaatgccattggattattagagcaaatcagcacttcttcatcaatagctgcaactaacaataatcaaaataatacacaagaagaggtgattgctgaagaagtagtaaataacagtcagcaaataacaactaacgaaactcaatcaaccaataataatactgaggaagatatagttgctgaggaaacgacaacaactaacaatcagcaaacaaccaacaacagacaagcatcaactaataatacccaacaacaggtggaggtttacgaacctaagaacatagcattaccatctaaagagagaaaacaagatgctattcagttagaaaaagaagcaataaccttaaatcaagaagccaaacaacttgatgaaactgctgagaacactaaaaacagaaaagaaaaacaagcattagttgaagaagcccaacaaaaaagagaagaagctgacagaaaagcgaaagaagcagaagtaatttatgcggaagtgaaagaaatggaagcagaggaagagttgtatttagaagaattagcaacacaaagaaaagagttggtggcaacagtattaacaccggaagaggaaagttatgttcaaagtcttactccggaagaaaaagcagccattaccaacacacctgaatttaaagaatataaggagttaaaacaaagttctagaaggttggtaaaagaagcacaagtagagtatgttgctgccgataaagctaaagaagaagctgacgatcaaaaacaattaggtgttgctcttcaggctatgcaacaagcagcagcaactgaggctgataaaaacaaattggcaaatcaaatgaagaagttagatgagatgattgcccaaaatgaacaaaaagcaaaagaacttagagaacaagctgcagctaaagaacagcaggctttagaagaaaacaaaaaagccaaaaacatggttgccaacaaagatgaaaattcggctcttggctttgttgtccttgaaaaaaccaatgatacttctggtgatatgttagctgactatactaatgaagtgaatagcagtcttcctgaaaaccaaagaaaacaacaggctaataacaaaaatgaggaagatatacttgctgaagaatcgtcaactactaacaaccaacaacaaactaataataatactgaggaagatatacttactgaggaaacaataacaaataacaatcaacagtcaactaataatcaatctcaaactaataacacagaagaagatgtaattgctgaggaaaccacaaataacagtcagcagtcaacaactaataatcagcaagcaaccaacaacaaccaacaggctactaataaccagcagtcaatagcaaatatcgatgagattccacaagaattaacagaatctatttttgccattacatcgccaaacgaatctgcttacaatgaaaacaagagaatacctaaaaaccctaaaatgccagaaggtttggtgtttaaggtgcaaattggagcgttcagaaacccaattccacaagatcattacaaaggttttgctcctttaatggctgaagatgcaggaaatggaattactcgttatacagcaggtttattcaaaacatttaatgtagcgaatatggctaaaaatgaaattagaacaatggggtatccggatgcgtttgttgtggcattttttaatggaaaaagaattaacattaatgaggctagagctatgttagcagaaacgccaacaacagaagaagaaatttcttttaccaatacagctgctaaccaagttaacaatcagcaatcaactaataacaaccaaacaatcaataataacccaccaattactacagaagaggtaaaagatggcatttctaaagacgttagaaatatagaaggtgtattttataccattcaggttggtgtttattctaaaccgattacagctgatcaattaaacaatctaacgccattaaacagcgaaagaacagctaatggattgataagatatacatctggtatctataaaaatcttaatgatgctaatgccgctaaaaacagagcagttaacttgggaattacagatgcttttattattgcttaccaaaacggaaataaaattactgtagctcaagctaacgaattgttgggtagtaataataactcaacttctgcaaacaataatacaacagaggttgaggtaactaatgagaatgcttcatcaaacaataatacatcagaaaacaatacatcaacagttgaaaatgaaaatgctacttccactaatacaaccactaccaatgaaaacaatgaagaacctattgaaacagtagagacaaccaataaaaatgaagagccgatagtagctccaacaccaaaaacggatgaagaattacgacaagttgctgaaagtttaaatattgtatttaaagtgaagattggagagtttacagatgaaattaccaatgaagatgcagccgttttattaaaactttctgacagaaatatagaaaattttgtggatggagataaaacaatttataccattggcaatttattagattataaatctgcattaaatactcaattagaaatgaaagaaatgggtgttaaatctccttcggttgtcgcctttaaaaacaatactattattcctgttgaggaagctttagagttaataaaaaacgtagaataaagctttaaataccacttttcttctttaaaaaaagttaattttgtaatataaattagatgttatgattacagaaactgaaatccaggtagaagtagaaaatacagccatcaaagaaaatcatttggttttatataatgatgatgtaaatacttttgattacgttattgagttattaatgaaagtttgtaaccatgatgctatacaagcagaacaatgtgcaatgttagttcattataaaggaaaatgttcggttaaaaaaggtagttttgaagtactagaacctatgtcagccattctttctgatgcaggactaacagtagaaataaattaattttattttaaattaaacatgaaaatagcagcaaaaataatatcagttatattggtaatagcgttagtagcttgctctaaagtacctattacaggaagaaaacaaatgttattaattcccgaaagtgaattaatgagcatgagtttaacccaatatcaacaatttttaacagaaaatccacctgttgccgataatgttgaggctactaaacaagttagaagagtaggaggaagaattgccaatgctgttgaaagatatttaaaagataacggacaaagcaaattagttaaaaattacagatgggaatttaatttagtaaatcaaaatatagtgaatgcttgggcaatgccgggaggaaaagtggttgtttatcagggcttgttgcctgttgctaaaacagatgaaggattagcagtagttatggggcacgaaattgctcacgctgttgcacgacatggaaatgaaagaatgtcgcaaggaattttggctgctgccggaggtgttgctttagctgtttatatgcgagaaaaaccatcagaaacacaagcattgtttttagcagcttatggagtaggaacaggtgtaggaataatggcctttggtagaaaccaagaaagtgaagcagataaattaggaatggtatttatgtcaatggcaggttaccaaccatcagaagccatacctttttgggatagaatgaatgcagcaagtggaggaacaagtgtgccggaatttctaagtacacatcctcattacgatactcgtgtagaaagaattaaagaatggttacccactgctgagacttattacactccatatcaaccataagtttaaactgctaattacttagttttttttattcaaagtttttgtctttcaggaggaatccagctaaaaggttagtacaaattttatagtaaaaaaataagctagttgcttcctgcatgacaaatgggaggttgtccttcaggaggaacctagctagacagttagttctgctttttaaatttaaaaaaaagcacaaaaaaaagtcccaccgaagcaggactaaagattttcatctacggcatatagccttattgtgataagattaaagattaggattctttttttaatcactatgcaaatatatcatttgtttttataaaataaaactttatttttaagcattcatttttaagacaaatagttatggcaaaaattttaggattagatttaggaactaatagtattggatgggctgtggttgatgataaaaataataaaataagtggtatgggaagtagaatatttcctatgggcgttgaaaatttaggcgatggcgataatgaagtttctaaaaatgcaagtaggacaggagcaagaggtgttagaagacaattttttagaagaagattaagaaagaaaattttattaaaagctctatcagaaaataaaatgtgtccgcttaaagaggacgattttaaagattggaaaaacacaaaaatgtttccatcaattaaattgaaagaatggtttgcacttaatccttatgaattaagaaataaagcattaacagagaagttgaatttagaagaaataggtagaattttttatcacttaattcaacgaagagggtttttaagtaatagtagaaaaggtgggagtgatgatggagctatttttaaaggaaatgcaaaagagggtaaaattggaattacagaaactcaagacaaaattcaaaataaaacattaggttcttatttatatgaaatatatcctaaagaaaaccaaccttttaaggatggtttggaaagaataagaaatagatatactacaagaaaaatgtatgtggatgaatttgaattgatatgggataaacaaaaagattttcaaccaacttttacagatgaattaaaacaactttttggaggaagaaaactagacggatataaagaagatgggattttgtttcatcagagacctttacgttctcaaaaacatttagttggtaattgtacttttgaaccaactaaaactaaatgtccgattagtgcaattccatttgaacaatatagagtttatcagtgggtaaatactgttgaatgtaatggaaaaaaaattacacaggaagaacgtgaaaaaatagctaactttttgtttgaaaatgataaacccgattttaaaagaataagaaaagttataggaaaagaaagtgctgagtttaagtttaattataaaaatgatgataaaatagttggcgcttataccatttcgaatttatgtaataaaaagttttttggtaaaaaatggtttgattttacagataaagaacaagaagatatttggcacgtactttatttttttgatagtaaatctaacttaaaagagtatgctataaagaattggggttttgatgaaaaaagtgccatagctatttctaaatttaatgttaaagatggttattcaagtttaagcagaaaagccattaacaatattttgccatttttaaaacaaggttttgtttatgatgtggcagttgttttaggaggaataaaaaatgtttttggcaacaaatgggagctgttatctgaagaaaaacgaaattttattgtagataatgttgaagatattgtccgttcaaaaattgcaggtggatttattgaaacgataaaagatttgttaaagaaagaatatggattatctgataaagaactagaaaaattatatcatcattcagctacaattgaagcgaatgaagttttagaaaaactaccagttggaaaagaagcagacaaacaaatacaagctataagaaacccaattgtaactacagctttatttgagttgagaaagttagttaatgaacttttagatgaacatcaaaaattcgatgaaataaaagtagaaatggctcgggatttaaaaatctctaaatcgcaaagaaataaaataagaagggatcaaaaaagattagaacgagagaatgatagaatcaaagctgaggtattaaaatataccaatttatctcacgataatattttaaaatataaactttgggaagagtgtaaacaaacatgtccatatacaggtaaacctataaatattaatgatttgttttcaggcgaggttcagatagagcatattcatccttggagtaggtcgttaaatgatagttttgctaataaaacattatgttgggctgatgagaatagaaggaaaggagataaaaccccttttgaattttatggtaatgatgatgtaaattggagtataataaaagaacgtgcattaaaactattttccgatactaaagaatatccgaatgcttatcaaaaatttaaacgttttattcagcaaaaatttgatgatgatttttcttctcgtcaattaaatgatacacgatatataagtaaagaagcaaaaaattatttagctcaaatttgcaaaaaaattactgtagcaccaggacaaatgacttctaatttgcgacataaatgggggttgaataatattttaaatgaagaaaaccagaaaaccagagaagatcacagacaccatgctatagatgcattagttatggctttaagtaaagtaagttatttacaagaactttcaaggtggaatagacacaacagaacgcatgaacttaaaaacttcccaatgccatgggaaacatttcagcaagatgcagccaaagctactgagcaaattttagtttctcataaacgcttaaaaagtattttaacaataagaacgcataaagctaaaaaaaatggaaaatcgtttaaaaatataggagttgcagctcgtggacagttacataaagaaactgtttttggtaaacgaactgctccatttagtgaagaagcttttcatgttagaaaacctatagaaagcttaacaacagaaaaacaagttgaaaaagtagtagatgaaacaattagaaagcttatatttaaaagagtaaacgaattgggtgggtacgataaaggaaaaattcctgctaataccttttttgttgctgatgaaaatggaatcaaccaacctcagattttcttacctaacaaaaacggtaatcctgtacctatattaaaagttagaatgaaagaaaatattggtggagctgaacaactaaaaaatgatgttaaccaatgggtaaacccaagaaacaaccaccacgtgttgatttttaaagatgaaaatgacaatttaaaagaagaggtagttactttttggacagtagtagaacgtaaaagaaaggggtttcctgtttatcaattaccaattagaggtaaagagatagtaacaacattacatattaatgacatgtttttgttaggattaaaagaagaggatataaattgggaaaccccaaactatgagttgatgaaagaatatttgtacagggtgcagaaattcacatcaggtgattattattttagggtagtaaaaacttcatcaataaataatcctgaggagaaacaacagattaatagttttggattgggaaaaaatggttgggaaactcataatccaataaaagtaaaaatttcagtttcaggtaaactgataaaagcataaatcttcattgtttgaagaaaaaagttctttgacataaattggtcgaaccctcttattggggcaacatcaaaccacaacgcgagcgaagcgagcgttgtggtttgattgaagattaggaaacacgatattattgtttgtgttgctcaatttgattatctagttgtggtttgattgaagattaggaaacacgatattaatagagttgtttggagaaatgaatggatggttgtggtttgattgaagattaggaaacacgatattatgggcgtatagatattattttaaccactagttgtggtttgattaaaggttaggaaacacgatattaatgtttgatgtaatgcttggatattgaaagttgtggtttgattaaaggttaggaaacacgatattaagctttagaaagagatttgacaagcctagttgtggtttgattaaaggttaggaaacacgatattcatagatgccacaacagtaagtcaggtagagttgtggtttgattaaaggttaggaaacacgatattcagaagagcaaataaaagacagattaggtagttgtggtttgattaaaggttaggaaacacgatattatactgttaatgcgaagtttgatgcaatgcgttgtggtttgattaaaggttaggaaacacgatattaattcatttttagctggttattgttatggtgttgtggtttgattaaaggttaggaaacacgatattatgctgtggaagttcaggagtgtacagacagttgtggtttgattaaaggttaggaaacacgatattagagcaaggtaaagctcaacacttagtagagttgtggtttgattaaaggttaggaaacacgatattatttatttgaattatataggtcatatttagttgtggtttgattaaaggttaggaaacacgatattacgataatttataaaacagatatacaatgggttgtggtttgattaaaggttaggaaacacgatattatgggatgtaaatgtagaaaacctaatgttgttgtggtttgattaaaggttaggaaacacgatattatggtgttgttttaacgatatctgtaaccagttgtggtttgattaaaggttaggaaacacgatattagttgctgctgaagcttctaatagtcataaagttaaaaagaaatatcgttgttaaaaatgctccttttaaagatgtaattgctttaattggggcattttttttattcaaaacttttgtctttaaggagaaatccagctaaaagattagtacaaacttatagtaaaaaaaaaataagctagttgcttcctgcatgacaaatggtgttggtgtcctttaggaggaatctagctaaacagaaagtttggggttttaatttgagttaaaaatattaaatttgatataaagtttaaagtaaggttaatgttaaaaggaaactactttgtatatatcacaacaaatccgaagaaaacagtattatatacaggggtaacaaatgatttgaaagtaagaatgcgacaacactatgaaaataggggtaatccaaattcatttgcaggaaagtatttttgttatcagctaatttattatgaaagatacacagatgtaaatatggcaattgaaagagagaaagaaattaaagatttgagtagggagaaaaaagaagcattaattgctcaagagaatcctaaatggaaatttattatagtttaaataaacaaatactgactatttaaatagctagttgcttcctgcatgacaaatagggctgttgtctttcaggaggaatctagctagaaaagaagtttggggttttaatttgtgtttgaaattagctttatagataaaaaataagctagttacctcctgtatgacaaatagataggtttaagctagaacagttccaattgtgttggtgttttaatgttatcttgtttcacactaccccaataattcataatgtttccgaattgcttatcggtaatgcgtaagatactaaccttacctaatggtggcaacatactttttattcttttttcatgaacatcagcactttcactactggcacaatgtcttgtgtaaacagaaaactgcatcatgctaaaaccatcttgtagcagtttttttctaaataaagaagcatttcttctgtcttttttagtttcggtaggtaaatcaaagaaaacaaataaccacataaccctatatgcatttagttccataatttcggataaataatttttttactactccccgcaaaacattgttgaagcgagctggtggttttgtttagagccaccattaatggactaacttggctttgataatatacattttgagtaagtatgcttagtaattcggctttaatttcggtagtaagttctgtggtgtcgtaattatttataatttcaagtactttaatatcaacaagtggacgatatggttccataatatcatcagccaaacaaaaagcattgtatttatttctgtggtgaataccaatggtatttaataaaccacttccggctaatgctctcgcaacagcagctcttaaaacaatgtatccataatttaaaaaagcattaggatgttcgccatacctttctcttttaaaatcaaaatcaaaaatgtgcttccaataataagccgcagcagcaccttctctgttatcactatctccacttaatacttttgaagcataataatttagaggagtattagcttgtccaattttctcaagtaattgagcttgatgttgaatttttgttttaaccgtttgttgccacagttgtttttttaagggttcggaagcattaatctgtgctttaaaaaattcatgttgcaaatgatgtccatctaagttcattaacatagaagaaggcatgtgtttttcattacaaaaaattacagcaacattgttattaatcaatttgtttattgttggcagagaaatataactttcttgattttcaattactacaaagccaatatcttcaattggaatactagcttctttttcgtttgtttttataattaactgttcgtttcttgttgtgagtgaacttttgttgccaaaaaataaggtccgtttaatcatactattttttttgggtttaaatgtacaaaatattaatctgtttatcaatgagttgtatcatataactaattgagtaaagatataaagaagttaaattttcatttttagtatgtttgtgattcttaaaagagtgatttaacctccaatatttgtttaatgcttttgcaaacgaagaataagagtccgtttacggcttgggttttatcactctttgttttttaatcaataatctttttcttttttatccactaacttattagtttgcttataatttttaatgtcttattgtatatttgtagtatagaacgaagacctcggttagtcccttgggcgtagtctctatagaaaagcaactttaatagttgctttttttgttttaaccgtataacatattttattatttatcaggtagttgtgttgtgattttggtttttagtttagaaatccaaataaaatagtaattttttcaaacaacttgttaaaaaatattggtttttttgatttaattgctatttttactgcctaattgttaaataattagaaacagatgatacgactaaaaaggagttacatctgacctaaaaaaacaataaatagaaacagatgacacgaccaaaggggagttacatctgacctaaaaaaacaataaatagaaacagatgaaagcagtacatgtagttgttgaagaaattataaaaaaatcaccatttttagaggaagcattagcagagggcttaatcaatttatcatcattatctcgtcagattaaagcagaaattgacgaagaattaaataaagatgttaaaattggagctatagtaatggctttaaaaagattatctcccaaatttgatcctacttttcagattaaaattagaaaagtggtaaataaactaggagatattactgttcgttcaaaaattacttattatacttttgagaattctgaatctttaattgattgtcaatcgcagttacttaaaaaactgaaaggtaaaaaagatattttctttgccttctctcaaggagtttatgaaacttctattattttaagtgattcagaaaacaacgatattaatgatatattcaagaatgaaaaacagttgcaagcatcaacagggctttcttcattaaccattaagttgccaagtgaaaatgctgatgtttcagggatttactactttatcttaaaaaaattagcttgggaaggaattaatatcttagatattatttctactatgcatgagtttactattattgtaaatgatgaaaacattgatagagcattctcaatacttaaaaatattaataggttgggataactatttcattactcaatcttcttgattgtcatgaaactctttagatattttctcgaatttaataatgttatctttatcaataaagttaagaggagtacaaacaccatctctacaactgtaacattttaatttatctttaaatacagcagatttgtaaatggattttccgagtagcattcttgcagcttcctgaactccctcaacaatagaaggatgagggtgaatcatgtgagccagttcttcaattcctttatccatatacattaataaagcaatggtttgaattgccgaagaagcatgataaccaacagctctcattcctaaaactttcatgtcggcatcatcagaaacaattagtttgaaaaaaccttgaggttttcccatagaaatagccctagcaatggtagagtagtccacttttgcaactttgtaaggtatgttttgttctctaagtatttgttcattagctccaacagaagcaaccactgggtctaaaaacattatagtagaaacgttttcataattaataggattcaatgccttgtttgagaacatacgagcaacagcgtgtctagcttctctttctccaacgttataaagcggaagtcttccggaaacatcacctacagcataaatatttggaatattggtttgagtgtcattatctccaatatgaacacctctattgctcatttttactccggcattttcaatatttaatttttcaatatttggaattctacctatagaaataagggctttttctacatgaataacttcacaagctccatcagcatgttcaatttcatactctacttctccattaataatttctaatctttttaagttggaggtttggtgtatggttacatttttcttttccatattactggaaatcaaattagaaatgtcttcatcttcaaaaggaagaattctttcggccctatcaataatatatacttttgtttttccgaaattggcaaacatagtagctgtctcttatacacatctgacgctgccgacgagcgatctagtgtag

SEQ ID NO: 2663 - DNA, 17491 bp, synthetic construct
  source 1..17491: mol_type = other DNA
  misc_feature 1..17491: note = Synthetic
cctttagatttgtttttattaaagattaaaaaagggatttataattatgttaaaaagatggggtctggggaagactcttaccctttaaaattgttattaattttaagggtagtaaaaagaacggagtgaacttgcacgcccgttagtaaacaagaactatctcacgtattagtctccgttctttaaaactggttacaaaggaccaaatagaatcatagcgtttacctattaaaggttttagtcaatgtaaccattaacttaaaacataaaattatgaaaattaaagaaacggtagggatcgacattagtaaattgactttggatgtaaggattcatagtagtcaggcgttcaacgtttttgaaaacacattgaaaggatatggaaaaatgctgaaatgggtgagaaagaacacacgttatttaaacacggaaacgatatttgtttttgaacatacaggactgtattcacatgggttgtccgtgtttttgtccgaagacaatatttcctttgcagtgatctctggactggaaataaaaaagtctttgggaatagtccgaggtaagaacgataaaatagatgccactaaaatagccttatatgcatataggctcagggatgaaattactctgtttcaaatgcctactaatgcaattaataaattaaaacggctactatcacttcgtgaccgaatggtaaagcacagagcaggctataaaaattcattgggagaataccagaggctgttttgtagagttgaaaacaggattttctttcaatcccataagaaattgatccgatatttgtcaattgagattaaagctatagaaggtcaaatgaagaatatcattgatagtagctctaaactaaaagagcattacagactgataaccagcattaaaggtataggtgctcaaactgctttgtttttaatcgttcataccaacggttttacgaagtttaagaatgctcggaaatttgcttcatattgcggaatagccccatttccatattcttcaggaagtagtattcgaaagaggacaaggataagccactatgccaataaaaagataaagagtttgctggatatgtgtgctaaaacagccatccaacataatattgaaatgaaattatattatgagcagaaagtcgaagaaggtaaaaatagaaggagcacaataaatgtgataagaaataaattattggccagagtttttgcagtagtacaaagaggaaccccttatgtagatattaaaaaatatgctgcttgaaataaactaataaatttatcggtaaaaatttgttttaatcatagaatacgtgagctaatttacttatcatctcgctgcaaaaaattaccagttttcttttcgagattcaaagcaattgcctcaatattttctatttgaagaattgcaaatttaatatttctaaatcaaatgtagtaaaaatattattagtgggaaaatatacccacatatatttattaaaaacttatgaaattgctgtaaaatcactaagatgagtaacggaactgataagaacagttttaaaatattatttggaaaaaacttaaaaagaataagggaatctaaaaatttaagttttagacaactagctacacgttgcaatatcgattatagtgatattagtaaaattgaaaaaggtaaaaggaatattcaattatcttctttgctggaattatccaaaggtttgggtatccatcccaaagaattgttggattttgattttgaactggatgaaaaagggtgaagttttttatagaaaaggcaaaaaaggtttggtaaagtacttaacagaaaggcctatgcttttagtttcttaatctattattttgttattgatgaaatacaatgagtacatatatggctatataaaacatttatgagaagaatcccgtctttcaaaaagaaaatttgcaattaaccactatatggaagaaaagtctctcagggatataattaaaggtaaaaactatcaaatttcattatctacaatttataaaatttgtgaatccagagagataaaactatcagacttttttatagccgttgagaaatggggcaaatctaccaagagctaaaggatagctttaaaaatactcctttgtaacaagcacgatacttttttaacaactaccaaactgttttaagagctactctttaggccatttttttgtggtttttggccaaacaacttaattgtttaagcgaaagctttaaaagtaggtgagttctctttttttaggcctaaacttattatattgcaagtattatggagatatgtatacttggtatacgcattcttttgttaatagattaaccccaataatgaacgagattaaagatgtaaaagagttttttgaagattttgccaaaacagaagcagaaacagaaattcttaaatggaaactggaacttaaagattataacgccaacatagataaggctaattcgttttatcttgcgccacacataagttttatgcctcgcgaggaaaaaaggaaggtatgggaaataaaaaggaaaggcctagatttttttaacacacctaaaattaggcccccaagaaagcttttcaaaataagtgaacatgtccataaagagtttggtaggttttgggtttgttatgcaagctcggctaataattcgaacagggccagtaattttttgtctcaaatgctttttgtaattgaaaaggataacgaattaaaaattgcttcagaatcgctttggtctaattatgagaaagatggttggggagatgaagcatataaatggcaccaagtgtttggaaaaaagcatttgcattacgatttcctgaatgaacccataaaggttataagatacgaagaacctgaagattataaaattgggcttcaggtttatcatgccaatatttaagaaaatgagcagataattattttctcaacaaaaacaggaaacggtttagctataaacacctcaatttatttaatgagtaatataatttgaataatgaaaaaaccagaacaaaagcataatttgtacatattggtatgtatgatgtgcctttttgtagcatcttgctcaagccaaaaaacagcaagcacagcaaaaagtatcacagaagatatagcaacaggaaacggaaaatatattatttctgccctggtagtttttaaagattttgttttaaaaaacggcgagactaccaaacataaagacgcttacctgaggcgttctaaccaggattattatataaagttttgcaagagtaaaattagccgcaaagatttagaaaaacacctctccaaaataaataaagccgtcaaggttgccacgctcgaggtcgagtttcgcaatggcctttgggatgtttgcgatggtaattttgagcagcaaagccgaaaaggagcctatgttattgttcatagaattgttgagaagtaataaaggtctttacccaatctaatattaataacaaataaaaagtcccaccgaagcaggactaaagacttttcgtctacggcatatagccttattgtaataagattaaagattaggatgtttaatctgatgcaaatataagaaatgtattatatttgttaaaaatctttaagtaatttagagagtgtttagatagtcacaaatgaaatgactactaatttcttttcaactgggatatattttccagtccttttaatcaaattacctcgtttaaaattaaacacctttagactcctaaggtgttttttttatcaaattacaactactcagcgcagtatattgtataacatgccactttgagttgttacaaatatataaaaaatactctactcagcgcattatttattatatttgttgaaataataaaaattttaggattaaattttattaaaactgtgaaataaaaaagtcccaccgaggcaggactaaagattttcatctacggcatataagcctttttgtaataagattaaagattagaataaaatttttacaaatgcaaatctactaaagcaattttcatacaacgtacggttttccgtaagaaaaatatttattgttttttgtacttttaaaatttaaaaaatacgtggaattatggcaaaagttttaggactggatttaggaactaatagtattggttgggcgataattgacgacagtcaaaataaaatacttggtattggtagtagaatttttccaatgggtgttgataatttaggagatggcgacaatgaaatgtccaaaaatgcaagtagaacaggtgccagaggcgtaagaagacagttttttagaagacgtttaagaaagaaaaaattgttaaaggcactttctaactataatatgtgcccgttgcatgatcaagattttgagacatggaaaaaaaccaaacagtttccttctaaaaagctggcaccatggtttgctttaaatccgtatgatttaagacaaaaggcattgcatgaaaaattgtctttagaagaaataggaagaatcttttatcatttaatccagcgccgggggtttttaagcaacagcagaaaaggcggtgcagacgatggcgctatttttaaaggtaatgccaaggagggaaaaacagggattacagaaacggcagcacgtattaaagaaaaaacactgggttcgtacttttttgaaatttatccaaaggagaaccaaccttttcaaagtggtttagagcgtataagaaataggtatacgacgcgaaaaatgtacgtggacgaattcgaattaatttgggcacgacaagcgccacatcatgatattttaaatgatgaactgaaaacactttttgggggcagaaaattagatggttacaaagaggatggtattttatttcaccaacgccccctacgttcccaaaaacatctggtaggttattgccctttcgagccgacaaaaaccaaatgcccactaagtgctattgtttttgagcaatttagagtttggcaatgggtaaatacagtagagtgtaatggtactaaaataaaccaggaggaaaagcagaaaattgcacacttcctgttttctatagagaagcctacctttaaaagaatacgaaaagtaattggcaaagaaaatgctgcatataagtttaattataaagacgacgataaaatagttggtacccataccatttccaatttatctcataaaaaatactttggtaaaaaatggttcgatctcacgcaaaaagaacaggacgatatttggcatgtactgtacttttttgatagtaaatccaacctaaaggcctatgccattaaaaattgggattttaacgaggtacaggccgaagccatttctaaatttaatgtaaaagacggttatgcaagtttaagcagaaaagccatttctaatattttaccgtttttacaacagggttatgcctatgatgtggccgttgccatgggaggtataaaaaatacttttggcagcaaatggcagaatgattctttagaaaacaataaaaaacagttagaattaattgataatgtagaggacattgtacattctaaaatagaaggtggctatattgatgttataaaaaaacaactaaaaaaagactttggttttagcgataaacaattaaagaaactttatcaccattcggctactataagtaaacaacagctgttaaaaaaattacccttgggcaaagaggccgataaagagattcaatccattaaaaacccaattgtaataacggccctgtttgagttgagaaagctggttaatgagttgattggtgattatggagcgattgacgaaataaaagtagagatggctcgcgatttaaaatcgtccaagtctaaacgcaaccagattagaagaaatcaaaaacggctagagcgcgaaaatgatagaattaaaagcgaagtagaaaagtatgcccgtataacacatgaaaatcttttaaaatttaaactctgggaagaatgtaaaaaaacctgcccttatacaggaaaggccatatctgtaatagatttgttttctggagaagtgcaaatagaacatattcacccctggagtaggtcgttaaacgacagttttataaataaaaccctgtgttgggcagatgaaaatagaagaaaaggagataagaccccgtttgagttttatggcggggacgagagtaattgggcggccattaaagaacgtgctttaaaattattttcagacacgaaggaatatccaaatgcctatcaaaaattcaaaaggtttgttcaacgaaattttgatgatgattttacctcacgacagctaaacgacaccagatatattagtaaagaagccaaaaactatctttctaaaatatgcaacaaggttacagtgtcgcctgggcagctaacggccaaactacgccaaaagtggggcttaaaccatgttttaaataccgaaaattctaaatctcgggaagaccatcgccaccatgccattgatgcgttagtaatggcttgtacgaaagcttcttatgtacaagagttgtctaaatggaacaggtacaaccgaaaacccgaattaaaagattttccaatgccttggggaacttttaggtacgatgctgaaaaagtagttgataatattttggtgtcccacaaatgtgtaaaaaatgatattactgttagaacacatataacagaaaagaacggaaagagatataaaaataaaggtgttgccgccagaggacaattgcacaaggaaactgtttttggaaagcgtaatgcaccatttagcgatgaagcctttcatgtgcgtaaaccaatcgacagtttaacctctgccaaacatatagataaagttgtagacaaaacgattaggttactaatattaaagcgcatccaacagctaggaggttttgaaaaaggaaaaattccggtaagtaccttttttattgttgataagcatggtgtgaagcagccacaaatatttttaccaaatagaaacggcgatccagtacctgttttaaaaataagaatgaaggaaaactttagcggggcagaacaactaaaaaaccatgtaaacaaatgggtaaaccccagaaataaccaccatgtcttaatttataaagacgaagatggcaaccttaaagaagatgtggttactttttggacagttgttgaaagaaaaaaacaaggggcttcaatttatcaattgccctttggaggtaaagagatagtaactactttacatatcaatgatatgtttttattggggctggacgaagatgaaattgattgggataatccaaaccataaggttttaagagagcatttgtacagggtacagaaactatcgtcaaaattttatgaattcagattaaatagcgaagcgacaatacaagaaaattactctccgtattacattagaatacaaagccatggagaagggaaaacgggttggttgacgtttaaccctataaaagttaaagttttagtttctggaaaaataaggaaaatttaaattaatatttagtaatattaagttcttttgacataaagattaggaaacacgatattttgggaagtatttatgcagtatccagccgcgttgtagtttgattaaagattaggaaacacgatattgatgtgaacaacgatctgcaaatagatatggttgtagtttgattaaagattaggaaacacgatatttacaatttaaaagcttgaaacttgtccttgttgtagtttgattaaagattaggaaacacgatatttcttataaattcatttgatattgttctaccgttgtagtttgattaaagattaggaaacacgatattggatttatgttttacagataacaaagacctgttgtagtttgattaaagattaggaaacacgatattaaaggcagcctagcgctgccgtcacgtcgtgttgtagtttgattaaagattaggaaacacgatattaacgcctcagatggtaaatttccatctttcgttgtagtttgattaaagattaggaaacacgatattaagctcttccttagcggattgagccctatagttgtagtttgattaaagattaggaaacacgatatttaaaagcctgcaagggagcagtattggcgggttgtagtttgattaaagattaggaaacacgatattatttacgccctcttttcctaaagctctaccgttgtagtttgattaaagattaggaaacacgatattaatctatatctttgggtctagttcctagcggttgtagtttgattaaagattaggaaacacgatattataggatttttcatttaaaaagctagggaggttgtagtttgattaaagattaggaaacacgatattcatacacctgtgtataaatcatattgcactgttgtagtttgattaaagattaggaaacacgatatttttttagcgggatggtcttttagatctgctgttgtagtttgattaaagattaggaaacacgatatttttgttaaagttgctattaaaaaagaacaggttgtagtttgattaaagattaggaaacacgatattagtaaaatcaagaacgctttcatttagctggttgtagtttgattaaagattaggaaacacgatattgcgaggaaagaaaacccgaaaaaccgcctcgttgtagtttgattaaagattaggaaacacgatattaattaataagcctaagtaaatttaaaagagttgtagtttgattaaagattaggaaacacgatattgcggttgcttttgactctatagttaagcctgttgtagtttgattaaagattaggaaacacgatatttctgggtctgaagggttgttggtcttatctgttgtagtttgattaaagattaggaaacacgatattgattctcctgagcaaaaagtaaccgttgttgttgtagtttgattaaagattaggaaacacgatattagcagctacgccgcatgttgtttttgatgggttgtagtttgattaaagattaggaaacacgatattggaagacaaacccacccatcacttaaacatgttgtagtttgattaaagattaggaaacacgatatttttatcccagacccgataaaagagcgaacggttgtagtttgattaaagattaggaaacacgatattaagaactcctgcaggcaacaatctctcacggttgtagtttgattaaagattaggaaacacgatattggtcggctcggcagacgtggcagaagtctggttgtagtttgattaaagattaggaaacacgatattcatgagacaatactatttgaaacataaaatgttgtagtttgattaaagattaggaaacacgatattagttggcttgttgccttctggtaatcatgttgttaaacaaaaatatcgttttaaaaaatgcttcttttttgtagtaataaggcaagattgaggcattttttttattttaaaaaagttccagttgggttggtggcggttctttggggacttctattttgccccaaaaattcatgatattgccaaattgtttatcggttattctaagtacacttactttacctaagggagggagcagccttttaatgcgtttttcgtgtacatcggcactttcgctactggcacaatgccttatgtatacagagtactgcatcatggtaaaaccgtctttaaggatgttttttctaaaaccggcagcattttttctgtctttggcagtttctgttggtaaatcgaaaaatacaaataaccacataatcctatagccatttagttccatagtttgggatacttgatcttttttctttttccacaatagcattgttgtaacgagctggccgttttttggagggctaccattaacgggcttttttcttctttaaaataaacggttcttgttagggtttctagcagtatcgattttatttctgtatttaattcttgctcgtcgtaatgctgtattatggtaaaaacggcttcgtctataataggcctaaagggttccataatatcgtctgccaatgcaaatgcattgtacttgcttttgtggtgaatacccaaagtgtttaacaggccactgcccgataaagccctggccgtggcagcccttaaaatggcatacccatagtttaagaagttgttggggtagttgccaaaacgttcccttttaaaatctatttcaaaaaaagatttccagtaaaaattagctgctacggcttccatattggtagtgtcgccacttaataccttgctggccaaaaaatcgaatgtattgctttttttggtcactctttttaataagatgccttggtttttaatcttttcaacaatggtttgctgccatagttgcttttttaacggaaggctagcttctacttgttgcttaaatatctcctgttggatatgatggctgtttaaatttaaaaacatgccattgggcaagtgtgttttattacagataattaccgatgcattatttgcaataagtaggtttaaagtggtgatgcttatgtatatttctgggttatcgattactacaaacccaatatcttctataggtatggtcgtgtttcttgtttcagatttaacaaccaattgcgcatgtttcgttgtgatagcacatttattggcaaatagtaaagtcttttttatcattgttaattggaattattaatcacacacaaattaacttgattaaaaggcggttaatggttttaaactaaaacgacatttaatgtttagactcattgggctggtggctttttaactattgccacccaataatttttttaatttcttgggcgccttttaattctggattgacttttaaggcattgtcaatatcttttacgacttctttaaatatataatctgggtttggttgctttttaattaagctaatcgcatttatatacgtttctgtagccatatcttcctgcccaataataagctgggcaagccccttgttcgcgtttacccagcccaatttatatgctgcatttgctttgtcgcaatatgcaatgcattttaggtaattgccattttcaaattgagcccacccaagattgccgtatagttctgctttttcctgttcttgagattttgtttctattatgactttttcggttatggctacgacttcaatagatatattaataccatctaacgagctggggttctttagtcccagataccaggtattggttttaacatcgttaatttgaacgactgcttgcttggtgttttctacagtgccttccattatatgataaaaagtacttccttttcggtctgctttatcataaaaaagatcaatattttcacgatcacataagtacacgtctatagagcctgaacctgaaggtactttaattgaagacaaggcagttgatgttattgcgcccgaacccgaaaataaactagaaacctgtaatgctaagttgaggtttttaacgccgctttttccttttgatgtagaaaaactataataccactgtaccgtatttggtggcagatcaatttttaaataagttctggatttgcctccaaaattagagcgcataccaccatttaaataaatacttcttggttctattatttgatgggattctctttttacttcttgagtaaacccagaataaaccagtaaaaatagcattagggttgaaaattttttcatctggaatagtcttgaaatttatgatacgttgtataatatgattgtaatgtaaacatattgaatatcaatagggtacggaaatccgtaaatgctaatagttaggcaataaaccctttacgtcttattatatgacaaaaatgttttgttaaaaaggattgttttatctattataaagaagaacgctgccattagaaatacgataaatctattcgtattaatttttaccgtagttttgaatttcatatagaacaccaacaatgaatctattcgatattttattctataatatattctcacgttacaaacccaagtacaaacaaagggccaatagcattgccattgtttatgtaacgtttttacaagttgccctgctattgcttttgggtgttttctttgctgggttttttaaacagatgcatatggttaccatgtcgtctgccaaagcatggaccttatttgttttggtctcggtatttttatattttaaaaattggatgcaatacacgggtaaaaaacggatgacgattcatgcaaaaatgaataaaaagaaagtagagcattataacatttggttactctggtttttgcctgttgctgttttaggattggcctatgttttgtatcaggcggtttagttattacgcactaaccctcctaatttcgatggtatcgaaattgccctccctttgtttaaaggaggaacccgtttcaattatattttagtaaaaatgggatttttaatgcttttttattcatgtttggttttttaaacacgcaggtatttaatatgagttagaatgtttcagatttaactacaaatcagtcttttttctttgttctggcagcaaagcgatccaggttcttttaaaaaataagatgaaaatcatttcttaaaaatagcatacactggaaaatggtcgctatagcctcctttgtatttcttgcctacataggttctaaatggcgagcctttataccgccctttatagagttttaaaaaatcttcgtcgaatatattggcggtgctaaactcaaattgatcgcttgtacttttaaaaaagtttgttgaaaacagaatttgatcgaataagttccattgtctgttgtgcttggttgtgccccggttataagatcgcaaagtttccatggggttgtacaaattgaaatcttctaccagtcgtttaatactatggctggaaggatcgtcgttaaaatcgccaataacaataatttttgcttcggggtcttcgtctcgtaacatggtggtaatctctccaactttatcagacgaggcaatgcgtttgtgttcgctttctttttcgccttcacgtctggacgaccagtggtttactatcacatgaacctcttcgccatcaagcaaaccggaaaccaataagatgtctcgcgtataatctggagatccgtcttcatcgaacagttggatggtaaaggtctcagaagtgctcactttaaaggcagtcgtgtcgtataacaaggccacatcgatgccgcgttcgtccaaagagtcgtagtgcacatagtcgtaatgacaatcttttaaatgttctgttgtaattaggtcttcaataacagaagcattttcaacctctgccaatccaacaatagcagcatgtttacctgtttcgtgacgccctatgtgcgaaatggcaaaacctaactttttaagtttgttctcataacgtttgggggtccaatttttaaccgaattagggagaaagtcattgtcgttagtatgcttgtcgtctgtaatatcgaataggttttcgagattataaaatgctacggtttgcaaatcgtggcgcacggggatatcatcgtaaaggtctgtcataaatcaaaaataggcttaaaaatataaaaataataatacctgtaaatgtttaactttgcaacatgatagaaaagaaagaaatcgctttagaaaaagctgttttaataggtattgttactaaagatcaggatgaggtaaaatctaaagaatatctagatgagctggagttcttaacttttactgccggagggtatgctgtaaagcgctttacccaaaaaatggagatgccaaaccctaaaacatttattgggagtggcaagatggaagatgtgcgccaatttatagaggaaaacgatgttggcacggctatttttgatgatgagctgtctgctgctcaggagcgtaatattagtaaaatacttaatgttaaggtgttggatagaaccaatttaatcctcgatatttttgcgcaacgtgcgcaaaccagttacgcccgaacccaagtggagttggcgcagtgcgaatatttgctgccacgattaaggggtatgtggacacaccttgagcgccaaaaaggggggataggcatgcgtggtcccggggaaaccgaaatagaaacagataggcgtattgtgcgcgataaaattgctttgctaaaggctcgtataaaaaccattgacaagcaaatggcggtacaacgcggtaatcgtggtaaaatggtacgtgtggcattggttggctataccaatgtaggtaaatcgaccttaatgaatgtggttagtaaaagtgctgtttttgccgaaaacaaactgtttgctacattagacacgacggttagaaaagttgtgattcaaaacctgccatttttattaagtgatacggtagggtttataagaaagttgcctactcaattggtagacagttttaaaagtactttagatgaggtaagagaagccgatttgttattgcatgtagttgatatctcgcatcctaattttgaagaacatattgaatctgttaataaaattttaggcgaaataaaaagtagcgataagcctaccattatggtatttaataaaatagatgcctacgaagcagagcctatagaggaagacgacctggaaaccgaacgcacaaaaaaacactattctctagaagaatggaaaagtacctggatgagcaaagtaggtaataatgccttgtttatttctgcaattaataaaagtaatttagaggactttaaaaaacgggtttacgatgaagtacgagacattcatataacacgtttcccctacaatcattttttgtatccagattacaattacgaggatatggatacttgatttgtgtttgaaatattattatctatcgctctaagttcggtttggatttctctttttacttctttaagaattgttaaacagtcactaacgagtagcacagtagtttctaaattttgttcgtttttaaagttagattccaattgaagtatgttcgattttaattttgaaaccccaaacatgtttatgttcggctttattttatgcgtggcttgaaacagggactcccattttttggcaggtacttgagatgttagtgcctctgcatattcatctataatttcaagaaatagctccattatttccatcataatggaagcatcatcaaaagtattttctcttaatagctccaaatttatatatcgataattagattcaatcatgatttttcagactttattatttcgatttttctttcgctttgatcagaaacgtacgaatttttaataaatgaaacaagaaaagtaggataaaacactgtttgtctatcgaatatgtaggaaaataattaaagaagctttggggtttctctttttagttagtttttgtaagtaagattttattgtattttttaataaaagaagtaccgtttttaaaatgtctaagacaaaaaaatgagggtgtctaaaaagtctttgtaatttgatttgtcaggttgagcacttcgactacgctcagcattcaacctgtcgaaaccaacattgagtatcagtattttaaaaatatttcgacaagctcaatatgacattgaacatactttttagacacccttatctttttctatatgttttattttatcgattctttttaaaacttgtagtttagtccaaacatccaatagctttgcaggtcgttgtcaacatcttcaaaagaagtggctgtaggaggcgtttgggccaaggcataattaagtgcttcttgcttgttgcttcgtaggccaaaatcgaaacctaccccgatcattttccataaagtatatccgaaagaattggtccaggtccagtttgataaattcgagctttcgtaactttgaaacatagaaagattagttttaaaactaacagctttaatttgtctggtatagtcaaccagtatttttgctcccaacgacgattcaaaaacggtgtcttctttactaaaaacaaagttgtagtttccaggatgtataactactacaaggtcttttattggcgtccaggtaacaccaacacctaaatctaagtagccaggattgttaaagttgcttaaaatagtagttctgtattcgcctaatccagaaagggcaaatttatcgcttagtttatgtccgtataaagaagtgatattaaaaacatctgtagcttcttgaaaagcatcgctatctgtcgggtcgtctttatcatccagttttacccaggagaggtttatattggcactatttctccaaaagaatttttctttggttaaattagcaaaggcatttacggtaaaaccaatgtttcccgaattattattaggggttccttgagcataccagtttttaaagctggaaatactacctccaatagtaccaaaggcaccttttttccaacctggtaaggcatcaatttttgcctgaatagcatcaacacgcccttgaatggctgctatagaatcttttttaggaccttgagctgcttttaattcttccaaagtttcttgtgcgtacatggaagtgattccaacaaaaaaggtaagtagtaatgatagttttttcatatgtttattggttttttaattgtgacatgcaaccttcaatgattattttaaatcataccagtttcatttttaagtatgttaaaatttgaattaatagttaattagacactacatatacgatgtgggtcacaagataagattatttgtttttgtatagtggcacagaagaacacgcttcgccatacataatagactttgcaaaagactttagtttattggtaagcatgatataagcattttgtggaacgggctttttagagcagccttttataataatgggcttgtttttaaattgggtaatatctaactgatttataatgtcttgatatatggaagtttccagcgtttctaaatcgccaataacaatcgttttcgcatagggctctaaatgtatactaagtagcatatatgcccacccaggaataatagcatcgctactacaggttaaggcaacatagctgtcttgatattgtgcccaattaaattctgaaacttgctgcctaaaatctttttcacgcagtacaaaaccttcaaacaaccattctttaatatctaatacaacacgcttgccttcagggtaaaagtcctcaagatctatagtcattaaattactgtttgctacgcgatttataatttcgtctggcattattatttaggcttatataaattaaaggtttttgtaattttctttttgtgctaagcttgctataaaaataatttatagaaagtcttctcttatgggagcaaaactatcaattaatgtaacattttcggtaagggtttgcacacaatgattgaggttagaagccactttaaaagtatcgccttcatttaagagatattctcgatcttcaataaataattttaaacttccagatgctacataagatatctgctcatgtggatgtttatgtggcggatctggttgtttcatcggtccattggaaaacttaataaccg

SEQ ID NO: 2664 - DNA, 16111 bp, synthetic construct
  source 1..16111: mol_type = other DNA
  misc_feature 1..16111: note = Synthetic
gaagaagttccttcacctgataaaactgctatatttttattactgataagtgtattgttttctgacccaaagtcttttccattatcaacaaaaccagtattagttgtttctaattttttatttaatgtattagcagtttcaacaattagtttgtcaaaattttcaatatgtctgttttcacctctcattattagtaatgttcctttagtgaaattttttccttcaacagaaaaattagtattactgtagcgaactttaaaaccttttgacactaattttcctaaaaatgtggcatctgaaatttctttccatctacatatataagaataggtatttgtgttgatttcattgttaacgattgaattttcagaagaaatatttttatttacaggaatttcaacttccgatgcaaacccttgtaaaccataagcaaaaggtaaactccaagcggtaatatcataagttacagaatcggtaagtttagcttcaggttctaacaatgccttcaccatttttcctttaggctgattggttgaaactatccaatcatttttagttgtttttatggtttttacactttttgaataataatcgtaagcttttagtgatttttcttctgaagggaacgtttcaataccgtgtttgtgaagtaattctgaaagttttttaattttagttttgtctcctcttaaaatgtaacttttgtattttaaattagaattatcaaagaattttccaaattcagttataagttttacagcatttttagaagataattcaacggttgataaacctgtagttgtatggtgtttaactctatcaacaaaagtaagaacagaattgttttctaaagttattcctaatccggcaccaataccggcctgttcgtaagtcataccaattgctcccatataagttgggtacgtatcgccgtaacttggatacaataaatcgaaaaactcttttgtaaaataaccccatccattttggtcaaaatattttgcatgatttttccctaattgcgtttgaaaatctcgttgccaatctgtaattatttcatgaaaaggttctgccgccggcgcaaagtaatacggttcattataaccttgctcatggaaatctacatgcacctgtggtaaccatttattgtaaacaaccaaacgttgttgtgtttcaacctgactggcccaagcccaatctctatttaaatcgaacaaataatgattggctcttcctctaggccaaggctcgttatgttcagaggcatccggattcacattgtatggagtgcttttagtttcattataccaattaacatatctatctcttccatcgggattgatacaaggatcaataataactaatgtatttttaagccattcttgtttttttgtaattaaatcgtacaatgtttgcatagatgcttctgtactcgaagcctcattgccatgtacattgtaacttaaccaaacaataacagtttcagagttggaatttccttcaattatacccgctttcttaagattattttctcttattttttcaagattagaaatattttctactgatgatatgtatgaaatgtataaaggtctaaattcattggtttcaccatatttttcaagctttatattagcagaattagtacttacatagtcaaaatattcaattactttataatgtcttgtaaaacgtgtgccaagttcataacctaaaaaatctgctggcgatttaatattttgggcagtaattgaactaaataataatgaaattgtaaagaatgttaagaggatttttttcatttatgtaataatttaaaaaagccaaatgtaattaataatacttaatttttaagattatataagcatttgattaaattattaagaaaaaggtgtaaaaattgtagtataaattgattttagttataaaaaattaaataaatattttaatttgttaattttagttgaacatttttaaattgtttatttttataacctcaatttcagttttatatgggtactgattataattttgaaaagcattggaacaatgcctatttaaaaacgcctatcaatagtttgggatggtatgaaaaagaagcaactcagtcattaaaccttattgaattgtgtaatttacctaaagaagcttctgtttttaatcctggtgcaggtgccagtagtttgattgaagaactattaaatagaggttacacaaaccttacagtaaacgatatttcttcaatagcactttccgagttgagaaatagtttgtcgaagcataaacattcagaagttaaatttgtagttgacgatttaacaaatcctacagaacttttaaaattaaaaaatatagatttgtggcacgatagggctgttcttcatttttttacattgaaagaacaacaaaacacatattttaatttgttaaaaaaggttttaaagccaaatggttttgtaattttggctcaatttaacttagaaggcgcaaaaaaatgtagcggattggatgttgtaaattacaatgaggaaatgctacaggaaaaattaggaaatgaatttattttgttagaatcattcaaccatacatattttcaaccttcaggcaatacaagagaatttgtttacactctatttcaaagaaaagcatagtttttaatgaaagtacaccatcttcctttttacaaaacaggatatttttctaatctgataaacgattatttagataaaaattctaaattattggagttttatgaaaattttccaaatattgagggatttaaaaagcaaataaatctaaaatcaaattttgaagctgctaaacgtaaaacgttggttaaatctttaaataaacaatacaattcatttaaaacaagtgatttaacaactgaaaacataatgttgttaggtgctgaaaatacatttacagtaactacaggacaccaattgaacatttttaccggaccattatattttttatacaaaatagttactacaataaatttaacaaaagaactgaaaaaacagtttccaaagtacaattttgtgcctatttattggatggctactgaagatcacgattttgatgagataaactattttaattttcaagaaactaaaattagctggaataagaatgtaaccggagctgtaggtaggatttctacaaaaggtttagatgaagttgaagaaaaatttatcagtttattgaatacttcaaaaaatgcacagaaacttaaagaactatttaacaattcatatagtaagcattcaacattagctgaagcaacacgttatttggtaaatgaactttttggtgaatatggtttggtaattgttgatggagatgataaagctttaaaaactgagtttaaatcgatattaaaagatgagttaattgaaaatacatcttataaaacagttttagaaacaaataataagttaagttccaactataaaatccaggtaaatccacgagaaattaatttattttacctaaaagataatttacgagaaagaattatttttgatactaaaaattacattgttaataatacttcaatttcatttactaaagatgaaatattgaatgaacttgaaaattatccggagagatttagtcccaatgtaattatgcggccactttatcaagaaactgttttaccaaatttatgttacattggaggaggtggagagttggcttattggtttcagttaaaaaaatattttagtgtttctaaaataccatttccaattttattgttacgaaattcagtactgtttatctccaaaaagcaactgcataaattgcgaaaattagatatatcattagaagaaatttttgttaaacaagaagatttaatttcagaaaaaataaaagaaatctctgaaatagaaattgatttttcgcaacaaaaattgtttttaaagcaacaatttacaggtttaaaagagttggcaaaacaaacagatgtttcatttttaggtgctgtgaatgcacaggaaaagaaacaattaaatgggttagataaattagaacaacgtttgctgaaagcacaaaaaagaaaacttaatgatgttattgagagaattacattacttcaaaatgagttatttcctaaccagagtttggaagaacgcacccgaaattttgctgaatattatgtagagtttggcgataaactagtaccaatgcttttatcagctttaaatcctttaaaattacaattttcaattatcgagaattaaaattctataggtttaaatgaaattgttttggatttaaaaatgtatttcagttcaattactttttcattttttattttagaggcttcatggtcatctaattcaaaatcaatttccgtaaaataagcactagtattttttatttgagtggaatcaatatctgtattatcagaatttaaggttaaagaatcattttcgaaaataaaggatagtttacatcctgtacgtttaattttggttgaaaaatcaccaataataattgtttttaaataaggaaacccaccaagctcttcaaaatctaaataagcgtcatttgtagtgttttcggcatattttgtagctccattatattctattttaggtgcaatttcaacagaatttttatttttttttgttttaaaaaggtttgaaaaagaaaaagacatttttaatatttagttgttatgatatgcttgattatgtactaaggttgttccgcatactaaacatttttccgatttaccagatcctccgtaacaaccattattacaaatataatgataaactccagaactattttgagcaggagtactgttatttttattattttggttaccgttgtatttaggtacatttaaaggaccatcttttaaaaaatcttttgcatgataaatttcattatgtgtgtatggagttttacaaacagggcaattacctgcaatagcacctccgctattttcacaattatttttgcatatataatgtttaatactctcggaagaagtattggtatcttttataatggttttagactgtttttctttacaggaaacactgattataagtacagaaaataaaaatattttaaaaaatcgcatagttaaaattcaaatgtatattctcaaatatatattaaattttttagttataaaatttgaacaagttctgtttataaaaaaagcccaaacttttgagtttgggctttacttttaaaaataatattttataagtgaattacttcaccataagcatcggctacagcttccataacagcttcactcattgtagggtgtgggtgaattgcttttaatacttcatggccggttgtttctaattttcttgcaacaacagcctcagctatcatatcagttacaccggcaccaatcatgtggcaacctaaccattcgccgtattttgcatcaaaaataacttttacaaatccgtcgggtgttcctgcagcttttgctttacctgaggcagaaaaaggaaattttcctactttaatttcataaccttcttctttcgctttagcttcagttaaaccaacacttgcaatttcaggtgtagcataggtacaacccggaatgttaccgtaatcaattttatcagtatgtaaacctgcaattttctcaacacaagtaattccttcggcagaagctacgtgcgctaatgcaggtccgggaacaacatcgccaatagcataataacccggaatatttgtttgataaaaatcgtttaccaatattttatctctgtcagtaacaataccaacatcttctaaacctatattttcaatgtttgatttaattcctacagctgaaagaactatgtcggcttctaaaatttcttcaccttttttagttttaacaacagctttaactccttctcctgaagtatcaacagattcaactgatgagctggtcataactttgatacctgattttttgaaagagcgttcaaattgtttagaaacatctacatcttctaacggaactaaatttgataaaaattcaacaatggttacttcggtacccattgaattgtaaaaatgagcaaactccactccaattgcaccggagccaactacaatcatttttttaggttgttcaggtaaagtcatagcctctctgtagccaataacttttttgccatcttgaggtaagcttggtaattcgcgagaacgagcacctgttgcaataataatatgatcggcactatattcagtaacatttccatcagcatcagttacatcaactttttttcccggttttattttaccaaaaccatcaatcacatcaattttattttttttcattaaaaattgaacacctttactcattccttcggcaacatttcggcttcttttaacaacggcttcaaagtccttatcaatagcttcggcttttaaaccatattcatcaacgtgttttaaataatcgtaaacttgagcacttttaagtaatgcttttgttggtatacatccccaattcaggcagatacctcctaagttttctttttcaactacagctactttaaaacctagctgagatgatctaatagctgtaacatatcctcctggaccacttcctataatgatgatatcgtatttcatgtttttacttttattaaatatgaggcgaatttacaaagattttaactaaataaacttaaatttagttaagaaatatttaaattagcgtagaccaatttaaaacttaaaccatgggattattagattcattaaaaaaattatttggtggtactaaaaagactgccgaaaatacttttgataaagcaaaagtagcaactgatgacttaaaaaaagatgcgtcagaactaaccgataaggctgtagataaagctaaagacattgcaaatgatttaaaagaagaaatagttgattttgctgaagatgcaaaagaagtggctaaggaagctaaagaaattatttctgaaaaaacaaaggaaataacagccgagattaaagaagaaacttcagaatttattgaagacacaaaaaaagttgctaaagaggtaaaagaaaaagtttcagaaaaaacagatgaagccattaaaaaaactaaagaagtagcaagtgatgttagagcgtcgttagatgaaactattgaaaatgctaaagaaaaaggtgaaattattgctgatgaatcaaaagcagcaataaaaaatataaaagataaaatagatagttctaaagaaaatgaggcttaaaatataaagtttttttaaaagaaaaaggttgtttaaaaagtgtattttaagttaatcggaacctgtctgccgacaggcaggcttatttagcttcgctgaatcttcgaattcaggttttcataataattaaagataagcatattgagattctgaaataaattcagaatgacgacatttaagactttttagacaatctcttttattattgtaaaactatttacattctttcaggaacattaattcccaataacataaatgccgattttataacatttccaactttagcagaaagttgagttctgaatattttttcttgctcattttcgcaacctaaaataggcactgtttggtaaaacgagttgtatactttaaccaaatcaaacgtatagtttgcaattaatgccggactatgatttttagccgcattttgaatagtttcaggaaataataaaatttgtttaatcaattcgcgctcttttccatctaacgaaatagcatttatttctactgaaaaatcaaaatcggcttttcttaaaatagattgaattcttgcgtaagtgtattgaataaaaggacctgtattgccgttaaaatcaaccgattcttccggattgaatagaatacgttttttagggtctacttttaaaataaaatattttaaagctcctaaaccaatggttttgtataattcttctttctcttcttccgagtatccttctaatttgcccaactcttgtgaaatttcacgtgcagtattggtcatttcaatcattaaatcatcagcatcaacaacagtaccttctctcgatttcattttaccgcttggcaaatcaaccattccgtacgataaatgatacaaatgtttagcccaatcaaaacctaatttatctaaaattagaaacagtactttaaaatgataatcctgttcgttacctacggtataaaccaattcatctaaatcaaaatctttaaaacgctcaatggcagtacctatgtcttgtgtcatatacaccgcagttccatcggctctcaacacaattttttcatctaaaccatcttcagtcaaatcaatccaaaccgagccatcttcttttttataaaaaacacctctttctaatccatcggcaacaacatcttttcctaataaataggtattactttcgtaataatttttgtcgaaatcaacacccaattctttataagtttcgttaaatccggtataaacccactcgttcatagttttccataaatcaacaacttctgcatctccggcttcccattttataagcatttcttgtgcttctaataaaagtggagcttctttttttgcttcatcttctgtttttccttcagcaataagtttaccgatttcttttttgtattcttggtcaaatttcacatagtaattaccaaccagtttatcacctttaaggcctgtactttcgggagtttcaccatttccaaaacgttgccaagccaacatacttttgcaaatatgaataccacggtcgtttattatttgagttttatatacttttttacctgaagccttaataatttcagccacagaatagcctaataaattatttcttatatgtcctaaatgtagtggtttatttgtgtttggtgaagaatattctaccataacagctttatcacctttgttaggtgttacaaatccgtaattttcagttgaaaatacagtattgaaatttgaaataaaataagcatcggaaattaccaaatttaaaaaccctttaactacgttaaaatctgcaatttcttcaacattttcttttaaatagtttcccagttttgtgccaatttcagcaggatttccttttataaagcgtaaaaatgcaaaaattacaatagttatatctccttcaaaatctttacgtgtagcctgaaattcaacagtttcaattgctacattataaatgtgttttaaccctttttttacagccgattctaaaatattttgcataatttttactgaaataatttgaagtgcaaaagtacacaaattttaaaagtttaaattgtatttttgcctataaattacgaagaatggaacagtttttaaaagagttacccaatttagccaaagaaaaatacgatgagagtaaaaagtattttgctaaattgaaaaaacgaacacctaaaaatttagatttggtaatgcaggatttacatgatgaagagtttgaaaaaaccgattgtttaacctgtggtaattgctgtaaaactaccagcccaatttttactgaaaaagatattgaacgaatttcgaaacatttaaaaatgaaggttgtgaattttatttcacagtatttagaacgcgattcggatgatttttatgtgttaaaaacggctccatgttcctttttagatttgaaagacaatacatgttttatttataatgttcgcccaaaagcatgtagtgaatatccgcataccaatagacgtaagtttattcaaataactaatttaacattaaaaaatacggagatttgcccggcaacatataacattgtagaagcattgaaaaagaaattgcctgtaaaataaatacttcttttttatatataaaaaaagtcctaccgaagcaggactaaagattttcatctacggcatatagccttattgtgataagattaaagattagtataattttttcactattcaaatatagtaaactttttttaaatcttataaaaaaccgttaactttataagtcttaaaaaattgcaataaaattatatgttatgtcaaaaattcttggattagatttaggaaccaacagtattggttgggcggttgttgatgattcacaccaaaaaattttaggaatgggaagtaggatatttcctatgggagttgataatttaggtgatggggaagggagagaaatgtctaaaaatgcaagcagaacaggagctagaggagttaggcgtcaattttttagaaaaagattaagaaaaaaagtgttattaaaagcactttcagaaaataaaatgtgtccattggattcaaaagattttgaagattggaaaagaacaaaagaatttccgtccataaagttagccacttggtttgcattaaatccgtatgagttaaggcaaaaagcattaaataaaaaaattacattagaagaattaggcagaatattttatcatttaattcagcgtagaggctttttaagcaatagtagaaaaggggggaaagatgatggagctatttttaaaggaaatgtaaaagaaggaaaaatcggtattacagaaacacaagagaaaatccaagaaaaaacattaggttcttatttgtatgaaatttatccaaaagaaaatcatccttttcaagaaggtttagagagaattcgtaacaggtatactacacgtaaaatgtatgttgatgaatttgaattgatttggaataaacaagctcaattttatttaggtttaacaaacgaattaaaaattttatttggtggtagaaaactcgatggttataaagaagatggaattttatttcatcaaagaccattacgttctcaaaaacatttagttggtaattgctcttttgaacctactaaaacaaaatgtcctataagcgcaattccttttgaacagtttagagtatggcaatgggtaaacaccgtagaatataatggaaataaaatttctcaagatgaaaaggaaaagattatcgattttttgtatgcaaatgaaaagcccgattttaaacgaattagaaaagttattgggaaagaaaatgcacaattcaaattcaattataaagatgatgataagatagttggaacacataccatatcaaatttatcaaataaaaaatattttggtaaaaaatggtttgagttttcagaaaaggaacaagaagatatatggcatgtgttgtacttttttgacagtaaatcgaatttaaaagattatgctattaaaaaatggaattttacggaagaacaagcagaagcaatttcaaaatttaatgttaaagatggttattctaatttaagcagaaaagcaatttcaaatattcttccttttttgcagttgggctttacatatgatgtggctgtagttttaggtggaattaaaaatgtttttggtacagattgggaaaaattatctgatgaaaaaagaaattatttaattgataatgttgaagatattgttcgctcaaaaactaaaggcggatttatagatattattaaaaatattttaagaaaagattacaatatttcagataagcaacttaaaaaactataccatcattctgcaaaaatcgatgtaaaagaattgttagaaaaattgccgttaggtaaagaagcagacaaagaaatacaggctataagaaatccaattgtaattacagctttatttgaactacgaaaattagttaatgaattgattgatgaacacggtaattttaacgaaattaaagttgaaatggcacgtgatttaaaaatttccaaatcgcaacgaaataaaatccgtagagatcaaaaacgtttagagagagaaaatgatagaataaaagatagattaaatgaggaaggtattagaataactcatgatactattttgttatataaattatgggaagaatgtaaaaaaacgtgtccatatacaggaaagccaatttcagtagcgcaattattttcaggagaagtacaaattgaacatattcatccatggagtcgttctttaaatgatagtttttcaaataaaacattatgttgggcagatgaaaacagaaaaaaaggtgataaaacaccttatgaatattatggtgatgatgaagcaaattggtctgcaataaaagaacgtgctttaaaattattttctgatactaaagaataccctaattcatataataaatttaaacgatttgtacaacaaaaatttgatgatgatttttcttcaagacaattaaatgatacacgatatattagtaaagaagctaaaaattatttatcaagaatttgtgaaaatgttacagtttctccgggacaagcaacatctaatttgagacaaaagtggggtttgaatcatattttaaattatgaaaatgctaaaactcgtgaagatcatcgtcatcatgcaattgatgctttagtaatggcttgtacaaaaggatcgtatgtgcaagaattatctaaatggaatagatataatagaaaaccagaattaaaatattttccaatgccttgggaaacatttaattatgatgcggaaaaagcagttgaaaatattttggtttctcacaaaaaagtttcaaatgatattactgttcgaacacatataacagagaaaaacggaaaaaaacataaaaatattggtgtagcggcaagaggacaattgcataaagaaacagtttttggtaagcgaacatttaaaggagaagaagcttttcatgtcagaaaacctattgaaagtttagaaactgcaaaacaaattgataaagtagttgatgaaacaattcgaatgctgattttaaaaagagtgaatgaattaggtggatttgtaaaagatagagttcctgctaacaccttttttataatagaagaaaacggaataaaaaaaccacaaattttcttaccaaataaaaaaggtgaacctgttcctattttaaaagttagagtaaaagaaaatattggtggtgcagaaaaattaaaagaaaatataaaccaatgggtaaacccaagaaataatcatcatgtattaatttataaagacgaaaaaggcaatttaaaagaagatgttgtaacattttggacagttgtagaaagaaaaagaattggagattcggtatacaaattaccaacagatggaaaagaaataattaccactttacacattaacgatatgtttttgttagggttaaatgatgaagaaattaattgggaaaatcaagattatgagatgataaaagatcatttgtatagagttcaaaaactatcatcaaagttttatgaatttagattaaatacagaagcatcaatacaaaacaattttcaacctttttatattcgaattcaaagttttggtgatggtaaaacaggatggaaaacatttaatcctataaaagttaaaatatctgttacaggtaaaattgaaaaattataatagtttgtcattccgaagcatgaggaatcacataagagtaaacaaataaaaatgaaagagtttaatgaaaatgaaggttatcataaatattatgtgtatatcataactaacaagtatcgatctacttactatattggtgtgacaaataatttaaatgagcgtttaaaacagcataaagagaatatagacaagggagccaaaacttttgcagcgaaatataacttgcaacatttggtatattatgagcaatttagttgggtgcaaaatgctattgccagagaaaaagagcttaaagggtggagcagggaaaagaaattagatttaatacgttcctttaatgctaattttgagtttttagagagtcgatttatataatatagcagttgtttttatagtattaggaatttcattaaaaatgtgaaaattatgagattcctcatgcttcggtatgacaggaataagttctttgacataaaaagtcaaatcttaaacaataaaaaccacaacaaaacagaacgaagtgaggttttgttgtggtttgattaaagattagaaaacacgatatttaaatgcttttctttttttctctgggtttgttgtggtttgattaaagattagaaaacacgatatttcggctcatttaaagccactaatcttatacgttgtggtttgattaaagattagaaaacacgatattacgaatcaattgctacatctactgtattaggttgtggtttgattaaagattagaaaacacgatattttaatataagtttattttggcttgatatagttgtggtttgattaaagattagaaaacacgatattagatttaaaggaaggcgatgagcttgtatagttgtggtttgattaaagattagaaaacacgatattagtaaaataattctcgataaacatatcgaagttgtggtttgattaaagattagaaaacacgatatttgtatctggtggtaatgctgctactaaagcgttgtggtttgattaaagattagaaaacacgatattcaaatagggtcttataaaattataaataatgttgtggtttgattaaagattagaaaacacgatatttacagttcttatgaatgattcaattggctagttgtggtttgattaaagattagaaaacacgatatttttatactctcgatacactatggcatctgcgttgtggtttgattaaagattagaaaacacgatattaaacctactttaagaccaagtgtaagaactgttgtggtttgattaaagattagaaaacacgatattttagtttgtgaagaatattacattaagcggttgtggtttgattaaagattagaaaacacgatattagtcgtgaagtaattgtaagatacacttatgttgtggtttgattaaagattagaaaacacgatattaaatcggcaactaaccataccaccaacgttgttgtggtttgattaaagattagaaaacacgatattcttaaaaatggcaaccaaaaagaatttaccgttgtggtttgattaaagattagaaaacacgatattcaaatagggtcttataaaattataaataatgttgtggtttgattaaagattagaaaacacgatattattcttgctttgtagcaaatgaagtgtttagttgtggtttgattaaagattagaaaacacgatatttttccaccaggatattattatctcgagcttgttgtggtttgattaaagattagaaaacacgatattgaaaattcgctccatttcatacgtgtcatcgttgtggtttgattaaagattagaaaacacgatattattacaagaaaacaaacaactaccagtagtgttgtggtttgattaaagattagaaaacacgatattatttatctcgaaaagtgtatagcgaatcttgttgtggtttgattaaagattagaaaacacgatatttaatttttacagttccctgcggtttacaagttgtggtttgattaaagattagaaaacacgatattcaagctcatcattagtaacgtcagcattatgttgtggtttgattaaagattagaaaacacgatatttgacttttcatcaatagattcgtttgatagttgtggtttgattaaagattagaaaacacgatatttaaggtcttgtaaatattcgataacttcttgttgtggtttgattaaagattagaaaacacgatatttagtagcgtttttagcttctaataaccaagtaattaaggtgaaatatcgtaaataaaaatgcttcttttttgtatttaattgacaagattgaggcattttttacattctaatgtggtttacaaacaccagtaataggattattaataggtgtatcttagttgtggtttgattaaagattagaaaacacgatattgtaatgatgttacttctcctgctgttttaagttgtggtttgattaaagattagaaaacacgatatttccaaggcgaatgaattaattgacctctagttgtggtttgattaaagattagaaaacacgatattcacaatctacacacgttgcctttactcgtagttgtggtttgattaaagattagaaaacacgatatttagtagcgtttttagcttctaataaccaagtaattaaggtgaaatatcgtaaataaaaatgcttcttttttgtatttaattgacaagattgaggcattttttacattctaatgtggtttacaaacacc

SEQ ID NO: 2665 - DNA, 14713 bp, synthetic construct
  source 1..14713: mol_type = other DNA
  misc_feature 1..14713: note = Synthetic
ccccagttaccaaaaagaacattataagcagccaactttatttcaacagatgcctcaggtcgttttggatcaactttctgtttatttttaggcttgcatgaaattattgcaattaccactagggtcaaagttgctagaactgttgattttgtcatgaattctcttctttttattttacctgtttcaattgttaataatcaagcttggattcaatctttcaatggaataaagcgttgcaaatgtaagttgaaattatcatgtttgccagcacgaagcaatatcgtaagctttacctagttgatatttgtttagttttccagttgtaagtccttttaaaattttcgatataaaagattcagaataccgcctaattactttgtcatttttgaagccttggccatggagttgggaattagccaacaaagcgtttctttaatagagcaaagtgaaactatagagaaagaaaaactggaaaaggtggccaaagctttgggcgttaccgccgaggcgatcaagaatttttctgatgaagcggtttttaatattatttcgaacacttataataattctagtagtgatagttctaccattatggcaagttctctgaattatcagccgacattcaatccaattgataaaatcatggagttggttaaagaaaacagaaagctttatcaagaattactaaaagcagaaaaagataaggtgtcctatctggaaaagctattgaacaaaaaatagatttctctttttatagagagcttagtattttaagatcatacccgatttaattcaaaagggaaccggttatggttttcttttttattaaagatcataagttctttgcaaccaacgggagcaaagcaagatcgtctttgttgcaacaaagacacatcttgaattctctatttgccgtaaaaaattgcctaaaaatggggctttcggaagcttttgccgtaaaaatctaatattaacctagacttttttcagttaattatttgatagtcaatattatacatgcagtaacaccgcttcagcgtgttaccctcttgctattcttaatattaaaattaaaaaactaaatctttttcgtgttctataggttttcttaatgcgtagtaaaataaacatttagtataaaacaaaaaaagtcccaccgaagcaggactaaaggttttcacctacggcatatagccttattgtgataagattaaggattagaagttttaatcttatgctaagatactaaaaattgtaaatatgggtattacggaaaactgtaaaatgttaaagtaaattttcttatgtttagtaataataaaatgtaaaaaaatggcaagaattttaggtttggatttagggacaaattctattggatgggcgattgttgatgatatggataataagatattaggtatgggaagtagaatttttccaatgggagttgagaatttaggagaaggtgaaggaagggaaatttctaaaaacgcaggaagaactggtgcaagaggagttagaagacaattttttagaagaagattacgaaagaaaatattattaaaagcactttctgaaaataagatgtgtccaatgattgcttcggattttgaagattggaaaaaaactaaacaattcccaactgaaaaattagctaattggtttgccttaaatccttatgaattacgtcaaaaagctttgaatagaaaattatcttttgaagaaattggtagaattttttatcatttaattcaaagacgtggatttttgagtaataacagaaaaggtgaaactgatgacggagccatttttaaaggaaacgaaaaagaaggtaaaataggaattaccaaaacacaagaaagtattcaagataaaactttagggtcttatttatttgaaatttatccaaaagaatatcaaccttttcagaatagtttggagagaattcgtaatcgttacacaacccgtaaaatgtacattgatgaatttgaattgatttggaataaacaatcagaatttcattcaaatttgaatgaagatttgaaaacactatttgggggaagaaaattagatggctatagagaagatggtattttatttcatcaacgacctttacgttctcagaaacatttggttggaaattgttcttttgaaccaactaagacaaaatgcccaaaaagtgccattccatttgaaaaatttagagtatggcaatgggtaaatacggtggagtacaacggaaataaaatttcactagaagaaaaagaaaaaattataacattcctttataccaatgaaaaacccaattttaaaaaaataagaaaagttattgggaaggaaagtgcagaatataaattcaactataaaaacgatgataaaatagtgggtacgcacactatttcaaacttgtcaaacaagaagtattttggtaataaatggtttgatttttcagaaaaggaacaagaggatatttggcacactttgtatttctttgatagtaaatccaacctaaaagaatacgcagttaaaaattggaattttaccgaagcaaaagcagaggctatttcaaaatttaatgtaaaagatggctattccagcttaagccgtaaagcaatacataacattttaccttttttacagttgggctttacctatgatgttgcggtggttttaggtggaattaaaaatacttttggcacggattgggaacaattatcaaataaaaaaagaaactttttaattaacaatgttgaggatatagtcagatttaaaagcattggcggatttataggagtaattaaggatattctgcgaaaggagtataatttgtccgattctcaattgagaaaattatatcatcattcggcagatattactataaaggagttattggaaaaattgccagttggcaaagatgccgacaaagaaatacaatctattaaaaaccctatagttattacagctttatttgagttgcgaaaattggttaatgaattaattgatgaacacggcaaaattgatgtgataaaagtggaaatggctcgggatttaaaaatttcaaagtcgcagcgaaataaaattagaagtgagcaaaaaagattggaacgtgagaacgatagggtaaaagatagattgaatgaagtaggtattcgaataacacatgacaatcttttattgtacaaactttgggaagagtgtaaaaaaacctgtccatatacaggtgaaccaatttctataaccaaattgttttctggtgaagttcaaatagaacatatccatccttggagccgttcattaaatgatagtttttcaaacaaaactttgtgttatgctgatgagaatagaaaaaagggaaacaaaacaccctatgaatattatggaaatgacaatgccaattggtctgcaataaaagaacgtgctttaaagttgttttctgacaccaaggaatatccaaatgcttaccaaaagtttaaacgatttgtacaacaaaaatttgatgatgatttttccacaagacaattaaacgatacccgttatattagtaaagaagcaaaaaactatttatcaaaaatctgtaaaaatgtaatcgtctcgcctggacaagccacttcaaatttgaggcaaaaatggggcttgaattctgttttaaatattgaaaatacaaaaataagggaagatcataggcaccatgcagttgatgcattggttatggcttgtacaaaagtttcgtttgtgcaagaactttcaaaatggaataggtataatagaaattccgaattgaaaaacttccctatgccttgggaaacttttaggtatgatgccgaaaaggcagttgataaagttttggtttcccataaaaaggtttcaaatgatattaccattagaattcatatcactgaaaagaatggtaaaaaatatgacaacaccggtgtagcagcaagagggcaactgcataaagaaactgtttttggaaagcgtaattttaacggagaagaagcttttcacgtgaggaaaccgattgatggtttaacaactgtaaaacaaattgaaaaagttgttgatgaaactactcgcttattgattttaaaaaggattaatgaattggggggatttataaaagataaagttcctgcaaatactttttttgtagtggatgaaaatggggtaaaacagccccaaattttcttacctaataaaaacggtgaagctgttccaatttttaaggtaagagtgaaagaaaatattggtggtgcggaaaagctaaaagaaaatgtaaatcaatgggtaaatcctagaaacaaccaccatgtattgatttataaagatgaacaaggaaacctaaaagaagaagtagtgactttttggacggttgtagagcgaaaacgcacaggggattcagcccataaattaccaattgatggaaaagaaatagtaacaacgttacatattaatgatatgtttttattgggtttaaaagaagaggaaatcaattgggagaatccagattatgaagttttgaaggagcatttgtataggatacaaaagttgtcttctaaattttatgaatttaggttaaatactgaagcttcaattcagaataattttcaacccttttatgtaagaatccatagctttggagaaggaaaaacaggatggctaacatttaatccgataaaagtaaaaatttcagtttctgggaaaatccaaaaagtataatttgtcctccctcattacaatcttagattataaaaaaagttctttgatataaagcttaaaatctataaatgtggtatacatgtagccttcactaaaaatcacgatattgtaccattgtagagaacgtgacagggaggggttgtggtttgattaaagattagaagtcacgatattcaacaacttattaaggtgtgcctcttccctgttgtggtttgattaaagattagaagtcacgatatttttatgcctatacagataaggaccttgctcgttgtggtttgattaaagattagaagtcacgatattcgaggatgaagaggaagaaacgttctacaggttgtggtttgattaaagattagaagtcacgatattagcaaataaagtatacaacatgcttaacagttgtggtttgattaaagattagaagtcacgatattaagaacctctatcggtatccataacagcgtgttgtggtttgattaaagattagaagtcacgatatttgggatgatgccagagccttacataccttcgttgtggtttgattaaagattagaagtcacgatatttagtcctaaataagacccttgcacgcatccgttgtggtttgattaaagattagaagtcacgatattcgtgcaatcaattaagacttatgacaacacgttgtggtttgattaaagattagaagtcacgatattcacaacttttgttgctaaagacaacgctgcgttgtggtttgattaaagattagaagtcacgatattgatgataggtttaaggatgaggagggcaatgttgtggtttgattaaagattagaagtcacgatattttttgaaaaggaaatgatgttatccattccgttgtggtttgattaaagattagaagtcacgatatttaatttcacccaatcccatacgttgttgacgttgtggtttgattaaagattagaagtcacgatattcaaatccttctcatattgattaacatcctgttgtggtttgattaaagattagaagtcacgatattagttgtcttgtggccttctggtagtcagcaaattaagaggtaatatcgggataaaaaatgctcctttttagcagtgataaggctagattggggcattttttggtttagaaaaaatggcacttaaagaaaatttgatattatgccataaaaagggtacaagaaggctattttaaaggaggcactattttaaaataattctaactgcgtaggttgcggctctgtagggacttcaagttttccccagaagtttagggtatttccgaattgtttatcggtaatgcgcaatatactgactttgcccaaagggggcagtaggccatgaacacgtttttcgtgtacgtcggcactttcactacttgcacaatgtctcatatacaccgaatattgcatcatcgtaaagccatccttcaatagatcctttctaaagccggatgcattcttgcggtcttttgcagtgtcggttggtaaatcaaagaatacaaataaccacataattctataaccgtttaattccatagttgggggaacttgatctttttccgttctcccgtatagcattgttgtagggagctggcagttttttgtaagcctaccattaaggggcttttttcacttttaaaatatacagtgcgtgttagcaaattaagcatttcggatttgatggaagtgtttagttcttgtatatcataggattctattagggtgtacaccagttcatctaccaatggcctgtatggttccataatatcatctgcaagggcaaaggcattgtatttatttttatggtgtattcctagggtgttcaacaagccgctgccagataatgccctagcggtggccgcccttaggatagcataaccgtagtttaaaaaattattggggtaatttccgaatcgctcccttttaaatggttgttcaaaaaaggaactccaataagcactggcggcaaccccttccatattggaggtatcaccgcttaaaaccttgctcgataaataatcgaattgatttttcttttgtgtcatcctctcgagaagtataccctgattgtttattttttcctttacggtttgttgccataacttcttttttaacggtacactggcctccaattggtatttgaacaattgttgttgaatatggtgtccatccaaattaaggaacataccactgggcatatggaccttattacagataattatggaggtatttttttctataagatgattgagtgcagggatgctaataaaggtttccgggtggtctattaccaaaaagccaatatcttccattggaatagtagccgttcgttcttcggtttcaatgaaaagctgtaggtttcggcatatgattttagctttcttctctattaaaatagatctttttatcatttttacggtattagaaaacaaataggttttttctaagatagaatattgaaccgctcaagttttacggattttcgtaaggacaactgcctcttttttaactattttagtatcctaatacatactggatgttaaaaaatctactttttatattccttgcccttcttcactttaatttttattcccagaaagataatatcaaactggtatcctggaacatacgggattttggacaaacaaaaagcagtgaggaattggatgaaattgccgaaattgttcgggatgtggatattatagccatacaggaagtagtggccggttatgggggtgctcaggccgtggcaaaactgaccgatatgttgaacagaaagggcaataattgggattatgtgatcagtaaccccacgaatagctcaaagtatgttacagaacgttatgcttttatctggaaaaccaagcacataaagatcaaaaataggggcgggctggttgcagaattggattctcaaatagatcgggaaccctttttattggatttctatttgggtaaaagaaagttcagtatactcaattttcattcaagaccctttaataaagatccagaaagtgaaattagggccttgaccaagtttgtgactaacacggccaacacaactttgatacttgcaggggattttaatgtagacgaaaaggaagctgtatttagcgagcttaaaaggaaaggttttgccgctgcggtttcgaatcaaaaaacaaccttaaaaagaacatgtgatcaaaacgattacctcaattatgccattgataatattttttattccaaggaggtctataaattggaaggtagggttatagattttgtgaagttctgtgaaagtctggaaaaggcaagaaaaatatccgaccatttaccgattttcctaaagtttagtttgagataaggctttctatatcttccttctttaacagggtcttgttctattttatagcctgaggtgtttgattatttatggtcattattttacactccatttgggaacataaattgtaaaagcaaaaatacaacggataataatagcaatatatttaataaacacccactattcttagttttggaaaaagtcttacggtaagttaagccaggtattccggttcttaccgaatatccctttgaacttaaacttcctcttccggttctaagactgggtgttattccagatttgctaatgttaattcctaatcctttaattaggttgactcttttattaaatctgaatgccatagcttattcatttaaaataaaatcacgtatcacattttctatatttgaaggtaaatcggcttgttttatttcgaaattgcttacattcatttcagtcagccatttggtccagtaagttcttataatatcttcttcataaggatttttggcatcaggatttatacccaatactagaacctcaagcttattcaggtgtttattggccgttacaaatccgaaatcttgttgatcaaatttgtctttccaacctggtttgttaaatgtataatgctttacatcttgcggagttaaatatgttgttctatttccttccttaattttggtatccttatggtagatatagccatccgttaaaattattagaatatttctgtagccatcagttatacagtaatcgttaaccttattcttaaaaaaacgccaaatatcagaaccaacatagtggttgtctttaatggcagcttcgtaaatcaaagtagagatactgtcatatttttgacaagtggctaaaattcctttttttgtaactgtgttcttatcaaaagaaattttaagtacctccaattttttgtttagagttttatctgaaggttctgggtcaataaatacttgaattttgtcgtctatttttattaattttttattcatgatatgagactcaaaattctctgcaatagtttttaaatagccgatatctctttgataaaattccattgctggagcaggatatttttctgggtttatcctgtctgacaaatccaaaagtatactaatgtttagatcatcttttgctaaaacctttgggaattcatgtttatgaataagctcatcatacttagggctatctttacaagagacaacagtaaaagataatagcattaatattattgaggactggatataatttttcattttattagtttactagtttgtataaacgtccttcatagttttcatcggcaatatcatgttcttgcaaatgctttttttcttcagtagtacaaagagataataattcgtcttttctttttaaatcgtcgaaattatcagctattccaagaaaccaccctttaacatattcagcatgataagtgagatagtgcttattggaaaatacaaagccatctatagttcgttgtaaatcgtttattttaccttcaaatcctgaaatttcttcttttatagggtttaatttttctatttgagatatgatttcctgttcacagtttttgatgtcttctcttttggatcttataaatgtcttgattttatcaaagttgtcatattctttcataataaaatcgaaaaccaacccccaaataatatagactacaaaacctgcgaaaataataccccaaaattcagcttttgtgaaagctatttgagcgttaaagtcaggggaattaagtgtcttctctatatcataaattttcttttcaatttgatatgctagaattgagtcaaaaataaaagtaactataaacaaggtcgctatcttaacataggaaagccagtttttatgtttttgaaacatatggattaaatatcccaatcccataaaggcgaaaggaatagtcgcaacaaacactccttccaaccaaccatcttctattgcttttgttaaggcattggcatcaaaaattgcattggtaagttggtcagtatcaaatgttttaaaaaaggcagaataggaggcagaaatatagaaaactagtaaataaaaagtgataggaatcaggacagccaaaccaagataaaattgtgcttttggcttcttgtcaacatcctctacaaatttttcaggattatgctttacttccgatatttcacttttaaaaattgaaatcttactttccaaagcagcaatacattcctcgataatactttttactgtttttcttttctttaattcaatttcatacttacttctttcttgtacataaggttcctttaattctttctggagcttttcatcttcacgacatttacccttataatccatataaacattttgcaaacaagccttgaatattgtatgattacctgatgcttgttttgatgaaccatagccactttcaaaaaatgaaagttttatttttttaacatcttcctctttaggtttttcaatttcctgaggaatacttttttttatggagaatatattttttaaagtactcatatcattcttgcattttggtaattaattcttttaaggaggttttttcttttgcattttccaaaagaaactcacatataccatcaatgttttcttctaaaaactcaaatttcatacaatacttttttaaggtatttgtttcatcttccgtgactataccatctgcccagatcattagagctaaatcatatagatattcaatcttctcatctaaggattcgggaactaaagactcctgtgaagggtttaataaaatttcattcaattgatctttactaagccctctttcttctgcaaaattgtaaagcatctttaattcaagaacattgaaattatcatctgcaaaagccattagatataatcttaaaaagtgactttttaattcggttgatatattcattttaacttctatttaattttcacaagcgatattatcattgtctctatctaaattggaataacaatctttatcagtttcaaatgttgattgggcctctgcttgcgtagcgaagtctgaatattttttggactcgcaagtagattctgagttacaggagagacctgtcaatgcagccagtatgatgagaaaaatacctaaacaaccttttttgttatttcttttaaaaattttatttgatcgacctttgcttacaaaatgtccttgaacataggttccatctttcttaaaatatccttttcgataactcattttaatacgaactaaaaattactttatgataagtctatcacttctgcattagaagcatctctttttacagcgtcaataccatctttgcaattctgttttgcattatacatctcgctcgtcgctataacctctccgttaccttttgaccttagattgaagtaaaatttaccgtttgaactttttttgatttcaaattttggattagccatgattattttatttattaattattcaaacctaaactctttggaagagaataccttacagatttccgtaataaaaaaaagaactgatgttaatagttctttttgattgacggtattaagggtattttctaatcctctgaaccatataaggttctacccatttctttttataacttcatagggttttgtaaaacaattagagagtcctctaagtgcttttttgaaatgttactttcctatacatatatagacttaggtgtcaatgaagctaagataaaaaggagttaagaatgttactatgataaatagtttagacattctttaattatacggagttttagtgtgatttattttttaatcatacgtcactttctaaacggcgcaaacatgttgttctaatgttttgtgtcttttgatgacttaggatcattcccaggtttaaccgtgtcagagtctcttattttaccatctaagccatgtattctaacctctccaccgccagaattagaagataattcttttgcccttttttcggcttctttttgtgtgttggcatattcactaactttttctcctccctctttttgaattctccatttatctttattgttgtcttttgaaacatgataatttgccatagtatttagttttggttattatttattgtagattcaatttttacagccatttttatcacatgtaatcctttctgaagtatttatccaatgatttggattttctgttgtgttgaacccgcaacctgttttccctccttttgttcctgaatgaacttcatttgttggtgtatgcttaactgccataatatttaattttaaattaataatatacaaacctaaacccattaaaaaagaatcccttacggatatctgtaagggattggtaatttttgaaaataaatatgtattcaaatcagtccatcacgggtgagtagggcaattagttgggttgtattttttgctccaaaatcatcaaataatttgctcactcttttatcaatggtactttcgctattaggggtaatattatgttgtttgaatttttccgcgatttcctttttgcttagaccattggccagctctgttaaaataaggatgtcaaattcatctaattcgaatacattgttgccggataccatgtttatttgaggggaaacataggtttggccctgattcaccatgtggattgcttccacaagttcggttaaactatggcgtcccttacagacataaccattaattttttgttcttgaaaaagggattttattttggcaggattgtcttccatagaattaacaatcacctttatattgggctgaattgcttttatggaattaataagatttatacccgaggtaagtttacggtctacataactctccttaaaggacaggtccgtaattaaaagttgaaaaggaactttatttgtaagtgctagtttaagtctgttatacgccttatcacaatagagttcttcttgtatttcagggatattcagtttgtgtgataaggtagttgcaatacccgtattggtatcttgaaaatcttcggcgatcaaaatttttttgaacatagtgtagaacgtttttaatttggagttttaatctgggccttaaatcctttgcctttttcagtttcaaatataattgttcccccaattgcccgaatacgcttttctgtattacgaagtccatttttattccccaattgtactttggtagctcctacaccattatcggaatattggatttgtaagagatccgacgtttttttgaaagttatgtttactgcacttgccatactgtacttggtcatgtttatcattaattccctaagcactttgtacaatgttattttggtcaatccatttactgttgaccaatctatttccttacttcccctaaggattaatttgacggtcttaggagtatgcgaacgcagcatttgcaaaagttcctccctaaagttggcgtctaactctatctcattgatttcccttgaaaagtccctactttgattataaagtccttccaaagtatctagtatggttggtttatctgtattattttgaaccatgatcatagcgtgatttagttttcctccaaagtcatcatgtagttttctggataattcagcctcggtttcatatgttgcttcaagttttgcaaacttgttttgttccaataaacgtttgttacgttgtttatagaagatgaacataaaaccaatgatcattaaaagtaatgccaaaccaaatagagccaaggttttctggttgcgctgtcttgctacatccagttgttcttccgccttttctttttgtaaaagcagtatggattccagctttaacctatcatcgtatttgtatttggcaaattgggttttcacctttaattcttgggtgtaaagactatcttgtaaaaaaatgtagcgatctctaaattcaatgtttttaggagttaattgtataagaaacgttaaggcatctttttctgccttgggaattttaagggttttggataattgtattgccaaatcaaaataggaaatcgcttttttaatgtcggtttttgaataaaacgcacctaaatgggtaaagctggcaatttgtcctcgcttgtcatcattctttaccctaatttccaaggcctccttaaaaattgcttccgcatttgtagtagtattgtttaaccattctgcataagccaagttgtccattgaccgggcgtattcttttggactttttagcagtagtgtatcatgaactatatctttaagaatgccaatagccttttcaaattggttaaagtccgagtgagtagccgctaagttgttcttatagaccaacctgtcctctttagaatccgtagtttcaattgccttataataatagccaatggcatcatcgtaattcattaactttctgtgattggtggccaaggcattatagcaagatgataagaattggatatcctcttctgagtttagaaactgtatggcctcggttaaagtttccttacttccataatggtcattctgattttgttgaatgagacccatgcttaaaaggttatttcctacccaactactatcctgaatgtattgaaagtgactttttgaaaggttataattgataaatgcactatcaggattatgggtaatctcatcaaaataatatgcccttaaataat

SEQ ID NO: 2666 - DNA, 14203 bp, synthetic construct
  source 1..14203: mol_type = other DNA
  misc_feature 1..14203: note = Synthetic
gcggcaaagctgattccattcacgccgaccaaaaaacaggcttgaccaaacttatcaatcttgcccgttttgctaccaccgatgctttcagtaccaaaaaaagacccatactttggaacattggcaatcagatgaccggcgacaccattcatcttatttcaaaccccaaaacagaacagctcgattcgcttttggtatttaacgatgccttcatcgtcagcaaggacacgctgggcgacggttacagccaaacaaaaggacaacggctgattggtctttttaaggacaacaagctctacaatgtggacatcatcaaaaatgcagaagtgatttattttatgagaaacgacaagcaggaattggtcggcatcaataaatcaaagtccgggagcatcaatatgaagatcgaagacaatgaagttgtggagacacgtttcatcaaccaaatagacggtgaaatttaccccgaatcaaaatttcccgaaagcgccagaaaattaagaggttttgtatggcgcgaggacgaacgccccaagagtgtcgaagacctctttaaggacgaccctcctttggatcttcccgtaatccgggggcttgatgagtacataccacaagaagatttctttgacgaagctctgcgccaacgtgttgaagatgcaaaacccaaagacctcaaagaagacgaagtgccaaaagcggcccgaaacattccggaagaagccacaaaaagtaccgattcgcaaaatacaaacctgaaaaagactgccaaacccaaaccccaactccatttattgaaaaaagaatagcaatgtccgaagcatttttaaaatatcaggcacaaacctccccacatcctttggccatggaaatttcaaaggccgaaggcagttacatctatgatacaaacggtaaagcccaccttgactttgtcgcaggggtctcggcctgcacgctgggccacagacatcctaaagtggtgaaagccatcaaggaccaactcgacaagtaccttcacgtgatggtctatggcgaatacatccaagagcctgctgttgaactcgcccgaatgttagcgacacatctgccagattctttggaaaccacttatttgaccaattcgggtaccgaagccattgaaggcgcattaaaattggtaaggcgtgctacgggacgcagccagatcatcgctgccaaaaatgcatatcacggtaacactatgggttccatgagcgtaatgggctacgaagagcgtaaaaaagcattccgtccattgatccccgatgtgcattttattgatttcaacaatagcgaggacatccagcaaatcacaaggaaaaccggagcggtactccttgaaaccatacaaggtagcgctggatttatagaaccaaacggcaattttttggccaaagtcaggacacgatgcgacgaagtgggcgcactcctaatactcgacgaaatacagcccggcattggccgtaccggaaaactctttagctttgaacattacaattgtgttccagacgtcctggtaaccggaaaaggcctgggaggcggcatgcccattggtgctttcacagcatcacgaggaatgatgtccacgctaaaagacaatccaaaactcggtcacattaccacttttggtggccatccagtaatcgctgcggcagccttggcaaccttaaaagaagtaaccgaaagcgatctaatgccacaggctatcgaaaaagagcaacttttcagaaaacacttaaaacacccactcatagaagaaatacgcgggaaaggcctgatgctggccgccatggtaccttcggcagaaatcaccaacgaggtcatccttacctgccaaaaagaaggattgatcttgttctggctgctttttgaaccaaaagccatccggattacaccaccgttgaccataagcaatgatgaaattatcaaaggttgtgggattattctctctgttcttgacaagatccacaaaaaaatgctataacttcaattagcgtgtaagcttctgaaaaacagatattaaaatctaaaattcaaccttttgggttaggtgttgattaatttgttaaaaacattggggcgaaaaaccatattttcctaccgataacagtaaatttatttcgacaaacccaaactataacttatgaaattcagccaaagtgatgacaactacgaatactccctaacaaagtttgagtccatgctgaaaacgaacaacgtccagttttttgattcagccgaatttgaagtcatagcgacccattatctcgaaatgggaaaaatagcactcgcaaagaaagccataaaaatggggctggaacagcaccctgcctctgtggaaataaaactgttgcaggtagaaatctatgtgctcgaagacaagttgcagccagccgaaaaattgttggacaccctataccaaattgaacctaccaacgaggaaatttacatacaaaaagccagtatcctatctaaacgcgacgaacaccaaaaagcaatagacaccctgaccatcgccctcaatcttgtgagcgaagatgaagacgtagccgacatctatgcacttatcggtatggaatatctttatatggaacagtttggggatgccaaggattacttcatcaaatgcctcgagctcgactacgaagattattcgtcactgtacaacattatatattgctttgaatatttggaactcgaacaagatgccattaattttttaactaaatacctcgacaaaaatccatacagcgaagtggcctggcaccagatgggcaggcaatactacaagaccaaggaatacgaaaaggctgtttctgctttcgattttgcaatcatttctgacgatacttttgcgggcgcatacctcgaaaagggcaaagcgctcgaaaaaatgaaactgtacagagaagccattgaaaactacaagattacccttgcactcaatgaacccacatcgtatgccatgttacgcattggcaactgctatgagaagctaaaagaatctgacaatgccatacaatattattacaagaccgtccacgaagacccattgctcgacaaaggctggatagccataacaaaatattattacaggaaaaaaaactaccaaaaagccctctactatatcaacaaagccattggcatcgatagcgaaaacggacactattggaaactctatgcacagatcaacctgcggttgaattttctggaagaagcagaaaacggatacaaaaatacacttatctatggcaacttaagtttggacaattggctcaaccatgcagatgtcctgatacaattgggcgattttgaaaccgcctgcaccagcttgaaggaagcagtcgggtttcatcccaatacggccgacatcgaataccgattggcaggtatttacttttcgcttttagaaacagacaaaggccatttccacttaaaaaatgggctaaaactcaaccccgaactcgattatatattgaccgaactgttcccaatggtgtcaaaaatgcaattcataaaagaccttatcgcagaatcaaagtttaaacattgaaacctgtccgtccactgctttaaataaaagccaaagttaatttgaatatagaacttcaaagtaatttcaaaaaattgcttgaaaaatggcttcgtccgcccatatcggttttgcaagattgcggtttcagtgcatagatcaaggtttttatacatctccgaactttagtgcccaaccgaaagttttcggcttcgttggcctgcaacatttcaaagccaaaaaccgttatcacaaaaaatgtcatagaaaattttggccacaaaaattttaaacaagctctaaaaaatacatacctttagcccatacaatctaaccctgaccattaatgaaaagaagcgttttaaactataccgctctctggctaaaagggatggccatgggtgctgcagatgttgtgccgggtgtttccggaggtacaattgcctttatttccggtatttacgaagagctgatagagaccatccataaaatagatttgggatttttcaaaatctggaaagaaaagggcattgtcaaggcatggcatcattacaatctatcatttctggcggtacttttaagcggcatcttcataagcattctgacatttgcaaaccttatcagttggcttttgcacgactaccctattttgatttgggcctttttctttggattggttgtagcgagcatcgtctttgttgggcaacaaataacacgttggagcgtgcccgccatcgtggctttggcacttgcatcggcattttcgtattggataaccgtcacagaacccataggatcgcccgacagtgcgtggtttctgttttttgcaggatttattgcaataatagccatgatacttccagggatttccggggcgtttatccttttgcttttgggcgcatacaagacggtcattggcattatcacgcagttgatcgaaggtgttacaaccctcaacagcgatgcgattttggatgcattgggcaaggtcatcatttttggccttggtgcagttgtaggcataaaagtattttcaggtacattgaattggatgttcaaacaccataaaaacattacgcttgctttattgaccggttttatggtcggagcattgaacaaaatatggccctggaaagaagtaatccgttatacgaccaatagtgatggcaaacaggtaccatttgttgaaaagagcatcctcccatcaaactttgacggcgacacccaattgttatcggccatctttgcagccataattggatttttggtcatttttgttctggaacgattgggcagtagaaaagcacaataatatgcaaagcacccgtacattaagagacaggatatttttggttatcaaaggccttggcatgggtgcagcaaacaaggtacccggtgtttcgggcggtgtcgtggcatttgtggccggtttttacgaagaatttatctactcactgcaaaaggtcaacaaaacagcctttaagctgttgctcaatggcaggttcaggtcgttctatcgctacataaacggtcgttttcttgggctactgttttttgggatgatagtgagcttctttagcgtttcaaaaatccttgattactttttggtacactatgaactctacgtatggagcatgttttttgggatgatcatcgggtccatctattacatcaacaaagactttaaggcatggaactacaagaccattctggccatcatcatcggtaccatactcggggtcagcattagttttctcgacccggcaaaagaaaacgacaacctttggtttgtgtttttctgtggtattatcagtgtttcgggcatgacgttaccgggtttttccggttcgttcattttgatgctcattggcaattacgtactattgttggttgactcggtcaatgcactttctgacacgatttatgacctgttcagggccgatttcagttttgtgaacaatccatccaggatccgtctgctccaagtgcttgcagtgtttacctttggatcgctcactggacttgtcacattttcgcatttgctcacgtatattctcaaacactataaagacattaccatatcttctatcattggcttcatagttggcagtcttggtgttgtttggccctggaaaaaaaccatttacaaactttcagaagatggcagttttatgtttgattcgacaggatcgaagatcgtggccaactacgagcggtatattccgcaattaaatagtgaaacttatcttgctattgcgtatattgtactgggaattttaatcgttcttgctcttgaatggtacggacataaaaccagaaaatcaaatgactgattttggattgataggtaaagacatatcttactcgttttcaaaagcccactttacggccaaatttgaggaggaagggttggactattcttatgacaattttgacctcgacaccatttcccaatttccggaggtcatcaagaacaatcccaatcttttggggctcaacgtaaccatcccatacaaagagagcatcatcccatatctggacgaagtggatggtgtagcacaggaaatcggtgcggtaaacactatcaaaataggttccgacggaaagctcaaaggatacaataccgaccacctgggttttcaggcatccatctttccgcttctggctccacatcacgaaaatgcacttattctgggcacaggaggcgcgtcaaaagccataaactttgcactcaagcagcttaacattccctgcaactttgtttcgagaacacccagaccggaagccagatatacttttggaggccttacggaagatatcataaaggcacaccaaatcatcatcaactgtacacccatcggcacctatccaaacgttaacgagtgcccggagattccctacgatgccgtatctgaggcccatctactttacgatttaatttacaacccgatacagacaaaatttttgatatgtggtgaaataaaaggcgccaccatatccaatggcgctaaaatgcttgagctccaagccgagaaatcgtgggaaatatgggtttcagaatagcctaccttgcttttttctttgtagtctgtcgagttgttattatatttaacccttaaagttttttaggacttaaaaaaattgcaacaatgccagagaatgacaacctgcaaaatgcagatggaacagaaaaagtatcgagcgtagaacaaacgaccgaatcgtcaatcacaaccgatttggagcatagccacgataacgcttcagataacaacgacacaccgcataccgccgaggcaagcgttgaagattcgccccagccccaagcatccgaaagcacacccaaaaaccatgtggacgagattgacgcagccaatgccgaagatgccgaagattctgacaacgccgataggcatgccattgaagaaaaggactatcacgccatgtccatcgagcaactggcagatgagcttgaacatcttttgaagcatcgaaagatccagaccatcaagtcgcacgttgatgaaatccgaacggaattcaacgccaagttttctgaaaagctcgacgagaaaaaagaagaatttcttgccggtggcggcgatgaaatagatttttattttacaagtcccgtaaagaaacgtttcaatagcatttatgccgagtataagaaaaatctcgacgaatactataaaaatctggaaaccacccataaggccaaccttgaaaaacggcttcagatcatcgaggacatcaaaggacttctcaacgttgaagaaaacatcaacaccacttacaagcacttcaaggagttacaggagcaatggcgcaacgcaggaccgataccgcgtgagaagtacaacgacacctggaacacctaccaccaccacgttgagattttttacgacttcctgcacctcaaccgcgaccttcgggacatggacttcaagcacaaccttgaacaaaaactcaaaatcatcgagcgtgccgaagcccttgccaatgaagacaatgccaacaaagctttccgggagctgcaggcgctccacaagatgtggaaagaagatttaggcccggtggacagggaacacagagaagaaatctgggaacgctttagcaacgccacaaaggccatccacgacaaaaggcaagcatatctgtcagatattgacaagatccatgaggccaatctggaaaagaaagaagagatcattgcaaagattgcttcaattgctcaagacccaacgagcacacatcaagcctggcaaaaaaaaatccaaaaaaccgaagaactgcgccaagagtttttcaaggccggaaaagttcccaacaaggacaacgaacccacttgggcaaaattcaaagaagccgtcaggagctttaaccgcaagaagaacaatttttacaaacacctcaagaaagaccagtacgacaaccttcaaaaaaaactggaactcgtcaaaatagccgaagagaacaaagacaacaaagattttgatgcgacaaccccattgatgaaaaaaatccaattggactggaaagccattgggcatgttccaaggaaggaaagcgacaagatctggaagcgtttcaagactgcgtgcaaccattattttgatcagctccacgccgagcgcaagtcagaaaaccaagaactttttgatgcttttgaaaagaaaacaaaattgcttgacacactcaaagaactgaaattgagcggcaatccggaaactgatatcgaaaccatcaaacaaaacatagatgcctggaaaaccattgggcaagtaccacaaaacaagcgctttatcgaaggcaagttcaatagggttcttgacggcttgtttggcaacttaaaaatgtcgaaatcggaaatagagcttatcaaatttgagaacaaactcgaacatttggcccagcccgacgatacccgactgctcgaccacgaacacaattttatcaggaaaaaaatcgacgaactccgcagcaatgttaaccagttagaaaacaatctccagtttttctctaatgtggacgagagcaatcctttggtaaaagatgtaatgaaaaacatacaaaaacaccgtgacgagctctccacatgggaagaaaagctcaaaaaattaagggaactttactaaaacgtcgcgtccgtttaaaagtacggcaacacccataaaatcaaatcccatccgcttgagaagtggatgggactttgacccctaactaaactaaattttaatcttaactcttaccgcttaaaataaaattaagattacctacttatgattatgaaaccaaagtgagtttcattatactatatacgttccggtttgtgatttggatctcgcagggtagttgttttttcacattttttttgcctcttcccagataacgtccatttcttcaagggtcatttcgctcaatgtcctgttggcttccaaagctttattttcaagatactgaaaacgcccgataaattttttgttggtacgttccagggcattttcggggttgatttttaaaaacctggcgtaattgaccaatgaaaacagtacatcgccaagttcgctttccatcctgtcgtggttgcccgccgccacctcatgtctgagttcggccagttcctcctctactttttcccatacctggcgcgggttttcccagtcaaagcccacacctgcggccttgtcctgaatacggccggccttaaccaacgccggaaggctttttggcacgccttgcaggacgctttttttgcctttttcttttagttttatctgctcccaattgcgctttacgtcttcttcgttatccacctttacgtcgccataaatgtgcggatggcgctccaccaatttatcacaaatggcatggcacacatcggcaatatcaaacgtttgggtttcgctggctatacgggcgtaaaacacgatgtgaagcaacaggtcgccgagttctttttttacctcgtccagttggttgtcaaggatggcgtctcccagttcatagacttcttcaatggtgaggtggcgcagcgtttcgagggtttgctttttgtcccacggacattgctcacgaagctcgtccataatggtaagaagccttccaaaggcctgcatctgttgggttttgtctgccataaggatgttttgggcaaaggtacggtttattatgtcaatttgacgttatcggcaatacggttttctatgaacaattttttgaaggaattaataatgcggctgtaaaaatcttgggagatggaatgaaaaatcccaccgaagcgggacttaaggttttcacctacggcatatagccttattgtgataagattaaagattagaagttttaatctgttgtaaatataggcaaaacttttttgttagcttaaggattttttcaaaagtgttaaaaaagttttattatttttaagaactgattaaaatacaaataattatggcaaaaattttaggattggatttaggtacaaactcgattggttgggcattgattgatgatgtacaaaataaaattttaggcattggaagcagaatattccctatgggagttgaaaatttgggtgatgatgatggcgaaatttctaaaaacgcaagccgaacaggggcaagaggcacaagaaggcaattttttagaagaagattgcgtaaaaagatattattgaaagcactatcggaacataaaatgtgtccgttaaacaattccgattttgaggaatggaaaaagacaaaacaatttccgaccgaaaaattggcccattggttcgcacttaacccgtatgaattgcgtaacaaggctttaaatgaaaaattgtctttagaagaaataggtagaattttttatcatttaattcaaagacgaggattcttaagcaatagcagaaaaggtggtagtgatgacggagcaatttttaaaggtaatgccaaagagggaaaaatagggattaccgaaacacaggaaagcatacaagacaaaacacttggctcgtatttgtttgaaatatacccaaaagaaaatcaaccttttcaaagtggcttggagcgaattcgcaacagatatacaacccgaaaaatgtatgttgatgaatttgagttgatttggaataaacaagcacaatttcattcagaacttaatgaagaattaaaaaccttatttggtggaagaaaattagatggctacaaagaagacggaattttgttccatcaaagacctttacgttctcaaaaacatttggttggtttttgttcttttgagagcaaattaaaagatgagaaaggaaagtatatccgaaaaggattaacgaaatgtccgataagtgccattccttttgagcaattcagagtttggcaatgggtaaatacggtggaatacaacggaaataaaatttcacaggaggaaaaagaaaagattgttgaatttctttatgccaatgaaaaacccgaattcaaaaaaatcagaaaagttattggtaaagaaagtgccgaattcaaattcaactataaagatgacgataaaattgcaggaactcatacgatttcaaacctatcaaacaagaaatactttggcaaaaaatggtttgaattttcagaaaaagagcaggaagacatttggcacgtgctctatttttttgatagtaaatccaatttaaaagaatatgccataaagaattggaattttgacgaagaccaagccgaagcgatttctaaattcaacgtaaaagacggatattcaagtttgagccgtaaggcgataagtaatattttgccgtttttgaaattaggttttacctatgatgtagctgtggttttaggtggaattaaaaatgttttcggagctgattgggaaaaattatctgatgagaaaagaaactttttgattgataatgttgagggaattgtacgttccaaaaccaaaagaggttttattgatattatcaaagatattttgagaaatgattatgctgtttcagataaccaattacgaaaattatatcatcattctgcagatattgaggttaaagaattattgaaaaaattacctatcggaaaagaagctgacgcagcaattcaatcgattagaaatccgatagtaattacagcattgtttgaattgcgaaagttggtcaatgaacttattgacgaacacggaaaaattgatgaaataaaagtagaaatggctcgtgatttgaaaatttcaaaatcacaacgaaataaaattcgtagggagcaaaaacgcttggaacgtgaaaatgatagggtaaaagacagacttgttgaaaataatgttaggattacgcacgataatattttgctttataagttatgggaagaatgtaaaaagacttgcccgtacacgggaaaaccaatttctgtaacgcaattattttcaggcgaagtacaaattgagcacattcatccgtggagtcgttcattgaacgatagtttttcaaacaaaacgctttgttatgcggatgaaaaccgaaagaaaggcgacaaaacaccttttgagttttatggaaacgatgaagccaattggtcagccataaaagaacgtgccttaaaattattttctgataccaaagaatatccgaatgcttaccaaaaattcaaacgttttgtacaacaaaaatttgatgatgatttttcatctcgacaattaaatgatacgagatatattagtaaagaagccaaggattatttatctaaaatttgtaaaaatattgtggtttcaccgggacaagccacgtccaacctgcgtcagaaatgggggttgaatcatattctgaatacggatagtgacgctaaatcacgtgaagaccatcgtcatcacgctattgatgctttggtaatggcttgtacaaaagtttcttatgttcaagaacttgcaaaatggaacagatacaacagaagttatgacgtaaagcagtttccgttgccttgggaaaccttccgttttgatgctgaaaaagccgttgaaaaaatattggtttcgcacaaaagagtttccaatgacattacaatcagaactcatattaccgagaaaaacggtaaaaaatataaaaatgtaggcgttgcggctcgtggacaattgcataaagaaaccgttttcggaaaacgcaaagcaccgtttggcgaagaagcctttcacgttagaaaacccattgattcattagttaccgcaaagcaaattgacaaagtagttgatgagaccatcaaacttttgattttgaaaagaattaacgaattaggcgggtttgtaaaagataaagttcctgccgatactttttttgtggttgatgaaagcggaattaaacaaccgcaaatttttcttccaaataaaaatggtgagtctgttccgattttaaaaataagaatgaaagaaaattttggaggagcagagaaattaaaaagtgaggtaaatcaatgggtaaatccacgaaataaccaccatgttttaatctataaagacgaaaaaggaaacctaaaagaagaagtagttacattctggacggttgtagagcgtaagcgaacaggtcaacccgcatatcaattacctgctggtggcaaagaaatagtaacaacattgcatatcaacgatatgtttttgttaggattgaatgaagacgaaattaattgggaaaatccagattatgaactactgaaagagcatttgtatagagtgcagaaatttacatcgggagattattattatagaatagctctaacatcttccatacaaaatgctgaagaaaaacaacagataaacagttttggctttggaaaaaatggttggtcaacccataatcctataaaagtaaaaatttcagtttcgggaaaaatagtcagaatttaagatatttgatgtatatgtacacccctaaatattttgatttatgacacgacagagtatcgcattagccaaacaaaacgatgaatggctaaaagtgcagatagaggaaaaagagtttaatagtaaaagcgaagcgattaactactttattaaacaagctcgtgaacgcgaagaatatcacgaatatgtgcgaatgaaaatcgaacgaggaataaaaagtggtgttgcagaaaaacaaactaaagaagaaatgttggctgaatttaaaaaacggctaaaaaatgtatagttattttttgactcgtgaaaccaaataagatttgtagagggtttatgaatatggagtttataaatttggagaagcacaagctgataaatattttgacatgatgtacgattgctttgacaaaatagcttctaatccgtatatgtttccagagtacattcagtacaatgtacattacagatattgcgtttgtggagtagatactatttattacagagtgataaatgatgaggttgaggtagttacgattgtaggaagacaagattatagataaaagttcattgacatagtaaaatcaatcttaaacgaccaaaccacaacggaaaatctcccgattttctgtcaacggattttccgttgtggtttacaaacagcatttttattttattaaatatgagtttgtgaatctcgcaagctcgatttgataaaagattagaaaacacgatattgaagaatgggtagcccaacacggcgatattgttgtggtttgataaaaaataaaaaaa

SEQ ID NO: 2667 - DNA, 13968 bp, synthetic construct
  misc_feature 1..13968: note = Synthetic
  source 1..13968: mol_type = other DNA
aaggaggcggtcgaaggttcgaatccttcagggctcacttaaagcttcacagaaatgtgaggcttttttgttttctataggttttgtaagggtttagagtgttttacagtattatatcaaatttacctaaatcatcatttttataaagaataaggtatattaaaagtaccccactttttctaaaagtacccctttttaaattagatataaaaaaatggagctcatatttaagctccaaataattaaaaatagatttattttttatgatatatcttcagtagcagctgatggtgcatttttctttacagatgctataccattatctcttccacttgtactttcatacatttcactagaacctataatctgtccattactagcttttaaattaaaatatggctttccattagttgatgtctttttatcaaatttagagtcatcttgagagttagttttaacagatgaaataccattttcacaacctgcttttgaagaatacccctcactagttaatattacttgaccattatcagctttcaagttaaactgaaactctccattggttcttttagaaataacaaatttccccattcttataaatttttagattaataaaattaaaggtataaaaaatatataaatacctgtctaaaagtttttcacaattcattaacaatcaaaaagataaaactatgatatcatataaattacacattctattttacatagataaagtcaaaataaaccagaaagggcaatgtcctatgaaatgtagaattacttataagaaaacaagaaagcaattttctatagggatatttattgaccctaatatttggttaagtaagaaacaaaaagcttccccacaaaacaaagaaaacatcattttaaacaacaaattaagccttattcatcaacagatagataaggcttttttaatgcttcaaatcctgccaaatgagtttgatgtagatgatatttatagaaaatataaaggagaagattctaaagaagaaattacaattttgggagcttatgatttacataataataagacagaaaaattaattggaattgattttaataaattgtcttggagcaggtatgtggaaagtagaaggaaagtagcgttatttattactaaattctataaaagaaaggacgtcaaattaaatgacttagatttaaaatttattcaagatttagaatatttctttaaaacagatttaaaactaaaacaagctactgtttatagaagcatccagcgagtaaagaaaattattcagtttgcaatttcagagaactatttgaagaaagatccatttcatctatataaaaataagaagcataaaacagttattatttatttgacagatgtagagttaaagaagttagagaaacacaattttagtcaagtgagattacagcaagtaaaagatatgtttatattctgttgttacacaggtttagcttatacagaaatgtcaactttgacaactaaaaatatagaaattggttttgatggtaaagaatggattcagatgatacgtaaaaaaacgaataggaaaatatctattccaattttaccaaaagcaagagagattttagataagtatgatgacaagttgccaactttaagtaaccaaaagtttaattcatatttaaaagagatttcggagttagttggtattaataaaaaattaacccatcatactgcaagaaaaacttttgcgacaacagtattattatttaacaatgtacctatggaaattgtatcggaattattgggtcattctaatatgaatgtaacgcaatctcattatggtaaaattgtgcaaaagaaagtcagtgatgaagttaataggctttattaaaataaaaactccacttctatagagaggtggagtaaattgctatgaaaaagaaaaaagaaatttctttctattcaaatatagttatttaaaatcaaataaatctttgacttcaatattcaatgcttttgctaatacaaataaagttgaaatagtggtatttatttctcctctttcaattctacctatttgtgatattgatatatcgcaatcatttgctaaatcttcttgtgaaagattacaattattacggagtttctttaggtttaaaccaaaagccctcataaactcaatattcttaacttttatcacacagtaaaagtgaataaacttgtaataaataatagacgcatatatgcgttttatgtttatatttactaaaaaaaataaaattatgaagaacacttttttaaccttattagtattatgtctgtttttactaacttcttgcttcacttattcacaagatgagaaagacacacaagaatttattatagaaaagtataaagaaaatcaattaaaaatatataccccttcatttatttttttttcgaataatatttttagagttgatgctgagttttttgccaacagaaaattatcagaaaaagagtttgataatatttttatttatggtgcggatattgaagttggaattaaaaaaactcaaattatttctttcatagaatctattgacattagagacattacaaaagtttcgacaactaaacaaaatgacaatgaatttcttatctcaatttatctttcaggaaaatacccttcattaagatctgttcataatagtttgaatggtgaggtaaaaagaaggaaatatatttcaaaaatgaaaattcaaattggatctaacagagaggtagctattcaattgaaaaaagctattattcatttaggaaagttaagacaaatgaatattaaagatggtgatttattttaaaataaaaaaaaatatgaaactcaaatttaaaattataacaatactttcagctttcttattagttagctgttttacgacacaatctacatctaaacaggtaaaagaacaagaatttaaagaaatgatggattcttgggtaggttcttctaaaaaagaattattaatgagctgggggagtgctgaatctgttacttcagatggtgataatggcgaaatcattacatttaacgtgctgaaaagagcttatttaggagaattaggatatgttactgtaaatcataaatatatgttttatattaatcctcaaaaaaaagtttatcattggaactatagcaggaatggaaggcaaggttattaatttgtgtaataatctgtaatcaaaaatgaaatgaaaaaacacctattatcaatagtaatattaataacaacgataaattacgcacaactaaagccattaaaagatgctgatttatttacaaaagaagtaactaaaaacacctcttttaaagttgataagtttgaatttaaaatagaatggaaagataaattaagtcattcccctaatttaggatatttagggggtattgaatctttaaaaatatattcaaaaggtagattaataaatgattttatatctatagaagatgaggttggactacaaaaatttataattgatttttacgactttaatttagatggaacaatagattttagaattcgtagagagtgtggaggtagttgttattatagttactatttatctaacataaaactaaataagtttgaaaatccaaaagaatgggattatatacgtgttagagctttagattttaaaaataaattgttggcagaccaagttgtaagcgtaaatgaaggagcatatgtttataaagttaaaggaaaccgattgattaaacagctaaaagaaaaataatgctttcataaattttttattcttgacttttattagttgttataaagaaggtgaattaaattttgtcggatagtaaaagtagtcaagtattctttaatttaataatgagttacggtgaattggtttttttgatgtaaaaatatcaggagaatcaacagcttataaatcttggtgtaaaaatataaaagatgattaaggttactagatttgaaaaagacggagaaacaatatgggtaaaagatagtaaattctctggatgtattaaaactacatcagaatcatttgaccctgaaacaggttttatgaatgtggatacacatataaactgggttaaaggtaactcagaagaagtcgttgaaagaatgattacaagtgtatcaaaaatgattgaaactggtaaattaataccttatagagtattctctgaaacacctatgtacgagggacaagaccaagatagaaaagtcaatgaagacggttctcttggtgaagaaatgggtagatattcacaatctaaacttggtttacctgaaaaagcattaactatgaatagaactttcatcacgcccgcatttgcaaaagttaatgctgatgcgattagttgtacagttgcaactttttctttaaaagatgatacatctttattaaaggaaacagaagtttataaagggactattcataaaaacaacaatgtagatcattatagtcaatattttgaagaagaaaaaaaagagagacaaagaaaggtagaagatgaaaaaagtttttcttgggttaagtcgatattttttttatttggattactctttgttttaatgatattttttggagctttaaatggagttggtgaagtattgtcaagtattccttggtatttaaatatagttctaacaataggtggggtctatgttattgcaaaaattatagggtaaaaaaaataattttttcaaaatttttcaaaactttttttatcaaaagagcaagctaacctaatacatcaccccctcttccgtttcgtttggggttaccacccctgcacttcacttcaggggtcacacgcttctttagctttggaggtagtctccaagtaaagaataatctttaaaatttaagaaactatggtaaaaattgtaggatttaagacctttgaaagaaaagatgggtcggaattttgtgcattaattgtacaaggaggaattgaagctgttaaaagtaaagaaacaggaaaaacttattttacagcaagaaaagtaaatgttggctgtacttttgacgaggaaatgtgtgaaagtttaataggttcagattttccaggaagtattcaaaaagttgaggtagaggcatatgaatatgtaatagaagagacaggtgaaatgattacgcttacacatagctatgaatatgtaagtgaggaagataacgttgttaaaagcaatgttgtagaaaaagaattagtgttatagctatttttttagttaagatatatttagagagtttacagaaatgtaagctctttttttatgtcttttttttagtgagatacactcattaaatttaattataaacaataatatttaaaattatgcaattacaaaaagcacaaagacagcaagtaaaattaagattaggattgtctggagcatcaggatttggcaagagctattcagcgttattacttgcttatggaattacagaagattggactaaaatagctgttgtcgatacagaaaacaatagtgcgtcactttacagtcatttaggagattttaatgtggtttctttaaatcagccttatagcccagaacgatatattgaagctattaagctttgtgaagaaaatcaaatggaagtaatcattattgatagcattacccacgaatggcagggtaaaggtggttgtttacagatacacgagcaattaggtggtaaatttcaagattgggcgaaattaactccaagacatcaagcttttatagatgccattttacagtctaattgtcacgttataaccactgttagaaagaaaatggactactcaatggatagagattcaagtggcaagacaagggttgtaaagcacggtttaaaggatattaccagagaaggattttcttatgaattgaccgttgattttgaaattattaatgaaaaccatatggctaaggcaactaaagatagaacaggtttgtttatggataagccagagattttaattacaaaaggagttggtagaatgttaattgattggtgtaatcaaggtgtgtctattgcagatgctaaaaaggaaatagcagaatgcacaacagttgaaggtttaagacatttatatcaaaaatatttacctctcaagaaagagttgcacgatactatcttatatcgtaagcaagagattgaatcagtaaaatctatggtagtagaaagaaaagaaattattcataacaacaaaatgtcagaaaatggaactcgtagctaattataacccaatagaaatgatacaagaagtgtctcaagttgttcaaaagtcagcaagtaattttataggagccaatacaatagaagtaagtttagaacatattcagaataaatgcattgtccctgtttttgcaaaagataatgaagttactatttcccattatggatttataaactccgttaaagaagtagttgagtctgtctattctgatattaatgtaataacgccctcaataagagcatcacatcaaataaaaggtagaatacctagtgcaattggtaaacctgttaaggagttgttagaacacgaaaaaactatttattatgaacgaatggcttttatgatagaaataccaaataagcaagtagtagttaatgatcaaatattaaaccttacaattggaggagttagagcatataatcaagaaaatttattttctaaaaaatcaattgagaaatttaaggtttttattggttttaaaaatacagtatgtacaaatttgtgcatcgctactgatggattgcaatcagaaataagagtaagtagtattactgaattaaaggaaggtgtacttaatttaatacagggttataaccaagaagcgcatttaggtgttatggagagaatgagtaagtttcagttaagtgaacaggagtttgctcatttattaggaaaaatgagaatgtatcattttttaagtaaagaggaaagaaaaactaagtttcctttacagcttacagattctcaaataggtataataactaaaaattattttacagataagaattttaaaagagcaagtaataagatgataaatctttggcaggtttataatttgtttacggaggcaaacaagtcgtcttacattgatactaatttagaaagaaatgtcagtgcgtatgagtttatccaaatgctaggtttttctagagaaaataaacagaataatttctttaaccatataattatatagcttttttattaataaagtgtaattctaaactgatgaaatgaatgataaagaattagcagaatttttaaaatatatttctccttttgaaatttatatagttaatagagaaaatgaattagagtgtttaaaatgtccttttgaggttgttttaaaagaagatatttcttttttaagaaagcatcaagtagtatttgtagagttggtaaaagttacaagggatttgaaaactgtttttattataagaggaaaagctttttttgcatttcatttttacattccagatataaataaaagatagaggttttatattgtattttccatattactaattgtgatatgttttgagactgattttaactctttaaactaaaatcttctgaaaaggttatggattcagtataagtttgttggggatagttgttgaattgtcctcaacaaaattgctgaaaaaataaagagttttatttttttaaacacattaatgaaaaataatttagtttttacttgtgtattcgtaaaaaaagttgtatattaccaaagatggtgagataccgttgattaagacttcaaaaaaataaaaaaactacacaaaaaataaaaaaactctaagacaataactaaaaatctgtcttttatcatattatatcaaaccatacgctagtcaaatagagtatggtttttttgtatgttgcatcctcatcatttataaaaaatataaatagcaccttgttgcagggtgtagggttagtttgagtaacaaactagtctgactgtactgacttaaaaatatatatagttagtattaaaatttttgaaatatgaagaaagatttaatggagaaagagaaaagaaaaattaaaattgagatggggtttgatcaaattcaagatttaaaaaatgaaccagaagtaaaggttttatgggaaggtatttctgaaggtacatttggtttattatgtggagttgcaaaaacaggtaaaacaacctttgcggaaaatttagcaatatcactttctgttggtagaactgaatattttggaaaaaaaatgaatggagtacctaggaaagttttgtttgtaaatatggaagagagctggaaaattagaggaagaagaaatacaaagcaattaaatgaattatcagttgcagaattagatttgtatagagaaaactatatgactgttcctaaagattttccagagtttttaaataatgaaaatgattgggaatatttacgtgattatatagcagaagcaaatcctgatgtaatatttattgatagtctaacacatatgttttcgggtgagattgaaaaaagtgctaattgtgtaaatttcgttcaaaaatttaagaaatatgtaacttgttttggtaagacagtaattgtaattcatcacaatgtaaaaggaaatgataagccaattgaccaaaataatgtagctggtagtagagtgattttacaatcattccaatttgcctatggttttgcaaatattcctatgggaggtaaatacatgtgccctctaaataataaggaatttggaattgatacaactgaagcgatactctatgatattaaagaggatggatggatagtagccactggagaaaaatgtaataaatataaattatataaagattcttataaaagtgacgggagaacagattctacaaatactgatctaatctataattatatagaaagtatttcaagtcaggtaagtcagactagtttgtatggtaatagaacaactactagaatgttaatgagtgaatttgttgagaacgatagtaggactatgtctaaagatacattacataaaggtttattaaaattagaaaaagagtctaaaattaagagagagaaaaagggggtttatattttaaatagcaaggtagaagatgaaagaaatgacacaaagtaaaagtagtagttttataatatataaggcggaaaatacccaaaatgggtttgtatatgttggagcaacaaaaaagtctattgatgataggaaaaaagaccatttaaaaaagtctaaaaaaggaaaaagctatgcgtttcaaaatgcaatagcaacttacggagcagaagtctttagatgggaacagattgatacagcagtctcaacaaatgaattagctaaaaaagagaaagaatatattttagaatataattcaaaagaacaagggtataattctgatagtggtggtggaatccaaaaaactgtctatcaatatgatatgttaacaggagtattagttaataagtactctaatttaacccttgcaggggctctagttgacttaaataaacaagatttatctagtgtttgcttgagtgtaaataaggtctgtaaaggcttctattggacttatggctgttatgataaattccctttggcaaaagataaaaggaggaaaaaagtagctcaatatactttagaaggaaagcttataaaagagtttaattctgttgcagaagcttcaaagtattctggatgcaataaaacatcaattgcgaaagtctgtagagaagaaaggaaaacctgtggaggttgtttttgggaatatttatagagttaagttaaaaaggaaaggtagtgtaaaagctacctttttttaataaaaaaagtcctaccgaagcaggactaaagattttcatctacggcatatagccttattgtaataagattaaagattagaaattttaatctgtatcaaatatagttaaaaaaaagatgccattgaaaaataaaattattaaatttaatgaaaataaaattgctatataattatgaataaaatacttggactagatctgggcaccaatagtattggttgggcattgattgaaaataacatcatattaggaatggggagtagagtctttcctgaaggtgttgttaacttaggagaaggcgaaggaagagaaacctcaaaaaatgctagcagaacagaagctagaggtgttagacgacaaatctttagaagaaggctacgtaaacgttatttactaaaagaattggcaaaacataacttatgccctatttcacctactttaataaaagattggaatggaacagatatttttaagaatgagctaattatacaatggtttcaattaaatccttatgaattaagagcaaaagcgatacaagaagaaattaccttaatagaactaggtagaatcttttatcatatgattcaaagacgtggttttttaagtaatagcagaagtgctggtgctgacgttaaagaaacaagtacaatttttaaaggtgatgctaaaattggtaaaataggaataagtgatactttaaaaagtattgaacaaaataaaacgctaggctcttttttacactccatacaaccaaaagaaaatgaacctttttctggcgaactagaacgtattagaaatcgatatactactagacaaatgtatattgatgaatttgaaactatttgggagtttcaaaaacaatatcacagtgagttgaactctaatttaaagactatacttggtggtagaaaaaaagataactacaaagaagatggtgttttatttcatcaaagacctttgcgttctcaaaagcatttggttggcttttgttcttttgagcctaaaaagactaaatgtaagttaagcgctataccatttgaattgtttagaatttaccaatgggtaaatacgctttcttatgatgttaacggagttagacaaaaaattacccaagaagaaagaaaaaaaattattgatttattactatctaaagaaaaacccagctttaaagaaattagaaaagctattggtaagttagatggaagttatcaatttaactataaagacgatgataaaatagtaggatcacacactattagtaatttatcaaataaaaaattctttggtaataaatggtttgatttttctgaaaaagaacaagagaacatctggcacatcctttctttctttgatgatagagaaaaattaaaagagtacgccataaagaattggagttttgatgaagaacgtgctgtaaaaatatctaaatttaatttaaaagacggctattctaaccttagtagaaaagctattttaaatattttaccctttttacaaaagggatttatgtacgatgttgccgttggtttagcaggtgttaaaaatacattgtctgtaaattgggaagaacatgaacagtttgtattagataatgtgccagaaatagtacggtctaatttaaaaggaggttatatagaacctcttaaaaatatgcttaagaatgaatttaattgtaatgataaacaattagaaaaattatatcatcatagtagtgcgattgaaacagaaaatattctagacaggcttcctgtaaatttacatgcagatagagaaatacaaaaaattaaaaacccagttgtaattactgctttatttgaaattagaaaattggttaatgaagtaattgatacgtatggtaaacccaacgaaataaaagttgaattagctagagatttaaaagcatctaaatctaaccgtttagaagctagaaaaagacaaaaagatttagaaaaacaaaatgatagagtaaaacttgaattagaaaatttaaatcagcgaagcaaccacattaatattttaaaatataaactatgggaagaatgtaaccacacctgcccttttactggtcaaataattaccataagtcaactttttacaggagaggtacaaatagaacatatttttccttggagcaggtctttaaacgatagctttaacaacaaaacactctgttttgcagatgaaaatagagctaaaggaaacaagacaccctatgaattatacagtgaacaaggagaccaaaaatgggaagctataaaattacaagcattaagttgttttaaaactaaagcgaactatcctaattgctataataaattcaagcattttgtaaagaaaaaacacgatgaagactttatcagccgtcaattaaatgatactaggtatattagtaaagaagcaaaaaactatctttctaaaatatgtagtaacgtattggtagctcctgggcaaatgacagcaacgttaagacatcattggggtttaaatagtatactaaacttagaagacgatacaaaaactagagacgaccacagacaccatgcaatagatgctttagttatggcatgttctaccagaagtcatctacaagagttaagtaaaagaaacaggtataacaaaaattatgatttaaaagattttcccgatccttggcaaaattttagacaagatgcagaaaacgctgtagcacaaattttagtatctcataaaaagagtaaaagcctattaaccgttagaacccataaaacgataaagaaaggagttgagcataaaaatattggggttgctgcaagaggacaattacataaagaatctgtttatggtttaagaaaagcacctaattctaataaagcatttcatataaggaaacctttagaaagtttaactacagagaagcaattagaaaagattgttgacgatagtattcgattattaattttaaaaagaataaatattattggagggtttataaaagggaaaataccaaaagaaactttttttgtagttgatgagaacggaataaagcaaccccaaatatttttacctaatagaaatggtaaccctgtaccaataaaaaaagtaagaataagagaaaatataggaggggcagaaaaactaaaagagaacacaaaccaatatgtaaacccaagaagtaatcatcatgtaattgtttatgaggattctaatggaggattgaaagatgatgtagttactttttggacagctgtagaacgtaaaagacaaggacaagatgtttttaaacttccaaatgatggtgagaaaattgtttctacacttcaaattaatgatatgtttttattaggattgaatgatgatgacattattaccctaacatcaaaagaattaaaaaaacatctttttaaagttcaaacattatcatcttctttttacgaattcagattaagtacagattcaactcaaaataaaaatacaaattctactgtctttagaagaattcaaagttttggaatgggaaaaacagggtggaaagcatttaatccaattaaagtaaaacttaatagtattggtgaagtgaaaataatttaaattttaaaaagttctttgacatgattaaagattagaaaaaacgatattcttcaatttcttttttcttatctatcatgtgttgtggtttgattaaagattagaaaaaacgatattatctatttatattatacaacttaaacccatgttgtggtttgattaaagattagaaaaaacgatattttcttttgtagtagtagtttcatcaactcgttgtggtttgattaaagattagaaaaaacgatatttatttaattgcaacgcctggtaatatggtagttgtggtttgattaaagattagaaaaaacgatatttcgtttgcagacttagcggctgctactagtgttgtggtttgattaaagattagaaaaaacgatattgcattgattaaaacggcaattcagaatgcgttgtggtttgattaaagattagaaaaaacgatatttcatattttattttcgacaaatctacaaccgttgtggtttgattaaagattagaaaaaacgatatttagaagtgtgtaaatatattgctgtataatgttgtggtttgattaaagattagaaaaaacgatattg

SEQ ID NO: 2668 - DNA, 12152 bp, synthetic construct
  source 1..12152: mol_type = other DNA
  misc_feature 1..12152: note = Synthetic
taatcgataaatattttatttggatttctaataaaaaggacgttgacgcagtgcgaaaaattgacaacagcattttagaaaccactaaaaaatgttccgatttattgaaaagggtggaggaacattcaacgcatttagcaggtttaatggaagacccttttaaatatgattcccatcaatttagaactgaacatcagcaattggaagatgacgtcacaaattttgtgaaagtctttagaaataacagaaaagatgtttttgaagtgacctcacttgtagttgagagcgatgattttattcgccagtttgtggtggaatgaaaccgtttttatgcaggtataacttgtcttttattgttttaggatgttgattttttagtggtattggctaattagataaattataaaattacaattttcatatttcaaaagcactttatgccataatgattggttatgcgatattggcaagttgttagcgtatttttttgcacagaaagtaaaaaaaataatcccaattaatgtgttgcggaatgaataataagtaaaaatataatgagaaaaatcattaaaaatgaatattttacaagcactattagcggagatttcacaactcacaaaaatcatagaaaccaattacccggaactctatcaatttttggatgaaaatcccatgacgattccttcggaaaagaatccatccattgataaaaaaatattgttggagtatttggaaagtttaaagcaactgttgaaacatcacctggaaacaagaaaaaattaaataacaccaatttaaaacaaatatcatgggagaaatagccacatcaaaccgacaaattacgttgtattacagctcagattccgtaagggccaagcaagctttggcttatgcaaaagcggaaggattggcaatacaagccatagatattttaaaaacaccttttacggggacacaaattgcagaattggcaaaacgcttgggaattgaagttaaagatttaataaatcagcagcatccatcttattcttcaaaatttgaaccgcatgaattgtccacagatgattgggttaaaatgatacagcacaatccggaaattatgaagcaacccattgctttgcatggagaaaacactattttggtggaaactccgtcggatattttaaaaatttagggcttaatttttactggtgtcactttttgcgttagcgattgcagtgaaaagcccgcagtcacgcttttgggcgtgacgaggacttgcaacgaaaagcgcgacccttgcggtaacgcccaccaaaaaaggcaggcaggtcaaaatatttttaaatgaaatgaattgtgttcattgaatttaaccaaatttagttgatttgaaatgcgctttcgattttccaatactgagatatatcatttttaggattgtaaattttgaataactttaataaataatgaggattctcatatattaaagcgttttttcaaaaaaatggaacctaaagaaaaagaaaataagggtaaatcttattcgaaagaaaaaaaaccaatgactttgccggaaggttacagacccaattggctctattttttgtttcttttttttgttattttcacaatattcaattggccttcttcaaaaccaaaggaaattagttggctttcctttgaaaaaaatatgttaagcgcacatgacgttgccaaaattgtggtggtaaacaaagaatttgcagaaatttatattaaggaagacaggcttaaagatcccaaataccaagatatttcgaaaggctcatttaaaactgaattagggccgcattatacaattcaaataggatcggtagagagttttgaaagcaaattacagcaagctcagcaaaattttttgcatgaggagaaggttgaaattgcctatcagaacagaaccaactggacaatggtactctcttggattttgccttttgggttgcttattttattttggatgtttatgttgtggggattgggacgaagcggcggaataggcggctctgtttttaattttgggaaatctacggcgaaattatttgatagggatgtaaaaagtaccgtcacttttaaggatgttgccggcttaaaagaggccaaaagcgaagtggaagaaattgtcgactttttaaaaaatcctaaaacttataccaaattgggcgctaaaattccgaaaggcgtgatgctcgttggcccaacaggaaccggaaaaacattgatggcaaaagccgttgccggcgaagcgcaagttccctttttctccttgtcgggttcagaatttgtggaaatgtttgtgggcgttggtgcatctcgcgtgcgagatttgtttaagcaggcaaaagaaaaagcgccgagcattatttttattgatgaaattgatgccattggccgttcacgaagcaaagcaaacgcgtttcaggctaacgatgaaagggaaaataccctaaaccagttgttaacggaattggacggatttggcaccaacaccggcgttattgtgcttgctgcgaccaaccgtgccgatattttggacaaagctttgttacgtcctggccgtttcgaccgccatatttatttggaattgcccaccaaacaagaacgcattgaaatatttgaagtccacctgcaacccataaaaatggcaaaagacgttgacgtaaaattattggcttccttaagtccgggattttcaggcgccgatatcgcaaatatttgcaacgaagccgcgctgattgccgcgcgcaaaaaaaaggaagcagtggaacaagaagattttatggaagccagagaccgcgttgttggcggactggaaagaaaggggaaaattatttcgcccaaagaaaaagaaattgtggcttatcatgaagctggccatgccgtggcaagctggtttttaaaaaatgtggatgcgttggtaaaagtttccattattccaagaggaaaatcgttgggttcagcatggtacttgccggaggaacaccaaattgttaccgaatctaaatttttagatcaaatttgcgcctctttgggcggacgggcggcagaggaaattattttcaatgaagtgtcatcgggcgctttggatgatttggaaaaagtgaccaaacaagcctacaatatggtagcgtattatgggttgaacgataaaattggccctatgagtttttatgattccacaggtgaaaatgaacgctttttgggaaaaccttacagcgaaaatatggcgatgattattgacaaggaagtgcaggcgctgttggtttcatcttacaataaaaccttagaattgctattgaagcaccaaagcaaattggaaagtttggggcaattgctgttgaaaaaagaagtagtgtatttggaagatcttgaaaaaatattgggaaaacgcaccaaagaaattccggcgcacgcgaaggattaaaaagccccctagcccccgaaggaggaattaatgttggaatcgttaaaaaattaagagcctgaagtaggaagaccgaagacggaagttttaattgtgaatatgttattatcatcaatcaaatttcctttcctttggaaagggttggggataggattaaaagcattcttataaaataaatttaaaaccactaattatggaacgagatgtcatttttaattcggatttacattttgagcacaaacaatggagacgcgagctcctgttttgggaagatgaactaaaatccctaaataaaaggttgagcgagttggtgttgcggtggacaaacaaagagatgttggcgcaattggagcgttttcaaaatcggtttgtcattcaggaaaatgtgatagatgagttacaggagcttattaatttacatgaaaccaatatcgctgaacataccaaaaggggggaggacgtgctcaatcaacagcttgttaaaaagcatattgaatttagaaaccaaatggatacacaaagaattttatacagcgaccttaaaaaagaattcttccattttttgtcgaaatatatgtagataaaagtcagaagtcagaagtcagaagacggaagacggaagacggaagactcaagttttaaacaattagcaaataacgattaacatataacgcataagttataaccaaaaattaaattcatttccgtgtacgtaaattttatcatacaaacagaaaatggttcgctgacggaatttgattttctgataagaatgttggtgactgccggcattggttttgtgttgggtttagagcgagagtattcccaacattcagaaaaaggggaggtgtttgcgggtttacgcacttttacgctcgttgccttactgggttttttaacggcttatttagggactgcttttacgtattggatttttattgcgggttttttaggcgttgtgggcatcgtagccatttcttattgggtaacttcccatgaaggcgatattggaagcaccacagagtttgcgattatttttacttttttgctgggcggtcttgtgtttgtaggcagcattaatcttagtttggcgcttacggtaattactttggttttgctttcgcttaaaattacctttagaactatgattggccaacttacgcaaaaagaaatctatgcttttgtgcgctttgtggtaatcgctcttttgattttgccatttttgccaaacaattattatgggcctttcaatatcattaacccaagggaagtgggctggattattgtgctggtttcaggaattggatttattggctatattttaatgaagtttttgggaaccgaccgaggtattttgttaaccagtgttttgggaggtttggtatcgagcacgctagttacttttacgttttcaaaaaaaagcaaagaaacgcccgaactctctaaaaattatgcagtaggcatttttgcggcagccaccattatggtcatcagaatgtttttgctggtttatatttttaacaaagccatgcttgttgggttaataattcctttattaattgtgcttttaacggccttttgcatcgccttgtttttttacaatagccattttggaaaacctcaaacaatagctaaaattgtattgggcgatccgctcaatattaaaaacgcggtattttttggtattttttatatgggaattttgttgttggtaagttatgccaatgatgtttacggcacaaggggaatttatgtgtcaagcgccataagcgcattaaccgatattgatgccatcgctatttcagtttctaaactgggcggtgccaccatggatttattaattgcccaaaatgccattttgattgccgcattgtctaataccattgtgaaaataggcatcgccgtttttacgggtagccaacaattgaaaaaatatgtgttggtaggttacggttttatttttttggcaggaattatagggtttttggtgctgaatttgtaattcggcagggacaggtcacgcgacctgtacgtgcatgattttggcaggaatcacggattcatttcaaaagttgggcaacctatttcaaaagttgggcaacttttaaagttattaaggcattttattttaaaccttaaaaagagtgacctgtttttgccataccttcttaaaaaaaaagtccgcttttcgaagtctcccgacttcgaaggatcttatatgaccttcgttttttgccaaaattattccaaaaaaaagtccgcttttcgaagtctcccgacttcgaaggatcttattacgaacctccatttttttgccaaaattattccaaaaaaaagtcccaccgaagcaggactaaagactttcatctacggcatatagccttattgtgataagattaaagattagagtaattttttcacaagtcaaacttacaaaataattgtaagaaaaaacaaactaagccgcaattttttctcattataaataagcttcataacttctttgcctttattattttactatctttaaaattcgaaattaaataattgctaattacacgaacattatgacaaaaattttaggactggatttgggcaccaactctattggttgggctattgtggatgatacacaaaataaaattttagggattggaagtcggatatttcctatgggtgtagaaaatcttggtgacggagaaggaagggaaatatcaaaaaacgcatcaagaactggcgcaagaggcgtaaggaggcaattatttagaagaagattaagaaaaaagattttattaaaagcgctttctaatgcaaaaatgtgtcctcttcaaccggaagattttgaagaatggaaaaatacagatcaatttcctgaaagcaaacttaaaagttggtttgccataaatccatacgaattaaggaataagtccttaaatgaagaaatttctttggaagaaatcggaagaatattttatcatttaatacagcgaagaggttttttgagtaatagcagaagtgcaggaaaggatgatggagcaatttataaaggtaaaccaaaagaagggaaaattggtattgatgaaacgcgggaaagcattaagggaaaaacgttaggttcttatctttttgaaatttatcctaaagagaatgaaccattctcaaatgatactgagcgaattagaaacagatatacaacaagacaaatgtatgttgatgaatttgaattgatttgggaaaaacaggttcaatatcattctgaattatctcctgagttaaaaactatttttggtggcagaaaaagtgatggctataatgaagatggtattatatttcatcaacgtccgcttcggtctcaaaaacatttggttggtaattgttcatttgagccaacaaaaactaaatgcccaataagtgcaattccatttgagttgttccgtatttatcaatgggtaaatactgttgaatataatggcaacaaactgaatgaaattgaaagaataaagatgattgatgttcttttgcaaagagaaaaaccgtcatttaaagatttaagaaaagcaatcggtaaaataagtgcagaatttaagtttaattacaaggatgatgataagattttgggaacttataccatttcaaatctttccagcaaaaaattctttggaaataaatggtttgattttactgaaaaagaaaaggaagatatttggcacgtattgtatttttttgacagtaaagataaagttaaagaatatgcgattaataattggagctttaatgaagagcaagcaattgcgatttcaaaattcaatttaaaagatggatattcaaatttaagcagaaaagctattaataacatatttccatttttgaaaacgggatttgtatatgatattgctgttgttttgggaggcgtaaaaaatatttttggggaagactgggagcaattggaaaaaaataataaggactttattattgataatattcccgcaattgttagaactaaaattacaggcggttttattgagacaataaaagaagtccttaaaaaggaatataattttacggacacacaacttaaaaaattataccatcattctgcaactatcgaaactaaaacgattttaaaaagtcttccggtagataataatgcagacaaaagtattcaatcaattaaaaaccctattgtaattacagcattatttgaagttcgtaaattggtgaatgaattaattgagcaatatggaaaattagacgaaataaaggttgaaatggctcgtgacttaaaggcttctaaatcacaaagaaataatgtaagaaatgagcaaaaacgacttgaaagagaaaatgatagggtaaaagcaagaattgaggaggaaggacaacgtgtaactcatgaaagtttactgaaatataaattgtgggaagagtgcaaaaaaacgtgtccttatacaggtgcagcgatcccgcttcataaattatttacaggagaaattcagattgagcatatacatccttggagtcgctcattaaatgacagttttgcgaataaaacactttgttatgctgatgaaaatcggttaaaaggtgataaaactccttttgaattttatggaaatgatgaagcgaattggtcggcaattaaggaacgggctttaaagttattttcggatactaaagaatatcctaaatcatatcaaaagtttaaaaggtttgtgcaacaaaaatttgatgatgatttttcttcaagacaattaaacgacacaagatttataagtaaagaagcaaaaaattatttatcgcaaatttgtgaaaaggtaacagttgcacctggacaaatgactgcaaatctacgtcaaaaatggggcttaaattttattttaaatgaagatgatggtgaaaaaacaagagaagatcatcggcatcatgctgttgacgccttagttatggcttgcagtaaaacaagctatttacaagaattatcaaaatggaataggtataaccgtaattacgaattaaaaaattttccaatgccttgggaaggctttaatagtgatgcagaaaacatgattcataaaatattggtttcacataaaaaggttagcaatacaattactttaagaaaccacaccacaaaaaagaatggtgaaatttataaaaatataggtgtagcagctagagggcagttgcataaagaatttgtatatggccaaagaatagcgccgtttggtgcagaggcattccatattagaaagcccattgatacgttagttactgaaaaacaagtgaataaagttgttgatgaagccataaaaaatttaattttaaaacaggtgaatgcgttgggaggttatgtaaagggaaatgtacctgacaatgttttttttgtggctgatgaaaatggaattaaacaaccacaaatatttttgcccaataaaaacggaaaaccagtacctgttttaaaagtgcgaataaaagaaaatattggaggtgctgaacaattaaaagataacaccaaccaatgggtaaacccaagaaataaccatcacgttttaatttataaagatattaaagatgatttaaatgaagaagttgttactttttggactgctgttgagcgtaaaaggcaaaaacaggaggtttatcaattacctataaatggaaaagaaattgtaaccgctttgcatattaatgacatgtttttgttgggtttaaatgatgatgaaattgattgggaaaaccttaattatagtgttttaaaggaacatttgtatagggtgcagaaattcacatctggagattattattttagaattaacaaaacatcatcaattaagaattcttctgaaaagcaacaaattaatagttttggtttaggaaaaaatggatggttaacacacaatccaattaaagttaaaatttctgtttcaggaaaaataaaaaaagtgtagcgtttgtcattccgacgacaggaggaatcgcacgccatagtaaacaataaggaatgatagaattttcagaaggaatatatacattttatgtttatattattacaaacagttaccgtacaactttttatattgggatgaccaataacatggggcgacgtttaatggagcataaagagaatattgatattggaaaaagcacttttgccgctaaatataatttaaaatatttggtatattatcaaaagtttggttgggtacgacaggctattgctcgtgaaaaggaactaaaaggatggagaagagaaaaaaaattggatttgatacggggatttaatccaacttttaggactttgaattacatttttgggcaaaagatagaatagtaataagatatatgatagaatcaagttctttgaaatactgagattaaaaacataacttggcagttgagtgggtgaggcatttcacagttgataaacgtaatgtgattcctcctttgtcggaatgacaaggtaattggtttattttttcaatggtacttttgtcatgccgagtgggcgaggcaacacgcgagtgttaagcacaatgcgattcctcctttgtcggaatgacaaaacaataatcttaaacagccaaaccacaacgaaaaatcgacctttcgatttttgttgcgacgatttttcgttgtggtttgattaaagattagagaatacgatattagaattagtagtagattttacccaccacagttgtggtttgattaaagattagagaatacgatattctgacaagatagaccattctacattgggtgttgtggtttgattaaagattagagaatacgatatttaacccagattgagcaaaaagggtatagctgttgtggtttgattaaagattagagaatacgatattatttttcagcatcataagatgttccgctgcgttgtggtttgattaaagattagagaatacgatattaaagtggcataagtaccatttattgtttctgttgtggtttgattaaagattagagaatacgatatttgttggcgcatatttagataatattcgatatgttgtggtttgattaaagattagagaatacgatattcaatatgttgatgtgccgtttgatttacaggttgtggtttgattaaagattagagaatacgatattattcagcaggtttaaaatttttgtctgtatgttgtggtttgattaaagattagagaatacgatattcctttaaaagcaactaacaccgcgcaaccttgttgtggtttgattaaagattagagaatacgatattacggtgcattcacattgcaaaacaattcgcgttgtggtttgattaaagattagagaatacgatattaacggatttaaaatagattttaacggactagttgtggtttgattaaagattagagaatacgatattgaaagagtaagggcaaatcgcccaaacatagttgtggtttgattaaagattagagaatacgatattaaaaaggcgtatcaattaaagatgaagtaagttgtggtttgattaaagattagagaatacgatattaaggaattaaacgaattgaagccaacgacgttgtggtttgattaaagattagagaatacgatatttcgccccgatcgtctccgtcggggcggattgttgtggtttgattaaagattagagaatacgatattcgtaaggagctaagtgatcgcaggctccagttgtggtttgattaaagattagagaatacgatattattacgcatttaattgcgcagggctttattgttgtggtttgattaaagattagagaatacgatattttgtcaatatgtcagtatcagtatctttgtgttgtggtttgattaaagattagagaatacgatatttcagtatgtcagtatgtcagtatctttgtgttgtggtttgattaaagattagagaatacgatattgatttagaagagtgggaagtcatagatactgttgtggtttgattaaagattagagaatacgatatttgactaaatgtttatatacacaaccgcaatgttgtggtttgattaaagattagagaatacgatattattgcaaaatttgaaaatcgtattaaatctgttgtggtttgattaaagattagagaatacgatatttacaaacttatttatttaacaaaagacacgttgtggtttgattaaagattagagaatacgatattatttcgaaaaataaaaagacgatggcttttgttgtggtttgattaaagattagagaatacgatattgtcctcagactacaaaataaatcttgaagtgttgtggtttgattaaagattagagaatacgatattaaggattagttttgaaatatatagcgaaacgttgtggtttgattaaagattagagaatacgatattttgatagggatgtttccatttcaccttgatgttgtggtttgattaaagattagagaatacgatattaacacccatttcagaaacatttacttgcagttgtggtttgattaaagattagagaatacgatattttttgccgtttgtttgcgagttttgccatagttgtggtttgattaaagattagagaatacgatattctaccgtaattatgctctaccgacaatacagttgtggtttgattaaagattagagaatacgatattagttggcttgttaccttctaataatcaagaatttaaagagaaatatcgtaaataaaaatgctcctttt

SEQ ID NO: 2669 - DNA, 11036 bp, synthetic construct
  misc_feature 1..11036: note = Synthetic
  source 1..11036: mol_type = other DNA
  variation 10833..10895: note = n is a, c, g, or t
ttttattgtataaatcttgtaatccattgtttggattgatatctaatgatttgaataaatcagcatattttgtatacacatcagcaaagaacgtttcaacgatagctccaaaaataattggatccgaaaccttcatcatcgttgcttttaaatgtgcagaaagcattacgtttttcgctttagcatcagtaatagttgctttagtgaattcttttaaagcatttaagttcataaccgaactatcaataacttcaccagcttttaaatttgagaaatcttttaaaaccgtagttgctccattatctgaattgaaaacgattctgaattttccttctttttcaactgtagtagagttttctgttccgtagaaatcaccagaattcatatgagctacttcagttttgctatctgaagcccaagttcccattctgtgcggattcgcttttgcgtagtttttaactgcttttggtgctcttctgtctgagtttccttcacgtaaaactggatttacagccgaacctaaaactttagcgtattttgctttgatttctttttcagtatcgttttgtggctcttctgggtagtttggaatattgaaaccttgtgattgtaattctgcaatagcttcttttaattgaattactgaagctgaaatgtttggtaattttataatgttagcttctggggtgttagctagttgccctaattcggtaagcgcgtcacctactttttgatcttcttttaagaattctggaaagttagctaaaattcttcccgctaaagaaatatctctcgtttcgatagcgatattagcaggttttgtaaaggcttttacaataggtaaaaacgaatgtgttgccaacataggcgcttcatccgtaatggtatacattattttagactgattagacatggatgttatgtgtttgtttgaatataatttgtaaaatctgccaaatataggaaatttgaaagaaataatggggcgattttgcttaaatcttgaataaaattcaataaaaaaagccacaacattgttgcggctttttatacttgagaaagtacaaattagtttttgtatcttctttctttgatttttgcttttttaccagtaagatctctaaagtagaagatacgagctctacgtactttacctctttggttcacttcaattttttgtaaagctggcatgtttactgggaagatacgctcaacaccaatagcacctgacattttacgaattgtaaaagtttcagtagctcctgcgcctcttctttggattacaactcctttgaagaactgagttctagttttttcaccctctttaatttcgtagtacacagtgattgtatcacccgcaccaaactcaggaaaatctttttttgcaactaattcgttatttacgaaatcaactaaatttgacatagttttaattataaatgtttgattcaaagcaacatacacgtctatcgccagaggttggttcaaagtgggtgcaaatttatgaaataattttaataattaacaattaataattgataattttctttcaaatgtcaattttactcttccagcaaatcagggcgtctgtttttggtatgttcatacgccatttcttctctccatttttcaatttttccgaagttgccactcaacaatacttcaggaacttttaatcctttgtattcggcaggacgagtataaataggaggtgataacaaattgtcttgaaaactatccgtcaaagccgaagtttcatcacttaaaacacccggaattaatcggataatggcatcacaaaatacgatagcaccaatttcgccaccacttaatacataatcaccaatcgaaatttcacgcgtaatgtgcatatcgcgaacgcgttggtcaacacctttataatgtccgcacaaaatcatgatgttttcgtacatcgaaatggaattggccattttttgatttagggtttcaccatcaggcgtcatgtaaatgatttcgtcgtaggatctttcgctttttagtttcgaaatacaatcgtcgataggttgcaccatcattaccataccagcgccaccaccaaactgataatcgtctacacttcgttgtttatttgtagtgtaatctcttaagttgtgaaaatggacttcgaccaatcctttctgaatggcgcgtttcatgatggaagcctcaaatggacttcgcattaattcgggtaaaacggtaataatatcaattcgcatgctgcaaagataggagtttattttttagttgccgaaagcgaatacaccattggaattttgttttccaagtgcttgattcggaatttatttggttcaaattcttcggtttgattgaaacaattgtaaggagaataatcgaattcgttaaaacaattaattaccaatccattttgaatcaaagcgtttaagacttctgaaattggatgattccaagtgatggtttttgcatttagaggtgcttctttatcagcgtaagttccagattcttcttctaaaataggttcgacattgaaataattatagaaaacatctttaaaatcattgtcaaacatccaaactactgggtgaaattcagtaaagacaaattttccatcaggttttaagaaatgcgaaattatttttgcccatttgtctaaatcgggaaaccaaccaattgtgccataactggtaaaaacaatatcgaatttttcgtctaaatgatttggtaaatcataaatatcacaacaaatgaaagtcgcgtctaaattcaatttattgttgatttctttcgctttttcaattgccttgtcggataaatcgattccggtagctttggcgcccattctggctaatgtcatagtatcttgaccaaaatgacattgtaagtgcaatatttttttgtttgtaacatcaccaagtaaatccagttcaatcgaatttaaggttgattttccttttagaaaaccttccatgtcatagaaatcagagtttacatgaacctctactttattattccaagtttgtttgttgatatttaggtaatcagtagcttccattcgaattggtatttgtttatcaaaactaccaattaattttgtaattttgcactttcaaatttaaaaataaaagcatggaaaacggaatatacgctaaattcaatacttcaaaaggtactattttagcaaaattaacgcacgatttaacaccaggaacggttggaaatttcgtaggattagcagaaggtcaattagaaaattcagctcgtccgatgggaaagccatattatgacggattaaaatttcaccgtgtaattcctgattttatgatacaaggtggatgtccacaagggcaaggaacgggtggtcctggttacaactttgatgatgagtttcacccaactttacgtcacgatggacctggagttttatcgatggctaatgctggacctggaactaatggttctcaattcttcattacacatatagaaacggcttggttagacggaaaacacactgtttttggtcacgttgttgaaggacaagatgtagtggatgctattgcacaaggagatacaattgattcattagaaattgtaagagtaggagaagaagctcaaaaatggaatgctatcgaagcgttcagaacatttgaaggttcaagagagaaaagaattgctgagcaaaaaaaaatggcagaggaagctttggaaaaattagccgctggttttcaaaagactgaaagtggtttacgttaccaaatcatccaaaaaggaactggtaaacaagctgaaaaaggtaaaaaagtatcagttcactatcaaggagcattagaaaatggacaagtttttgattcttcatacaaaagaaaacaaccaattgacttcactttaggtgttggacaagttatcgaaggttgggacgaaggtattgctttattgaaagtgggagacaaagcacgttttgtaattccatcttatttaggatacggttcaagaggtgctggaggcgtaattccaccagatgcaactttagtttttgatgtggaattaatggatgtgaaataattttcaggacaggtcgcgacctgtctgtactttaataagatagattttaaaatttgaaatcctaagactttgtcttgggattttttgttttatgcctttgccaaagtattcttaatatattaatttaaattaatataaagttactatatagttgctataaacttattataaaatagttatatttgttataaattattttattatggcaaaagtttcagggatagttcagattgagggaacattaatggggattactttttataaaagaaaaggagtttgggtagcacgcaaagcaggtgggggatttaatggtagggctattaagacaaaagattcaatggttagggttcgtgaaaatggtagcgagtttggtcgttgtatgaaaagtgttcaactttttaaaaaggctttgtttccgttattggttttggtaaaagatactgatcgtcatgcacgaattgttagtttatttaccaaaattaagaacagcgatgtggtttctgagagaggttctaggagtgtagctgtaggattacaacagctatcgggtagggagttgttgacgaattatttgttgactaaagggaaagatttggcttctcttttttctaagggttttaaatttgaatggaattctggagttactatttatgatcttgaatcgaaaagtttattttttcctaaaggggcacgttttattgaaattcagttgatgtatgctaaaattgattttgagaatcaacaatatgaaattagtgattgtattaggaagataattgggaaggattttcaaggtgatttgctattgcctaagcctgattttaattttgaaatgaatggtgttttagtggcttgtgtaagtatgcgatatatgcaggaagttaataacgaattgcatccattattagagcaacaacatagtgttattcagattttgggtgttttgtgagggcagattgttatttattttttctgtgataaattggatttaataaattaaatcaaagggggacaggtcgcgacctgtccgtacggaaaaaaaaagtcccaccgaagcaggactaaaggttttcacctacggcatatagccttattgtgataagattaaagatttgaaagtttaatctgttacaaatataataaaaaacttttttagttagtttacagatttccgtatttgtagtaattttctttttcttatatttatgaattgattttaaagcagatagttatggcgagaatattaggattagatttagggacaaactcgattgggtgggcattgattgatgatgctcaaaataaaattttaggtattgggagtagaatatttccaatgggtgttgaaaatttaggtgagggagaaggaagagaaatgtctaaaaatgctggaagaactggagcaagaggtgttcgtcgtcaattttttagacgacgtttgagaaagaaaattttgttaaaagcactttcagaaaataaaatgtgtccgatggttgttgcggattttgaagattggaaaaaaactaaagagtttccatcagacaaactagcgaattggtttgctttaaatccttatgaattacgtcagaaagcattaaatgaaaaattatctttagaagaaataggtagaattttttatcacttaattcaaagacgcgggtttttaagtaatagtagaaaaggaggaacagatgatggagctatttttaaaggaaatccaaaagaaggtaaaattggaattactgaaacgcaagaaagtattcaaggtaaaacacttggctcttatttatttgaaatttatcccaaagaaaatcaaccttttcaagatggtttggaacgaattcgaaaccgatatacaacccgaaaaatgtatgtagatgagtttgaattgatttggaataaacaatcacagtttcattctcaacttactaacgaattaaaaaccttatttggtggaagaaaattggacggttacaaagaagacgggatattatttcatcaacgtccattacgttcgcaaaaacatttggttggaaattgttcttttgaacctaacaaaacgaaatgtccaattagcgccattccatttgagcaatttagagtttggcaatgggtgaataccgtggaatataatggaaagaaaatttctcaagaagaaaaagaaaagatagttgagtttttatatgctaatgaaaaacctgattttaagaaaattagaaaagctattggtaaagaaagtgcagaattcaaattcaattataaagatgacgataagattgttgggactcacacaatttctaacttatccaataaaaaatattttggtaaaaaatggtttgagttttctgagaaggagcaagaagatatttggcatgtgctgtatttcttcgacagtaaatcgaatctaaaagaatatgctattaaaaattggaattttactgaagaacaagcagaatctattgcaaaattcaatcttaaagatggttattctagtttgagtagaaaagcgatttcaaatattttaccatttttaaaattaggttttacctatgacgttgcggttgtacttggtggaattaaaaatgtttttggttctgattgggaaaaattatcagacgaaaaaagaaatttcttttatgataatgtttacgaaattattcgctctaaaaataaaggtggttttatagatattataaaagatattcttcgaaatgattataacatttcagaccatcaattgcgaaaattataccatcattctgcagctattgaagtttctgaactattagaaaaattgcctttaggaagtgaagctgataaggaaattcaacaaattaaaaacccaatcgtaatcacagccttgtttgagttgcgaaaattagtcaatgaattgattgatgaacacggtaaaatagatgaaataaaagtagagatggctcgtgatttaaaagtttcaaaatcagaacgctacaaaacacgaagaaaccaacaacgtttagaacgtgaaaacgatagagtaaaagccgaagtattaaaatacacaaatttatcgcacgataacattttaaaattcaaactttgggaagaatgtaaacgaacttgtccttatacaggtttatcaattcctatcaatgaattgtttaccaacaaatggcaaatagaacacattcatccgtggagtaaatcgttaaatgatagtttttctaacaaaaccttgtgtttaggaacagaaaatataaaaaaaggaaacaaaacaccttttgaattttacggaagtgacgaagccaattggtcagccattaaagagcgtgccttgaaattattttctgatactaaagaatatccaaatgcctatcaaaaattcaaacgatttgtacaacaaaaatttgatgatgatttttcttctcgacaattaaacgatacccgttatatcagtaaagaagcaaaaaattatttatcaaaagtgtgtaaaaatgtgatggtttctcctggacaagccacttcaaatttgcgacaaaaatggggattgaaccatattttgaatgacgaaaatgctaaaatacgtgaagatcatcgtcatcatgctattgatgccttggttatggcctataccaaactttcgtatgtgcaagaattatcaaaatggaaccgatacaaccgaacgtatgatttaaaacaatttccattaccttgggaaacctttaattatgacgccgaaaaagctgtagaaaaaatattgatttcgcataaaaaagtttcaaacgatataaccattcgctataaaaccgttgaaaaaaatggtaaaaaacacaccaataaaggcgtagctgctcgtgggcaattgcataaagaaacggtatttggaaaacgaacttttaatggagaagaagcttttcacgttagaaaacctattgaaagtttagaaactgccaaacaaatagataaagtggttgatgaaaccacaagattattaattttaaaaagagtaaatgaattaggtggttttgtgaaagataaagtgccagccaatactttttttgttgcagatgaaaacggagttaagcaaccacaaattttcttacctaataaaaatagagctccagttccaattttaaaagtaagaataaaagaaaatattggtggagcagaaaaactcaaagacaagttaaatcaatgggtaaacccaagaaataatcatcacgtattaatttacaaagatgaaaaaggaaacctaaaagaagaagtagttgctttttggacagtggtagaacgaaaaagaacaggacaatctgcttatcaattaccaatagatggaaaagaaattgtaaccacattacatatcaacgatatgtttttattaggattaaacgaagatgaaatcaattgggaaaaccctgattatgaaattttaaaagagcacttgtatagagttcagaaatttacatcgggtgattattatcttagaaaagcactcacatcatcaatacaaaatcctgaagaaaaacaacaaattaatagttttggttttggtaaaaatggatggtctacacataatccaataaaagtgaaaattacagtttcaggaaaaatccaaaagttgtagaataattttatttggtgtatatttacaccacttaataaaaatattatggcaagacaaagtatcactttagccaatcaaaatgatgaatggttaaaagaacaagtagctaaagaggaatttactagcaagagcgaagcggtaaattatttgattcaaaaagcaagaagacaagaagagtattttgattttgttagaaataaaattgagaaagctgaaaaaagtggacacagtactttatctaaagagcaacttttagaaaagataaaaagcaaatacaaaaatgaatagttatattctcactaaagatgctgaagaagatttagataggattcatgaatttggtgtttataaatttggaatgcaacaagcggataagtattatgagttgttgtttgatagttttgaaagaatagcaaaaaatccttatatgtttccgacagctgcacacttagataaaaagtataggtattgtgtttgtaaagcagatgttatttattacaaaatactaaatgataatttagttgaaattattacgataataggaagacaagatttttaatagttcattgacataaaactttcaaatttttaaacagctcaaaccacaacggagtttctacgtagtcactcagttgtggtttgattaaagatttgaaaacacgatattaataacccccaatgggcgtacaacactaccgttgtggtttgattaaagatttgaaaacacgatatttgtaacggataagggatttcgttaggtaccgttgtggtttgattaaagatttgaaaacacgatattttcaggaatttgccgataaagtcggagttgttgtggtttgattaaagatttgaaaacacgatatttacttttgaaagctttatcgatgcaggttagttgtggtttgattaaagatttgaaaacacgatattattaaagaatttgccgataaaatagaagtagttgtggtttgattaaagatttgaaaacacgatattacacgtgaacatacttttaatagagcattagttgtggtttgattaaagatttgaaaacacgatattattaacagtggttctatgatgtcggaggacgttgtggtttgattaaagatttgaaaacacgatattttgggttaagggatagctctctactttttagttgtggtttgattaaagatttgaaaacacgatatttaataatttgttgaaataaaccaaccccatgttgtggtttgattaaagatttgaaaacacgatatttcaaaaacttagagggattagaagtgcttgttgtggtttgattaaagatttgaaaacacgatatttataaacatggttttataaatttaggagttgttgtggtttgattaaagatttgaaaacacgatattgaaaatcactatgtaagcacacatagcttgttgtggtttgattaaagatttgaaaacacgatattatatagttattccagttcttgattgtatcagttgtggtttgattaaagatttgaaaacacgatattaagttgataagatttccaccttttcctgatgttgtggtttgattaaagatttgaaaacacgatattttagaatttataatcaacaaaaaacgtcatgttgtggtttgattaaagatttgaaaacacgatattcagccgttggagttctttaacagatgcacagttgtggtttgattaaagatttgaaaacacgatattatattgtttacagcggagacttgacgggcagttgtggtttgattaaagatttgaaaacacgatatttttaatagtaactttaatcggtttgtttaagttgtggtttgattaaagatttgaaaacacgatattgcaaagcaaatacacccaacggctgaaatagttgtggtttgattaaagatttgaaaacacgatatttacttgtagcaactttagtagggttatttagttgtggtttgattaaagatttgaaaacacgatattgaacccaattcagcactaaactaatgaggagttgtggtttgattaaagatttgaaaacacgatattacaaatattttttaaaatcactcaattacagttgtggtttgattaaagatttgaaaacacgatattaaaatcaaacatcactattatgacaaaattgttgtggtttgattaaagattnnnnnnnnnnnnnnnnnnnnnnnnnnnnnnnnnnnnnnnnnnnnnnnnnnnnnnnnnnnnnnnacaggtcgcgacctgtccgtacgggggaaattagattagattttttaaattagaattttatttctatttttgaatttatataagccattttaatagtataagccatgaaaaatcgcaaaagaaatcgaatgaaaggattcg

SEQ ID NO: 2670 - DNA, 10452 bp, synthetic construct
  misc_feature 1..10452: note = Synthetic
  source 1..10452: mol_type = other DNA
ctgtaattgttcctgttagtgaaggtgttccacaagaacctcctgtggtggttacggtataggtaaaaggcgtcgctgccgaaatggaaggcgaaccgctaatagtaactgttgttcctgcaacagtagccgttactcctgttggcaaccctgttacggtggcaccagtggctgttccaccaaaactatacgttatcggtgtaatagctgaattgacacaaagggtttgagaatctgttcctgtggcagagtttaatgctaatgtagctaatggattgactgtaatggttagtattgttgtagcactacattgtcctgcatccggtgtaaaagtatacgtcgtagtagtggagttattgattgtgggtgaccacgttccagtaatactgttgattgaggtggtagatagattagtaagaatatctccaaaacaaataggtgtgatagaattaaatgaagggataacatttggattaattgttattgtcaatgttgttgttgtgccgcattgcccaacgtttggtgtaaaagtataggtggttgtgttggtattatttatggtaattggaaaccaagttccagtaattccatttaatgaagtagtcggtaagggtaaaattgtactacccgaacaaaaagggcccacagatgtaaatgtgggtgttggatttcctataactgcattgacaggcgttcgcaagctttcacacgaaccaacagtttgtgaggcataatatgttgtaccattagtcaatacataattacttgacaaaggggttcctcctgttgcagtagtataccaatttatatttgttccagttgcaactaaattagcaattgtagcaccaacacaaaatgtttgtggagaagtagctgttggaggggctaaagcaataacagttataggtgcaatgttatctaagcaacccgaaactgaatcggtaacaacaacattataaatacctgaatcaccaattggtacaatataagtagacgcggttccctgtggagcgggaatggcaacaccattgtgataccattgataggttgggtttaaaatgatagagtgtgctactaaagtgcaggcatttatagaacctgagagcactgttccgcttggatcagttatataaccaactaaatcaaatgaacctccttcaataaaaacagccgaatcgtataatctattagcagatgtgcttccataatctgctattactaatttaatgtggtaagtatgaccaggaattactgtgcctgttgctgtaaaagcttttgtacttccattaaaattggttccatctacattaggaggattttgattatatccattaaagtaggtagcattggctgcaggacaacccccggataaagctgataaatcgggatgaacagtactgattcctacaggcaatgatgttcctggtattaatgaaatattttgatacgcaccaccagtagtaacatcttttattaaaaatgcaaaagcgtcactaaattggcagggataatttttattgtactcgtattcttcagatgcaagaaaatatctaaaactaatagagtttttaacaggagtaaaatcaaaagcaatataagctgcatcacttagtacagcaggtgcaactattccaaaagtagtagccaagtcaacatcacttccagaacctaaactattacttaaagtagtattattaacggtattacctgcacttacagcatatcctgttgatataatcattcctttagtaaacaaatttgcagttccattttgaatatacgatccaaaaggacttgtagctcctgtagtagctaatcctggtgaagtagtaacattagtaacattagaacaagcattggagtttagtaaaacatctttaattaactgcgtaggagtttgatttgtagtaatcgtaatacgctgtgaaaaaatttgattagttaaaaataataaaactaataataaatttatttttttcattgttgttaaatgaatgagtttttaatatgctagcccttttatttatgttctctattaatataaatccaacctgttttagtttctgaatgattattaaattcaattacatagtaatacgttccatcgggcaactcactgccagaatcagtttgtccgcgccactcgttagtatattgtggttttgaatacacttttactccatatctattgaaaatacttaaattttgtacatctaaatttattaaatcaaaaaaatcgtttttgccatctggagttgggtttggcgatattcctttttgaatatcacaataaagatcggtcaaagtataagaatgagttcgagaacaattagcattgtcggttatggtaacgtcaataattacgggtaaactgattgctggttgtgaactatgaacatattgtgtagcattgaatgttggtattgtaattcctgttgttgctccgttagattgccaattaatagttgatgtatctacattaaaatcaccaatagattcaatatcaagtacaaaattggttccgtcacaatggcctttgatgttaaaatcaaaattgttttgaaccgttatagccatggtgtaggtagtaacacaggctcctgttgctaaaggtgtaaaagtatatagttgtgaggtggtattgtttattgtagcaggagaccatgtgcctgcaatgttttctaatgatgtagtcggtaatactggtggtgtacttcctgaacaaaaggcaggaatttgagtaaacgtaggaacaatatttgggtttattgtaatgcttccgtttaacgagaccgttccacatgaaccaccattagttgttattgaataattaaatggcgagccaatagcggttgtaggggttcctgttattgttacggtattgttagcaattgaagcagatactccaattggtaatcctgttaccgttgctgaagtcgcagttccaccaaaagtatagataattggaacgattgctgtatttgcacacacagtttggtttgtactagaaaccgatgatgttaattgtaaggttggtaaaagattaaccgtaacagttaacgtagtagacaaactacattgacctaaagtaggaataaaggtataggtagttgtagcagtgttattgatagctggcgaccaagaaccattaattaattctatcgatgttgttggtaacgcagctagtgtatctcctgaacaaattggatttatagcattaaatgtgggagttatattaggatttactgtaattgttaacgttgttgtagtaccgcattgtcctatatttggtgtaaaggtatagattgttgtagcagtattgtttaatgctggtgcccaagatccaataattccattagtagaagtagttggtaatgcatttaaaacacctccagaacaaatagcaggtactaagtcaaaagtaggggtggggtttccaataacaacttgaacaggtgttcttatactttcacacaatgctacagtttgagatacataatacgttccagagtttagtactgttatacttgctaatggactccctcctgttgcggtagcataccaatttaagttagaacccatagctgttaaactagctaatgttgatccgacacataaggtttgaggagaagcagctgttggtggcgttaaggctattactgttacaggagcaatagtatcggtacaacttgttactgagtcaattactacaaccgaataagctcccgaatctccaataggaactgaataagttacagccgtaccttgtggtgcaggaatagctacaccattatgataccattgatagacagggtttagaatttgagaatgggctactagggtacaagcattagtagatcctgaaataactatattgttagtatcggttataaaacccgataaatcaaaagaacccgcctctagaaatacagctgaatcgtaaagtttattgactgcagtactaccataatcggcaataactaatttaatatgataggtatgccccggtatgactgatgaagaagcggtaaatgctttggtacttccattaaagttactgccatctacattgggaggattttggttgtatccattaaaataattggcataagaagcaggacatcctcctgtaagtgccgttaaatctgggcgaacggtgcttattccaaccggaattgtagtgccaggaattaaagcaatgttttgataactactaccaattgtcacatcttttattaaaaaggcaaaagcatcgctaaagttgcaaggatagtttttattatactcgtattcctcagaagctaaaaaatatctaaaactaagggttggtttgataggtgtaaaatcaaattcaatgtaagccgcatcgctcaataccgctggggcaattacagaaaaagcattggctaaatcggtgtcgccgttagttccaatattatcacttaatatagtgtttacagcggtattacctgcatgagaagcaaatcctgtagaaataatcattccttgggtaaataaattgttggtgccattttgggtaaaagaaccaaacggactattagctcctgtagttgctacaccaggtgaggtgtgtacattggttactccaccgcatacgccactttttagcaatacattttcaataagttgtgtaggagtttgagtggtatttatttgaattcgttgtgcaaaaactacattatgactcaaaaaaatgataaatacaacaagaaattttttcatttaaaaaagttttgttttttaataaaaatggtttgtaaaattatcaataaattagtcaatacatcttaatattagattaatagattcactatattttttttatttatcattgataatgagttagttgattgctagcgacacaaagtttacaataaatttactttgagttaacttaaaaaaaaagaattccaaattttattgttgttatcataaatggaaaagtgaatttgataaaagaagacacaaagtatacactttatgtcttcttttttaaaacaggagtagcaatgattctccattatagattattaaaaatgcttaggttaaaattaccttccccatatagacgctagtcgcatatcgtttgtaatcttcagatacaaaggcaatccacacttcaacttttagcccagataaataggcaggtaaaataaaattaccttgaccatcaacacgttttcctgaatctagcgaatagactgtagttttgccacttggttcataagctgcaacaatcaattgatcagtctctttggcttgtccttggttagaattgtctatccaagtaaaatcaatactggttccagctcccggcgccactgttggagattgaagtcccaataaatctcccttgctgataagtactttttcaaaattaatttcaaaatctggtgctacataagtcaccgcctcagtcatatgatatgacattgcttgattggttcttgttttttctaatgaacctgaaccaaaaaaacgactgattaacggtgtcaatggagttaaaaaacctgaaactgttttaaatttgagtcgttgcaacaactgtgtttctgatgcagttcgatttcctttttttggcaaactacgtaatacgtctttaccgcgccaagtggcgccaactaccgggccaactttacccgaaaaagcacctaaaatgcctttgttgtatgttcccataatggtttacatttaaaattaatactagtttttttttagttatcctctcgagattgttaactgaaatcaaaagtaactagttcattttaataaatcatggtttgcgccaatagtgaatggttgtgacagatactgactagttgtgactgcatttgaccgattgttgtttttttaagaagattttgttcggattttgttcggattttattcggtaatgtatcgatgggaatggattttttgcaaataaagtagtgaagagactgctgccaaaaccttaagcaatttatataaagtaacaatttctataatagacaagccgatgactatagttaggtaaaaacaaacaccgccatttcggtaagaaactggcggtgttgattattctagtgattctttattttttatcttttctaacaaaagaagattaaaatagcttttagggtagtagtacctatttcctattgaggtgcaaggtatcgcattttttttacgcatgcgatagagtttactatcgctaatgttgaattgttgtttaatatcggcgctatcgagccatacttcatgaagtttgttatttgctaaaggaaatacaatacgttttaattcttctatttctttttgtagtttgtctaatttttttcccataatgcgttttttttcgtggcttataattgctaattggttgatattttgacgtaaaaataaaaaaaaatacttaaaacaccaaaaaaataactattttaaataaactatttatggaatacacaataggtttaaattaatattagcttaaaaataactaataaaattatcggttagtaaaaattcgttaaagcaaaaaaaagtcccaccgaagcaggacttaagattttacatctacggcatatagccttattgtgataagattaaagattagagatttttaatctgaaacaaatgtatagaaaaaataattataaacaaatgcaataaaccgtaaaatggttaagtctttttttattatttttaaaacttgttaaaattatattgatatggcaaagatattaggattggatttaggtacaaatagtattgggtgggcattaatagatgataaactaaataagattttaggtattggaagtaggatttttccaatgggagttgaaaatcttggtgatggagacggagagatttccaaaaatgctagtaggactggagcaagaggcgtaagaagacaattttttagaagaagattgagaaaaaaattattgcttaaagcactttctgaaaataatatgtgtccgatagattcaaatgattttgaagattggaaaaagacaaagctatttccatcagaaaagttagctacttggtttgctttaaatccttatgaattgcgccagaaggctttgcatgaaaaactttctttggaagaaataggaagaatattttatcacttaatacagcgacgaggatttttgagcaatagcaggaaaggcggtactgatgatggtgctatctttaaaggaaatgttaaagagggcaaaataggtattgatgatacattagaaagtattgaaggtaaaacattaggttcttacttatatgaaatttatccaaaagataaccaaccttttcaagatggtttagagagaatcagaaaccgatatacaacgcgtaaaatgtatgttgatgaatttgaattaatatggaataaacagagtcagtttcattcagttttaaatgatgatctaaaagaattatttggtggtagaaagcaagatggttacaaagaagatggaatcttatttcatcaacgccctttgcgttctcaaaaacatttagttggtaattgttcttttgagccaagcaaaacaaaatgtcctattagtgctattcctgtagagttattccgaatttatcaatgggtaaatactgttgagtataatggtaagaaaatcactcaagatgaaaaaagtaagttaatagaacagttgctttcgcatgataaaattgaatttaaaaaacttataaaagctattggaaaggaaagtgccgagtttaagttcaattataaagatgatgataaaattgtaggtactcatactatttctaatctatcaaataaaaagttttttggtaaacaatggttcgacttttcagaaaaagagcaagaagatatttggcatgtactctatttttttgatagtaaatctaatgtcaaagagtatgctttatcaaaatggaacttcaatgaggaaaaagcagaagctatttctaaatttaatgtcaaagatggttatgcaagtttgagtagaaaagcgataggtaatatattgccttttttacaacagggctatacttatgatgtggcagtagttatggcaggcattaaaaatgtttttggtgacaaatggcaaaatgatactgctgaaaacaaccaaaaacaattggatgttattgataatgtatatgacatagttaggtctaaaatatcaggtggttttatagacactattaaagatttactaattaaagaatttggtttaaacgataagcaactgaaaaaattatatcatcattcgactactatagatgtaaaagaattacttgataaattgccagttggcaaaaaagctgataaagaaattcaagctataagaaatcctattgttattacagccttgttcgagttgcgaaaattagtaaatgaattaattgaggaacacggacaattagatgaaattaaagtagaaatggcgcgtgatttaaaaatatctaaatcacaacgtaacaaaataagaagagatcaaaaacgtttagaaagagaaaatgatagagtaaaagcagaggttgaaaaatatactagagttaccaacgataacattttaaagttcaaactatgggaagagtgtaaacaaacttgtccatatactggggttgctattcctgtaaataaactttttactggtgaaatacaaatagaacatattcatccttggagccgttcgctaaatgatagtttcaataataaaaccttatgttgggctgatgaaaacagaagaaaaggcgacaaaacaccttttgagttttatggaagtgatgagtctaattggtctgcaattaaagaacgtgctttgaaattattttcagatactcgagaatatccaaacgcttatcaaaaattcaaacgattcgtacagataaagtttgatgatgatttttcatcaagacaattgaatgatacaagatatatcagtaaagaagcaaaagaatatttattgaagatatgtaataaagtagcggtatcaccaggacaaatgaccgctaacttgcgtcaaaaatggggattgaatacggtattaaacgatgaaaatgcaaaaacacgtgaagaccatcgccaccatgctatcgatgctttagttatggcttgtggcaaaaccagttatttacaagagttgtctaaatggaatcgatataacagaaactatgatttaaaagactttccaatgccttgggaaacgtttcgatatgatgccgaaaaagcagtagataaaatattgatttctcataaacgtattagtaatacaataacggtaagaacacataccacagaaaaaaacggtgtgaaatataaaaatgttggtgttgcagcaagaggacaattgcataaagagtttgtatacggaaaaagaactgcgccttttagtgatgatgcatttcatataaggaaatcaatagatagtttaacaaccttaaagcaagtagataaagtagttgatgaagctaccaaaaagttaattaataaacgtatacaaattagattgcacgaattgaacgatgaaatatttttgtcaactaatgttaaaaaagacaaagaaatcgagaaagaaattgaaaattatgaaaagaaaggaattttgcccagtaaagtcttttttatagttgatgaaaatggaatcaaacaaccccaaatattcttgccgaataaaaacggtgcgcctgtgcccattttaaaagtacgaatgaaagaaaattttagtggagctgaaaaactaaaagaaaatgtcaaccaatgggtaaaccctagaaataatcatcatgttttgatttataaagatgataaaggaaatttgaaagaagaagtagttacattttggactgttgttgaacgtaaaagaactggagattcagtatataatttgccttttgatgggaaagaaattgtaacgacgttacatattaatgatatgtttttattaggtttaaaagaagaggagatcaattgggataatttagattatgatgtattaaatgaaaatttatatagagttcagaaattaacctcgggagattattttttcagaaaacataaatcatcaacagttacagatgatgattataaacagattagaggatttggcgaaggtaaaactggatggtttacatttaacccaataaaagtaaaaatttctgtttcaggaaaaattcaaaaagtataactttataaaagttctttgacataaatcgataatcttaaacaaccaaaccacaacggagtttctacgtagtcaatccgttgtggtttgattaaagattagagaacacgatatttttattatttgattttgatagttccgattcgttgtggtttgattaaagattagagaacacgatatttaacattttgcaactacacgtctgttgcatgttgtggtttgattaaagattagagaacacgatattttcaacatcgtgtttgattat

SEQ ID NO: 2671 - DNA, 9596 bp, synthetic construct
  source 1..9596: mol_type = other DNA
  misc_feature 1..9596: note = Synthetic
tgcgctaagggcaaccaagttaatccggcatgtagtcgaagggttgtttgatgaggcttcgatgctctcgttgccgctccaccctccgcgtgggacgttgccccacgctagtcaatgcaacgccccttcagggctatttccctttccgtataaaaaacatgtgcttaattactacatcccttctctgaatcggtcatcccggaaaaccccattgagatgcaaattgcatggaaatatccggtggtttatccagcctttcccgatttgtcgtggaggatctggttgcttgatctagctctgagttcgaacaaaaacttcgatactctttcctttcttgcgtactttgttttttaaacaaccggattccggataagcctcaagcattatccttaaaatctatgatcttagcgggctttccggaatgacctattaaagcaatttaccgatgaatagaaccctctgtcattggtagcggaaatccggcatcaaacgatagccatgaaagaaaatcgcattccggattgtagtcgaaggtctgtctgcactacctcccaatcacaaaacccttggaggatttctcggaatcgagcttttggctcttcactgagaaatcctcatagggttcaagccactgcatcgacgcaccgaagcctcaccaccactagttcgactacatgcggattgcgtttggttgcccttagcgtagtacgagcccggcattccgctcgctaagacgaggtggaatgggtgctctcgcgtaaacaaaacgaagcgaggagtcagcctgagaaattaatatctgcgctatcgcttaatacatttgaggggtatgacagagttttttcatcctctgtcattagtagcggaaatccggcctccaaatgacagccatgaaagagaattatattccggattgcagtcgaaggcttgttttaagaacctcgttaccctacttattgcttcgcaatacaatttagacgctgccccacgcttgtgtttgctttgttacatcttccaagaaatcgagaatgatctgctaagtatcaacaacaagaagtgtacttaactgtactttgtaaaaatgaatcagtgaaagtataatgaatatttatacgagcttaatgagaataacacatgcagcaatttcaaagcaaaaggtataaaaaaagccccactgagtaagcggggctcaaggtaagaacctacggcatatagccttattgtgataagataaagatgggaatcttttcttaagaagaagataggtgtttttttattcaaaacaaatcctttaattgcgtaaaactacaaacgtacattaatattactaattatgagtaaaatactaggtttagacttgggtaccaattcaattggttgggcttacatagatgaattaaataacaagattttaggcaccggagtcagaattttcccaatgggggttgaaaatcttggtcaaggagacaaagagatgtctaaaaatgcatctcgtactagtgcaaggggaactagaaggcaattttttagaagatctatgcgtaagaaattgttattaaaagcccttgctgaacaaaaaatgtgtccattaaatccttctgatataaaggtttggaactttaaagaatttgagaaagatgaaattttttcaagttggattcgtcagaacccttatgagttaagacacaaagcgattagtgaaaaagtgacgctgttggagttgggtcggattttttatcatttaatacagcggcgaggttttcagagtaacagcagaagtgcttctaaagatgctgggaaaatatttgagggaattcctaaagatggaaagattgggattcttgaaacagctgaaaaaattcagaatactactcttggcagctatttaaattcattgtacccggcagaaagtcaatcatatacacatattgatgaaagaatacggaatagatatacatcaagaaatatgtacgagaccgaatttgaagaaatctggaataatcaagtaaaatatcattctgaattaacatctaaactcaaaacaattattggtggtaggaaaaaggacggctattcagaagatggaattcttttttttcagcgaccattaagatctcaaaaattcttagttggtaagtgtgcatttgaacctaaaaaaacgaaatgccctaaaagtgcaataccttttgaatattttagaatttatcagtgggtaaatacagttgaatgtaatggaagtaaactaaatgccgaggatagaaataagcttgttaaaattttacttaaaaaagaaaatccggcatttaaagaattaagaaaagagctaaaactaacagacagcatctatcaatttaattataaggatgatgataaaatttccggttcacatacaattaggagtttgtcttctaaaaagttctttggtgaagaatggttcgatttttccgaaaaatatcaagaagaaatatggcatgacttaatcttttataaagacaaagataaattaaagcaacgagctattgagaaatggggatttaatgaggaaaaggcaacagctataagtaaatttaaccttgttgatgggtacgctaatttaagcagaaaggctatcaataatattcttccttttttaaaaatgggatttacttataatattgcagtagcattggggggtattaaaaatgcctttggagattcatgggagactttagattctgaggataagacattaataacagataatatatttgatgttctaaaaacagaaaaagaaggaggatacatacaaagattgcgaaattttttagtacaagaatttaatttgacagaaacccaattagagaagctctatcatcatagtgctaacattagtgccaaagaattattagataaattaccagttggaaaagatgctgatgctgaaatcagaagcattagaaacccaatagtaattcaagcactttttgagcttcgcaaagtttcaaatgatttgatagaccgatttggtaaacctgataaaattcatatagaattagcaagagatttaaaagcatcaaaaaagaaaagacataaaattaaacaagaacaagatcgtcttaaaaaggaaaatgacagagtaaaaaaagaacttgaaagattaggcagacacatttctaatgataatatattgaaatacaaactctgggaagaatgcaataacatttgtccatataccggacgtaaaataagtgttgttcagttgtttagtggtgaagtacaaattgagcatattatgccctggagtcgttcattaaacgatagctttatgaacaaaacgttgtgttttgctgatgagaatagagcaaaaggaaaccgtactccgtatgaattctattttaaagaacaaggtgaagccaaatgggaacaagttaaggaacaagcgttaacctgttttaaaaccaagataaactatcctaatgcgtatgcaaaattcaaacagttcataaaaaaggaattggatgacgattttgtaacaagacaattaaacgatactcgctttataagtagagaagcaaaagcttacctatctaagatctgtgataaaataatcgttgcaccaggacaaatgacatccaacctgcgtcataaatgggggttgaatagtattctaaatgatgatgataataagacaagagatgatcacaggcatcatgctgttgatgctttggtaatggcgtgcagtaaggtaagctacttacaagaactttctagatggaatagatacgaacgaagttatgatttagaaaattttcccatgccgtgggattcatttagaaaagatgcggagaaaagtattctaagtattttagtatcgcacagaaaatcaaacagagttttaaactcacgcaaatataaggtaaagaaaaaaggtgaagtatatgtaaataccggtgttgcagctagagggcaattacataaagaatatgtttatggtaaaaggcaatcaccaaatagtgaacaaggatttcataaaagaagtccaattgagtcattaaaaacggaaaagcaagtaaataaagtggtagatccgtttattagagatttaattcacgcaagggttgcaacgttgggaggatacgtgaatggaaacattcccgagggtactttttttaccagtgatgaaaatggaaataaaataccaatgatttatctgccgaataaaaatggagataaagttccagttaaaaaaataagaataagagaagttattggtggtgccgaacgattaaaggaggagaaccaatatgtgaaccctcgtaataatcatcatgtgcttatttatgaagacatgcagggaaatttaaaagaagatgtcgttaccttttggactgtagttgaacgagtaaagcagaaacaacctctatttcaattaccctttgatggaaaaagaattatagagacattagaaataaatgacatgtttttattaggtttgcatagggaagaaatagattgggaaaatccggattacacaaaactctcaaatcatttatttagagtacaaaagtttacttctggtgattattatttcagaaagcatatagaaagttctctagatggagaactaggtcatgcttttcagtacattaaaggttttggcactggcaaaaccggttggcttacatttaatcctataaaaattaaattaactgaatcaggtaagctgtcagaaatcagtaactaatgatcaaaaaaacgctcttttttcaaaacccggcatatctgtcgattaagaatcagcaattggtgattgcttcgaaaaagtccggtgagattacggagcgccctgtagaggatataggatttgtgattctagatcatccacaaattaccctttctctatcggttatgcagttattagcaagtcataatgtggcggttgtagtgtgcgataaaaaacaccacccgacctctatgatgtttcatttggatacccaccaagtgcaaactcaacatttcagggctcaggtagaagccggggaacctctgaaaaaacaactatggcagcaaaccattaaaattaagattcgaaatcaggctgctgtacttgatgtaacaaaagggcagggagaagcgctcaggtatctggcaaaacaagtgaaaagcggtgattccactaacttggaaggtcgggctgcgcgctactattggcctgtattgtttggggatgattttattcgaggccgttttgggctgccaccaaacagtatgctcaattacggatatgctattctgcgagcagcggttgcgcgcgctttaaccggctcaggtttgttaccaaccttgggcatacatcacaagaataaatataatgcctattgtctggctgacgatattatggagccgtatcggccttatgttgatatgttggtgtatgaactttatgagtccggcttgggacaagatgaggcgttatctgtagaagtaaaaaaagccctgttagaaatgttagcatcagatgtaattatcgggaaaaagaaacgaccacttatgattgctttatcggaaaccacagcatcgttagcacgatgttttatgggcaaaaataaacgaatttcttacccgacattatgaaccaatcaagacttaacgcctatcgtattatgtggttatttgtttcttttgacttacccgttgtaactaaaacggagaaaaaaattgcttctggattccgcaaaaagcttttaattgatggatttagcatgatgcaatattctatttatgtacgccactgtgccagtaaagaaagcatggatgtgcatataaatagagtaaaaggattcgttccggaaaaaggacatgttactattatgggaataacagataaacagtatggaaatatcatcaatatttggggtaaaaaaactaaaccattaaaaatagtacccatccaaatggaaatgttctaaaaaaagaggtcaacagggcaataaatacgctgaagacctctttttaaatcgactaatattccgctaactctttgtccacaaatggattgcagagtgtcgtaatatcggttttcccatctttaaatcaaaccacaacaatgagaaaaggagtgaggttcagaatcgtaatatcggttttcccatctttaaatcaaaccacaacgatcgctttacgagtgtggggttggcttcgaatatcggttttcccatctttaaatcaaaccacaacaaagattcatgacagcaaaattaaatgatgaatatcggttttcccatctttaaatcaaaccacaacttccggtgatcgtgggttttacggaaagaaaatatcggttttcccatctttaaatcaaaccacaacaaaaatcgctcaataaacatcataatcactaatatcggttttcccatctttaaatcaaaccacaacgggatatgatttacattagcctgcatgtaaaatatcggttttcccatctttaaatcaaaccacaactcggtaaaactcaaggctcacattgtagaaaatatcggttttcccatctttaaatcaaaccacaacgatgagctcaaagtgatcgaacagaatgttaatatcggttttcccatctttaaatcaaaccacaacagtatcgctcatcggaaccacccctttattaatatcggttttcccatctttaaatcaaaccacaaccggcatctcgtcgaggatgcttttcgcattaatatcggttttcccatctttaaatcaaaccacaacaaggtcttaatcatgcttttcttttgaattaatatcggttttcccatctttaaatcaaaccacaactatgcaaccctgaacggctttcttttttgaaatatcggttttcccatctttaaatcaaaccacaactttcttatttagcatgagaagcgctaacttaatatcggttttcccatctttaaatcaaaccacaactaaagcgtgactggcatccagaaaacaaataatatcggttttcccatctttaaatcaaaccacaacgttaatgtattttacgaccaggcaaaacgaaatatcggttttcccatctttaaatcaaaccacaacatcaaaactatcctgcaatgccacattaagaatatcggttttcccatctttaaatcaaaccacaacttacgtgcattggcgaaacataagaaaacaaatatcggttttcccatctttaaatcaaaccacaactttgttcgtgtcatggcttttttttgttgaatatcggttttcccatctttaaatcaaaccacaacaacacaccttaaaccgttgttttaattatgaatatcggttttcccatctttaaatcaaaccacaacggcaagaatggccacaaagcaagcgatgttaatatcggttttcccatctttaaatcaaaccacaacggctcgaagcgtcttccgaatacgatccaaaatatcggttttcccatctttaaatcaaaccacaacgttattatttagcatgagaagcgctaacttaatatcggttttcccatctttaaatcaaaccacaactatatccttctaagtctgtatggcatttgtaatatcggttttcccatctttaaatcaaaccacaacgcgtgctgcatccccaacccggtttcgtcaaatatcggttttcccatctttaaatcaaaccacaacatacatgctttgcatttcaaatacatcagaatatcggttttcccatctttaaatcaaaccacaacttgtgctttttctactatggtttcgtacacattgcggtgcaagggtgttttatagttcagttgtgcggggtagagaaagtagaaagtttgtggtgttcaatggggttttaagtggtgtttaatgggggtttgtggtatctttaaatatgcgctttgccaatgatcgcattttgggagcgattggtgtcttttcaggtaaatggctccaatgtcatggattcgaatccctctggtattagcgtattaaagaataccacattatgaaagcgcgaaaccgtttgccggcagaggcgataaacggctgtaaggctgctcggatggtctgtcgctccgggtgggtctacctttcatggtgaattatggtatctttaaagaaagcgtgtgtaagtgcgtatccggtgcaggcacatgcgtaaccggtggtcccttgcttttggcggtgtgctacgccttgtgagtctaccttaacacgctttttttaaaatatagccttgctgaaggcacgaaaccggttgtctgcggaggcaataaccggctgaaaggctccggtcagtccgtaatgatctgtcgagcgcaatacttcagcagggctaattttttttcataaaagagcaactccttgctgttttatgttcatggcattaaagcgcaaactcatcaaataccactaaaaacttcatctttcagtaattatacttgaacaagggaatgctatttattccttaaatgctgcttaagtatagaggatagtactctttcttaatcggttactatcaatcaccaaagttgattacattcatctgtacccgatggttcgaaatcttaattaaaaaacatccatttaacccatcataatctccacatacgtgctatctgacgcttggtggccatcgagtgagtgaaagcagagccataggtgtagttttttgtccgttgagtctgggtttgcaaggaaccaatctgggagtgtgaggctgacggttccatccgcacgttttgcgatgtagggttctgaaatcaggtgattgttttctttattgaataggacaaccatgatgcgatcagtaggcagggagaatctgtttccgggcgatatgggaatcccaggtaatcgttatttcaccatctttaatatgagctacacatcccgaaggagcatcaaccggcccggcactgattttaaaggccgtgtaatcgattttcatatcaggatattcgccaactatgacttcgtctgcattggtgcgataggccacatctcggtaagatttaccgggtggtggattccggaaacctgtcatcagaaccggtttaaatactttcaataatccggaaagcattcccaatctcatgcgactggctaattgcgccggggtcttggcatcccgatagtgagcgggtttagatcgcatataaggaacaccatttctgctgctatagacaatccccgaaatagaaccgctaattgaattatcaaaaataccttttttcgaacgcgccatagtaaatgatatatgtatgatggtttggattggataaagttagtatcaactcaacaataaaataagtatatacacatattaaatacaagctataaatacatcaaagacatatcatatatgactttgatatgtctttaatctgtctatgatattactttgaagtatattttatatagcttatagtaaaacctaagtaaccattgtatcaatgaataaatcacccgtgtcattggtaatgcaaaaagggcaaccggtttgaataacccgattgccccattttgaattttgagcccgctccgaaaagttaattatgaaccacgaagattctgtgttaaaagtcaaattataaattctttttgtta

SEQ ID NO: 2672 - DNA, 8622 bp, synthetic construct
  source 1..8622: mol_type = other DNA
  misc_feature 1..8622: note = Synthetic
caagtggcagtcaaagtgcagttttgttcggaaaaagtaccgtttttccgaagctgattcgaacttgattcgaacaagactcgaaggaaagtggagaaaaggagagtaaatgagtgttttttttggagataataagagagggtgatgtctagttgaacagcaactgaggcgcaattatcctgcaattatagaggaagattgtagtaaggacgtgacaaataaaaaagtcccaccgaagcaggactatagattttacatctacggcatatagccttattgtgataagattaaagattagaaattttaatcatactacaaatataaataaaaatttattgtaaaagattatggttttccgtattgtgcaaaattttctttttgctaattttataaattcataaaataaaactaatacttatggcaaaaattctaggattagacttgggaacgaactctattgggtgggctttaattgaagacaatcaaaacaaaattttaggattaggaactagaatatttcctatgggagtagagaatttaggagatggggaaggtgaaatttctaaaaatgccagtagaactggagcaaggggagtaagaagacagtttttcagaagaagattaagaaaacaaattcttttaaaagcactttctgaaaataaaatgtgtccgctagaagcttctgattttcaggaatggaagagaaataagaggtttcctattgaaaaattagcaacatggtttgccttaaatccttatgaactacgtcagaaagcattaatagaaaagttgtctttagaagaaataggaagaattttttatcatttaattcagagaagaggatttttaagtaacagtagaaaaggcggaagtgatgatggtaccatttttaaaggaaatccaaaagaaggaaaaattggaattactgaaacgcaaaaaaatattgaagataaaacattaggcgcttatttatttgaaatttatccgaaagaaaatcaaccttttcaggatggtttggaacgaatccgaaatcgatacaccacccgtaaaatgtatgtagatgagtttgaattgatatggaacaaacaagcccaatttcatgctgaacttacgaatgaattaaaaactttatttggtggaagaaaattagatggttacaaagaagatggaattttatttcatcagagacctttacgttcgcaaaaacatttagtggggaattgttcttttgaacctcgcaaaacaaaatgccctattagcgctatcccatttgaacaatttagagtttggcaatgggtgaatacggtggaatacaacggaaagaaaatttctcaagaagaaaaagaaaaaattgtagagtttctatttgccaatgaaaaacctgaattcaagaaaattagaaaagttattggtaaagaaagtgctgaatttaaattcaattataaagatgacgataaaattgtaggaactcataccatttctaacttatcaaacaaaaagtactttggtaaaaaatggtttgaatttaccgaaaaagaacaagaagatatttggcacgtattatatttttttgatagtaaatctaatcttaaagaatacgctattaagaattggaattttacagaagaacaggctgaatctatttcaaaatttaatgtgaaagatggttatgcaagtctgagtagaaaagcgatttctaatattttaccatttttaaaactaggttttacctatgatgtagctgttgtcttgggcggaattaaaaacgttttcggttcagattgggaaaagctatctgatgagaaaagaaacttcttttatgataatgtttatgaaatcgttcgttctaaaaataaaggtggatttattgaaatcatcaaagatatcctaagaaatgattacaatatttcagataatcaactaagaaaattatatcatcattctgccacaattgatgccacagaattattagaaaagttaccagtaggtaaagatgcagataaagacattcaagcaataagaaatccaatagttattacggcattgtttgaattgagaaagttagtgaatgaattgatagacgaacatggtaagattgatgaaatcaaagtagaaatggctcgtgatttaaaaatatcaaaatcacaacgtaacaaaattcgtaaagaacaaaaacgattagaaagagaaaacgatagagtaaaagcaagattgttagaagaaagacagagagttacccatgacaatattttactttataaactctgggaagaatgtaaacatacttgtccatatacagggaaacctatttctgtaactcaattattttctggcgaagttcaaattgaacatattcatccttggagtcgttctttgaatgatagtttttctaataaaacattgtgctatgcagatgaaaaccgtaaaaaagggaacaaaacaccttttgaattttatggtagtgatgaggcgaactggtctgcaataaaagaaagagccttaaaattattttctgatactaaagaatatcctaatgcgtatcaaaaatttaaaagatttgttcagcaaaaatttgatgatgatttttcaacacgacaactcaatgatacaagatatatcagtaaggaagctaagaattatctctctaaaatttgtaataaagtaaccgtttcaccaggacaagctacttctaacttgagacataaatggggattaaatcagattttaaatgatgacaatgagaagacgagagaagaccaccgtcatcatgctattgatgcattagtaatggcttgtaccaaagtttcttatgttcaggaattatcaaaatggaaccgctataatagagggtatgatgtaaaagattttcctatgccttggcttagcttctggaaagatgcagaaaaagcggtaaatcaaattttagtttctcataaaaaagtttctaatgatattaccgttagaactcacaccactgagaaaaatggtaaaaaacataccaatttaggtgttgctgctcgcggacaattgcataaagaaaccgtttatggaaagagaacatttaacggagaagaagcatttcatgtaagaaagcctatcgaaagtttagaaacagccaaacaaattgctaaagtagtagatgaatccataagacttttaattttaaaaagagtaaatgaattaggaggttttgtaaaagataaagtgcctgcaaatactttttttattgtagatgaaaatggagtaaaacaacctcaaatctttttacctaatcagaatggtgcacctgttcctatattaaaagtaagagtaaaagagaatatcggtggagccgtaaaattgaaaactaatgtaaatcagtgggtaaatcctagaaataaccatcatgtattaatttacaaagatgaaaaaggaaatctaaaagaagaagtggtaacattttggacggttgtagagcgcaaaagaacaggacagtctgtatatcaactaccaattgatggaaaagaaatagtcactactttgcatatcaatgatatgtttttattaggtttaagcgaagatgaaatcaattgggaaaacccagattataaagttttaaaagagcatttgtatagagtgcagaaattgtcttctaagttttatgaatttagattagtttcggaagcatcaatacaaaataattttcaacctttttatgtaagaattcagagtttcggagatggtaagacgggctgggatacatttaatccaataaaagtaaaaatttcagtttcaggaaaaataactaaaatttaattaatttagtaaaaggttctttgacatttacggataatcataagcaaccaaaccacaacggagtttcggcgatagctcactccgttgtggtttacaaacaccaattaattattttttataggagtgtttgtgaatctccctttggtcgatttgattaaagattagaaaccgaggaacgaggttcgacgaagtcaaaaaacgatattagttggctctctaccttctaataatcaataggttaatgatgaaatatcgtacataaaaatgcttcttttttgccttgatacagcaagattgaagcattttttggtttctacgtgttgaatttttagtttttaataatcaataggaacgggctttagcccgttttgaaaattaaaagatctaatggctttagccaaaagttaaaagataattttttttctctaaaatagttctaattgtactggctgaggtgattttggcacttcggattttccccagaaattaatgatatttccgtattgtttatcggtaatgcgcagaatgcttactttacctaatggtggtaagagtttattaattcttttttcgtgtacatctgcactttcgctacttgcacagtgtcttacatatacagaatattgcatcatgctatatccatcttttagcagattatttctaaatccagaagcgttttttctgtctttaggagtttcggtaggtaagtcaaagaatacaaatagccacataattcggtatccgtttagttccataatttgggatattttattttttttcgctcgccagtgaagcattgctgtagagaacttgctgttttttgtaagcctaccatcatcggacttttttcatcttcgaaatagagtgttctggttaagatttgtagaagttcagcctttagtttggtattgagttcttcctcatcatattgattaatgatttcaaaaactttttcgtctaccataggtcgaaatggttccataatgtcatctgccaaagcaaaagcattgtatttgcttttatgatgaattcctaaggtattgagtagtccgcttccagagagtgctctagctgtagcagctcttagaatagcatagccgtagtttaagaaattattaggataatctccgaaacgttctcttttaaattttttaaaagtgctgttttcaaagaacgctttccagtaaatattggcagctgtagcttccatattagaagtgtctccgctcaagactttggaagcgatgaagtcaaaagaatttttctcacctgttattttttctaaaagaattccttggttggtaattttttctatgatggtttgttgccacagttgtttttttaatggaacactggcttcaatttggtttttgaaaatttcttgttgaatgtgatggctattcaaattgagaaacatgccattaggaagatggtttttgccacaaataataatggcggtattattttctaccaaaagattcattgctggcatactcagaaaaatttctggatggtctattaccaagaatcctatttcttctattgggatagaggtttctcttatttctgattttataagaagttgtagatttctggtagagagtgacgctttattttctaaaaggatggtttttttaatcatggcaaatttttataataaatttacgaagattagtcgaattaaaattatggttttccgtaatagtacaaatcagttttcccctgccagaaaaaatcattgacaaagcttgtaaaaactacaattcccaaaataatttccccaccaacctgatctgctgtatctttgtagaaaatactgaaattgaatcttagaaaattagccgataaacagaatgttttcttgttgctcttgctggtgatggttttggcgggaaaactcattccttaccaagaatcttaccatcaaatttttaacttagaacaattcatcgattggggaattgcgggaattttccttttgtacgggttaaaactcaacttgaaagaagtattgaaagatgtctccaactggaagttgcatcttttggttcaagcgggaactttcattctttttccagcattggtattggttttttatccaatttttaaagattcgccatacttccaaagttggctttccgtatattttttagcgtgtttgccttctacggtttcttcatcggtagtgatggtatctattgccaaaggaaatgtgacttctgctatttttaatgcctctatttctggacttattggcattgtaatgacgcctttgttgatggggtttttcctaaatgctcaagcagccgaaagccatcaagcagagattatccaacaattattactcaaagttcttttgccgattatcttgggaattctgctcaatccgatttttaaaaattgggtaacgaaatacagtaaaatcattgcagaatttgaccgtctcattattttactcatcgtttacgaaagcttttctaaagcatttatcgagaatattttttctaccgttccttctctggtttttgtggtgattactctagcggcagtagcgttattttttatcgtttatgagattttaaaacgcatttcacttcgattgggtttcagcagggaagatgtgattacaacgactttttgtggctccaaaaaatctttggttcatggcagtttatttgtgatgatactaggaattcccgaagaacaaaaagttcttttcctattgccgattatgatttaccacagtttccaattgttctatgtaagcgctctcgccaataaaattgcaaaaagcaaagtttaaaaataaaatttatagaccaattaaagtttcaagattttaatcttaactaaaaacactctttaaatctggtttctgaattaatcgaaaaataaacgaggtcaaaattttatgtttttgaaaactattttctaaaaattaggagtggtgcaacagttaccgatgttatctggcgttcttttttagaatttgaaatttttgagtagttcatattcagatttttcgtaaattttttcaatttgaccattttgtagaattgcaattttgtcgcatgtatgaaaaagagtttcgatgatgtgcgaactaataattacaattctattttcggattttagatttctaattatatcgtacagaatgtgaacaccctcaaaatcaactccattaaatggctcgtccaaaatattaataggcttatctaataaaagcattccaataagtgctaatttttttttcattccgcttgaataatattggacaaatttgtttaacggaagtttaaatttttcaattaactcaatgtgtttagaatttttatttcccgaaaagtaagaaaggtattcttttcctgtgatgtaaggatagaaataattttcggtttctaaataggaaatctgttctctttttaaatgctggttttctaaaataatttctcctgaaaatttcacatttcgaaatagagactcaaagaaagttgttttaccagctccatttttccctaatattccaactatttctccattttcaatatttaaattgaaaccttgcaaaactttttggtttttaaaacttacatttaaatttctaacttccaacataaagtttaatgttttttttggatgttcttatattttctctcaatacaaaaatggcgggaatcaccgtgatgctgcaaaaaaagtattctaaaaacacacccatattataatgattcatttcttctttatgattatagattttgtattttcttgtcagaattagcaaaaaataaaggttcataaaaacaaagtaatagattaagtaaatactatcttcagaatttaagattagaaatcctaaatatgttggcaaaagtaaaaggttgaaaaagtaaacatttgattttaatttttcctcaaaggaatgcttcttaaaatatatttcaaacatttccttgctttcattatgttcataaatatttgaaaagaagtctaatataaaaatgcccacaaaaatcaataatgcagtttgataagaagataaaactataattacataacccataattgcaaaccaagtatttttcctcaaaaaactccgccattcaaataaagaatcaggaataaaattccatttaagagaaaagtctggttttgtttttgggaataaaaatgaaaataaaatcaatacaaagaataaagaagaaccgaaattgtcagggatgtaatttatatttcctaataataacaatccgtaaataattgctgattcaatataaatgattaatctccaattcctcacaaaaactttttttaggaaggggatgtcttttctatttatgtgaaaaattaagcttaaagcaaagaaaattgcgggatagtaataatttgaaggaagttttacagcaagtaaaacacctataataattaaaataggaagacttattttaggattcaaattaaatattctgaaaccttgttgaattctaaaaagtaagtggttaaatatttttttcaaatccttgttttgtttgacgctcttgctttcagaatgacagataacgttttgtggctttgcgaagagcaagacttctgaaaaccatggtttatatttattttatttttgttagcggaaaataaatgtcttgcttaatttattttcttgctttttgcaaaaccactgtgcttgttgcacaactcaaatatacaaataaacttgtataaaaacgggatatttcgtaaattgatgtatgcaaggaaagaagagttttacaccacaattatttgtttcggtcaatttattagacctagttccagaggataattttt

SEQ ID NO: 2673 - DNA, 7942 bp, synthetic construct
  misc_feature 1..7942: note = Synthetic
  source 1..7942: mol_type = other DNA
aatggttttgtaaggttaaaattgtcaccaacaaactatttattagtaaagaaaaaagataatagaattagattgtcatcagaagaagagatgatagcatttgttggagattatttaataagggaaaatcaggagaaagtttatgaggcttttgttaaaagtgttggtcaatatatatcaactaaaaaattaagctttttagaagtaaatgaactgcctgatgatagggattctaaagatacaggtattttttattttaaaaactgctattgtttggtatataaagaaggtgtagaggtaaaagattatagtgaattaccttatgtaatctggaagaatagattaataaactgtgattacagtaagagagagacctcaaatattggtcaatttgaacagttttgtaaaaatattacaaacaatgaagactcacgttttttaactttaaaaactatattaggttatctacttcataggaataaatcaagaggagaagataaagtgattattttatatgatgaaaatatgctacttaatgataaaactaatggaggtactggtaaaacattattatccgatgcgttgtcaaaagtacgagaactagaattgtttgatggtaaatctattaaaggagatagttggtttaaaaatcaacgtattggcttaacaacagatattataacttatgatgatttgaataaaaatatcagtttagagatgttttattctatgattacttcaggtattgaagttgaaaagaagaggaaagatgctttttttattaaaaaagaagaatccccaaaaattattattacttcaaattatcctgtaaaaggacctggtggttcatcagataagagaaggaggtttgagtttgaggtagctaactattacgacgaagaatttacaccagaagttgaatttgggaataggttctttaatgaagattggggtataaatgaatggcaaaagttttatcattttctaatggaatgtttaaatgactatttgaattatggattggttaaagctccttctattaattataaaaaaaagagtttagaaataaagacatcagctgattttgtcgagtttgctgatagttttatagaatataaccaatggatggataagagagtaactgaagagttgtttaacgatttttttcctaatcaaaggacgtcatctcatcaattcaaaaaatttttgagtgaatattctgtcgagaatgatgcaactttggaattaaaatctacaggaggtaaatatttatttaaaatgattaaaaaagaaaaggatgatgaagaaagtagtttataaagtaacaaataatgaaactgaagaggtttacataggtataacaagtaaatctattgatgataggaaaaaagaccatttaaagaagtctaaaaaaggaaaaagctatgcgtttcaaaatgcaatagcaacttacggagcagatgcctttaaatgggagcagattgatacagcaatcacaacaaatgaattagctaaaaaagagaaagaatatattttagaatataattcaaaagaacaagggtataattctgatagtggtggtggaatccaaaaagctgtctatcaatatgatatgttaacaggagtattagttaataagtactctaatttaacagatgcaagcgctacaattggcttaaataagcaagacttgtcaagtgtatgtttaagtgtaaataaagtctctaaaggcttctattgaacttatgattatgttgataaatttattcctaaaattgataaaaggaggaagaaagtttgtcagtataatatgcaaggtgaatttgtcagagaatttgaatctgtagcagaagcttcaaaatattctggatgcaataaaacatcaattgcgaaagtctgtagggaagaaaggaaaacctgtggaggttttatttggaaatatttatagagttaagttaaaaaaaaggtagtgtaaaagctacctttttttaatgaaaaaagtcctaccgaagcaggactaaagattttcatctacggcatatagccttattgtgataagattaaagattagaaattttaatctaaagtaaaagtaataagattttattaattattcataaaattttattaattttattgttcttattacaaaaattgcgaaaaagaaatgaataaaatacttggattagatctaggaactaactctattggttgggctttaatagatacagaaaatgattctattttaggaatgggaagtagaattttccctgaaggtgttgttaacttaggtgaaggcgaaggtagagaaacctcaaaaaatgctagcagaacagaagctaggggagttagacgacaaatttttagaagaagacttcgtaaacgttatttattaaaagaactagcaaaacacaacttatgccctatttcacctactttagtaaaagattggaatggaactgatattttcaataatgaaataattaaagaatggtttcaattaaatccttacgaattaagagcaaaagcaattcatgaaaaaattactttaatagagctaggtagaatcttttatcatatgattcaaagacgtggctttttaagtaatagcagaagtgctggtgctgatgttaaagaaacgagtaccatttttaaaggagattcaaagattggaaaaataggaattagtgatacattaaaaagtattgaacaaaataaaactctaggttcttttttacatagtatacagcccaaagaaagtgaacctttttctggcgaactagaacgtattagaaatagatataccacaagacaaatgtatattgatgaatttgaaactatttgggagtttcaaaaacaatttcattctgaacttaactctatactaaaaacaatacttggcggaagaaaaaaagatggttataaagaagatggtgttttatttcatcaaagacctttacgttctcaaaagcatttagtaggctattgttcttttgaacctaaaaaaacaaaatgtaaaataagtgcaataccttttgaattatttagaatttaccaatggataaatacgctttcttatgatgttaatggagttagacaaaaaatcacattagaagaaagacaaaaaatcattaacctattactatctaaagaaaaacctagctttaaagaaattagaaaaaaaattggcaaattagatggaagttatcaatttaattacaaagacaatgataaaatagttggctctcacactattagtaatttatcaaataaaaaattctttggtcataaatggtttgaattttctgaaaaagaacaagaaaacatttggcatgtgctttctttttttgatgatagagaaaaattaaaagaatacgccataaaacattggagttttgatgaagaacgagctataagaatttctaaatttaatttaaaagatggctattctaatcttagtagaaaagcaattttaaatattttaccctttttacaaaagggattcatgtacgatgttgcagttggtttagcaggtgttaaaaatgcattgtccataaactgggaacaacataaacaatttgtgttagacaatgtaccagacatagtacgctcaaatttaaaaggtggttatatagaacctcttaaaagtatgatgaaaaatgaatttaattgtactgataagcaattagaaaaactatatcatcatagtagtgcgattgaaacagaaaaaattctagagagacttcctgtaaatttacatgcggatagagaaatacaaaaaattaaaaaccctgttgtaataagcgctttatttgaaattagaaaactagttaatgagttaattgatacctatggtaaacctaatcaaataaaagttgaattagctagagatttaaaagcatctaaatctaaccgtttagaaactcggaaaaaacaaaaagaattagaaaaacaaaacgacagagtaaaggttgaactagaaaacttaaatcaacgaatcaaccacattaatatattaaaatataaactctgggaagaatgtaaccacacctgcccttttacaggcaaagtaattacgataagccagctttttacaggagaagtacaaatagaacatatttttccttggagcaggtctttaaatgatagttttaataacaaaacactttgctttgctgatgaaaatagagcaaaaggtaataagacaccctacgaattttatagcgaacagggaggtcaaaaatgggaggctattaaaatacaagctttaagctgttttaaaaccaaagccaattatcctaattgttataataaattcaagcattttgtgaagaaaaaacatgatgaagattttattagtcgtcagttaaatgatacaagatacataagtaaagaagctaaaaattatctttctaaaatatgctctaatgtactagtagctcctgggcaaatgacagctactttaaggcatcattggggtttaaatagtattttaaacaaagaagatgaaactaaaactagagatgaccacagacaccacgcaatagatgctttagtcatggcatgctctactagaagccatttacaagaattaagtaaaagaaacagatataacaaaaaccatgatttaaaagattttccagatccttggttgaatttcagacaagatgcagaaaatgctgtagcacagattttagtatctcataaaaaccataaaagcttattaacagttagaacccatagcactaaaaagaagggagttgtacataaaaatattggtgttgctgcaagaggacaattgcataaagaatctgtttatggtttaagaaaagcacccaattctaaagaagcatttcatataagaaaacctttagaaagtttaacaacagaaaagcatttagaaaaaattgttgatgatagtgttaaacaattaatttataaaagaatacttaatattggtggctttataaaaggaaaaatacccaaagaaactttttttgtagttgatgaaaacggaataaagcaaccccaaatatttttaccaaatagaaatggtttacctgtgccaataaaaaaagtaaggataaaagaaaatataggaggggcagaaaaactaaaggagaatataaaccaatatgttaacccaagaagtaaccatcatgtacttatttataaagatattgagggtaatttaaaagaagatgttgttacattttggactgctatagaaagaaaaagacaagggattgatgttattcaattaccaaaagacggagaagaaattgtgacaacattacaaattaatgatatgtttttattgggtctttctgaaaatgaaattaatttaaatagttctaattaccaattgttaaatcaatacttatatagagtacaaaaattatcctctaagtattatgaatttagattaatttcagaatcaaagattgataaaaaatcaatccctcaatatagaagaattactggttatggagaagggattggtggttggctaactcacaaaccaattaaaataaaagttaatagtattggtaaaataaaaagattgtagtttttaataactataataaaagttcattgacatatttttaaggtttgattaaagattagaaaaaacgatatttgtagctcttgtcatttcttgcggactcgcgttgtggtttgattaaagattagaaaaaacgatattggatgcaagatgtaaagcaattgtagaagtgttgtggtttgattaaagattagaaaaaacgatattatcttttgcgctgtaatcaataggcgttacgttgtggtttgattaaagattagaaaaaacgatattagcattgttagatacggtttcttactatcagttgtggtttgattaaagattagaaaaaacgatattaattttaaaactaaatgtttatcgtccaacgttgtggtttgattaaagattagaaaaaacgatattaaccagcaggtgttgaattttacaaaataagttgtggtttgattaaagattagaaaaaacgatattccgcatcgctatcattcattcctaaacaccgttgtggtttgattaaagattagaaaaaacgatattaaaagaaactatagagcaaactcataatgtgttgtggtttgattaaagattagaaaaaacgatatttattaatatcttctaaaatttcttccattagttgtggtttgattaaagattagaaaaaacgatattttgatttacaaatatatttatccccaaactgttgtggtttgattaaagattagaaaaaacgatattcaacaaaagaacaaagagacaaagaaacaagttgtggtttgattaaagattagaaaaaacgatattagttgttatactagcttctaattatcatatgtttaagtgaaaatatcggatacaaaaaatgcttcttgcaaagacataattgctttgtttgaagcattttttgttttctattaaaacaattctaactgcatagggctaggctctttaggcacaattactttaccccaaaaatttattatatttccatattgtttatcggtaattcttagaatacttactttaccaaatggtggtaaaagtgcttttattcttttttcgtgtgcatctgcactttcactacttgcacaatgccgcatatatacagaatactgcatcatagtaaaaccatcttttaaaaggtttttacgaaattgctgcgcatttcttctatctttttttgtttctgttggtaaatcaaaaaatacaaataaccacataaccctatatttatttagttccataattttgggtatacaatttttctggttttaccactaaaacattgttgcaaagaactggttgtggtagacaaagccaccattaaagggctttctttctctttaaaataaacagtttgtgtaagaatacttaacaattctagttttattggtgtaatgaggtcttgttcattataatttttcattatttctaaaacttttgcatctactaatggtctgtaaggttccataatatcgtctgctaaacaaaatgcattgtatttattatgatgatgaattcctaaagtacttaacaacccactgccagaaagtgctcttgcaacagcagaccttaaaacaatatacccatagtttaaaaacaaatttggatacacacctacgcgttctcttttaaaattgaagtcaaaaatatttttccaatagtaagaagctgaaacagcttccctgttatcggaatctccacttaaaacttttgatgcataataacctaaaggactactgttttttccaagtttctttaaaatttgagcttgattactaatcttcaatttaacaatttgttgccacaattgtttttttaagggctcagtcgcattaatttgattttcaaaatgtctttgctgtatatgatggttatctaaatttaacaacatactttgaggcatatgtttattatcgcaaaagattacactaacattattacttgtaagtttagatagtgctggaacagaaatatatgtttcttgattttctataactataaaaccaatgtcttctataggtactgtttttacaatttgtgtatcattttttattactagctgttcatatttagttgttaatgagcatttattactaaagaaaagggttcttttaatcatatttttcttttaaaagtaagaaattcccctatgaatcatctatttaaattataaaagctattttttagtatcctacattagggatagtaaagtttacaatattaaaatataaggcacacttttaggcacactaaaataatagagttaaggtaagtactataaacactaataaaacaaaaaaaggttcgaatccttcagggctcacttaaaccatcacagaaatgtgatggttttttgtttatataaagtttttataa

SEQ ID NO: 2674 - DNA, 4184 bp, synthetic construct
  misc_feature 1..4184: note = Synthetic
  source 1..4184: mol_type = other DNA
atgtccgattggtcgataattttttggggtttgttcgggtcatgttcgggggttgttcggtagcgcttcggtaaaagggtacttttaccgaacaaagggcgaacaaaggtgggagaaaagcaacttagaggattataatatctaagaaaagtttagataaaataaatttactttgagtagtaaataaaaaaagtcccaccgaagcaggactaaagattttcatctacggcatatagccttattgtgataagattaaagattagaaattttaatcaagtcaaatttatgtatttcttttttaataacaatgcaaaaaataataaaaattgtaagaaaatattttgtagttttattcttcaaataaagtatagtgattatggcaaaaatattaggtttggatttggggactaatagtattggctgggctttgattgatgataagcaaaataaaatacttggtgtagggagtagaatatttccgatgggagttgataacttgggagatggggaaggcgaaatttctaaaaatgccagtcgaacaggggcaagaggagtaagaagacaattctttagaagaagattgagaaaaaaagttttattaaaagcactttctgaaaataaaatgtgtcctatggtagcacaggactttgaagattggaaaaagactaaagagtttccttctgacaagttagcagtatggtttgcacttaacccttatgaattgcgtcataaagcattaagcgaaaaactttctttagaggaaataggcagagtgttatatcatttgattcaacgtagaggttttttgagcaatagtcgtaaaggtggaagcgatgacggtgctatttttaaaggaaaccccaaagaaggaaaaattggaattgatgatactttagaaagtattgaaggtaaaactttgggttcctatctttattcaatatatcctaaggataatcaaccttttcaagacggattggaacgtatcagaaaccgttatactgtcagaaaaatgtatgttgatgaatttgaattgatatggaataaacaagcacaatatcatactcttttgaatgaagatttaaaacaactgtttggaggcagaaaacaagatggatataaagaagatggtatattatttcatcaacgtccattacgatcacaaaaacatttagttggaaattgttcttttgaaccaagcaaaaccaaatgccctattagtgcaatacctgttgaattgtatagaatataccaatgggtaaatactgttgaatacaatggtaagaaaatatcaaaagaagagaaagacaaaataattgagcaattacttttatctgataaaatagaatttaaaaaactgcggaaagcaattggtaaagacagtgcagaatttaaattcaattataaagatgatgataagattgttggcacacatactatatctcatttgtcaaacaaaaagttctttggaaaaaaatggtttgatttcacagaaaaagagcaagaggatatttggcatgtactatatttctttgacagcaagtcaaatttaaaagaatatgctcttaaacattggaactttaccgatgaacaagcagaagctatatccaagtttaatgtaaaagatggttattctagtttaagcagaaaagccattggtaatatactgccgtttttacaacaaggcatcctatatgacattgctgtagcattgggaggtattaaaaatgcttttggtgaccaatgggaaactctttctgatgacaaaaagaattttataattgataacgtaccggatatcgttagagcaaaaatatcagggggttatatagatactattaaagacttgcttcgtaaagagtttgggtttactgacaaagaactaaaaaagttgtatcatcattctgcgagtattgatgttcaagcattattggataaacttcctgtaggtaaagatgccgataaagaattacaagcaataagaaatcctatagtgattactgctttgtttgagttacgtaaattggtcaatgaactaattgatgatcatggcaaaattgatgaagtaaaagtggagatggcaagagatttaaaaatctcaaaaatgcaacgtaacaaaattagaaaagagcaaaaacgtttagagcgagaaaatgatagagtaaaagaccgcctaaaagaagaaggacaacgtatttctcatgataatatactattatacaagctttgggaagaatgtaaaaagacttgtccatatactggaaatcctattcctcttcataaattgtttaccggagagattcaaatagaacatattcatccgtggagccgttctttgaatgatagttttaataacaaaaccctttgttatgccgatgaaaatagacgtaaaggagataaaacaccgtttgaattttatggcaatgatgaacaaaattggagtagtataaaagaacgtgcattaaaattgttttcagatactaaagaatatcctaatgcgtatcaaaaatttaaaagatttgttcagataaagtttgatgatgacttttcatcaagacaattaaatgatacccgttacattagtaaagaagcaaaagaatacctttcacaagtttgcaaaaatgttatagtatcgccagggcaagctacttctaacttgcgtcaaaaatggggaatgaataacatattgaatgatgaaaatgagaaaacaagggaagaccatcgccatcatgctgttgatgctttggttatggcttgtactaaagtttcttatgtccaggaattatcaaaatggaatagatataatagagcaaccgaattaaaagaatttccaatgccttgggaaacttttagaagagatgcggaacttgctgttgagaaaattttgatttctcataagcgaacaactaatgatataactgttagaacccacactacagaaaaaaatggggtgaaatataaaaatgttggtgtagctgctagaggacaattgcataaagaaaccgtatttggtaaacgtaattttaacggagaagaagcctaccatgttagaaaaccaattgacagtttaacaaccgaaaaacaactagacaaagttgttgatgaaactatcaaaacattaatcttaaaaagaattcaagaattaggaggttttgtaaaagggtctattcctactaatactttttttattgttaatgaaaaaggcataaaacaaccccaaatattcttgcctaataaaaatggtgccccggtacccattttaaaagtgagaatgaaagaaaacataggaggcgcagagcaattgaaagataatgttaaccaatgggtaaatccaagaaataaccatcatgtattaatttataaagatgaaaaaggaaatctaaaagaagaaatatctactttttggactgttgtagaaagaaagcgacaaggtttggtagtatatcaattacctaatgatggaaaagaaatagtaaccactttacatattaatgatatgttcttgttggggttaaatgaagaggaaattaattgggataatctagattatgatttattaaatgaacatttatatagagttcaaaaattaacatctggagattatttttttagaaaacataaatcatctacggtaactgatgatgattataaacagataagaggatttggagaaggtaaaacaggttggtttacatttaatcctataaaagtaaatatttcagtttctggaaaaatacaaaaattgtaataataaaaagttctttgacataagattttcatagtcttaaacaaccaaaccacaacggaaatcgaccttcgatttctgttacaacgatttccgttgtggtttgattaaagattagaaaacacgatattaaacaggatggtgcaataactaaactttctgttgtggtttgattaaagattagaaaacacgatatttacaacggacaatatcaacaacgccaccccgttgtggtttgattaaagattagaaaacacgatattgaaatagtaagatatcgatttgatgtaattgttgtggtttgattaaagattagaaaacacgatattttcaaccgctttgatgacatcggcactcagttgtggtttgattaaagattagaaaacacgatattgccataatttacgattaccaccgataccagttgtggtttgattaaaga

SEQ ID NO: 2675 - DNA, 4179 bp, synthetic construct
  source 1..4179: mol_type = other DNA
  misc_feature 1..4179: note = Synthetic
gaagttgaaatcttgtacagcgtttttacgagagaaaaaaacactgtacaaaaaacgaagttgaaatcttgtacagcgtttttacgaggcaaaaaaacactgtacaaaaaatgacgttgaaatcttgtacaaactttttagagaggggcaaaaaattgtacaaaaaaaggaatccaaaagcaaaagatccttcttaaaataggaaggatagctataacaacgagaggctactaaaaacttcaataaaaaacagacaataaccaaaatagatgctataaaaaaagtcctacacgaagcaggactcaagaatttcttctacggcatatagccttattgtgataagaattaaagattagagtaatttttttcacagttcaaatataataaaaaaagcttgttaagcccccaaacaatttttatttttataagaaattaaaagctattaaaacaatgtcaacaatacttggattagacttaggtaccaactccattggttgggctttaataaacaacacaacctcaaaaataataggagtaggaagtagggtattttcagaaggagtagtagatttaggaggcggagaaggaaaagaaatgtcaaaaaatgctagcagaacagtagcaagaggagtcagaagacaattgtttagacgcaggttacgcaagcggtacctattaaaagaattggccaaacaccaactatgccccatagccccagaggccttagaaaattggaatcaaaccactgtttttgacaccgaagttttaaaaaaatggtttcaacttaatccgtatgaattaagagccaaagctattaaagcacctatttctttgcatgaaataggacgcatattttatcatatgatacagcgcagaggttttttgagcaatagcagaagcgcaggagcagcaaccaaagaaactagtgctatttttaaaggcgatttaaaacaagagaaagtagggatcgctagtactcaacaaagcatagcccaaagcatcactttaggaagttacttgcatacaatacaacctaaagagcacgccccatatgtaaaaaagtagcacgtataagaaatagatatactactaggcaaatgtatatagacgaatttgaaatgatttgggaatttcaaaaacaatttcatgcagtattaaccaactctctaaaaacccatttgggaggacgaaaaaaagacggctataaaaaagatggcatcctgtttcatcaaaggccattacgctctcaaaaacatctagtaggcaactgtaccttggaacctaaaaaaacaaaagccagcataagttccattccctttgagtattttagaatataccaatggataaatacattggcatgcgattttaacggaaaccaccatcccattagccaaaaagagcgccatcaaataataacactattactatcagcagaaaaagtagcatttaaaaaaatacgaaaagccataggaaaaacagaaaaagaataccagttcaattataaagatgacgctattatttatggtacacacaccattagtaacttatcaaataacaagttttttggcaagcaatggttcaactttactcaggaagagcaagaaaatatttggcacatattgtctttttttgacgatcgtgaaaaattaaaaaactatgccatgacccattggcaatttacagaagaaaaagccattaaaatttcaaaattcaatttaaaagaaggttatgctaacctaagtagaaaagccattaacggaattttaccttttttaaaagaaggctttatgtatgatgtagcagtagcattggcaggggttaaaaatgctttaggaaacacttggcaaacacaccaagaatttgtaaaaaacaatgtgcctgaaatagtacgtgcaaatataaaaggaggctatttagcacccttaaaaaaaatgttagcagcaacgttggcctgtacccccacgcagctcaaaaagttataccaccatagtagtgctataaaagctactactatagcaccaaaattaccagtaggagatattgctgataaagaaatacaaaaaataaaaaacccaatcgtaatcaaagccctttttgaagtcagaaaactggtaaacgagctaataactacctacggaaaacctgacgaaataaagatagaattggcaagagatttaaaaacatcaaaaaaaaataggtatgaaataagaaaacaacaacaatttttagaaaaagaaaataacagaatacaaaaagaattggaaaatttagcacaacgagcaacgccaaccaatatattaaaatacaaactatgggaagaatgcaaccatacttgcccatataccaatacaaaaattcctattcataagctttttacaggcgaaattcaaatagaacacatttacccatggagccgctcattaaatgatagctttatgaataaaacactttgttatgctaatgaaaatagggcgaaaaaaaataaaacaccctatgaattttatcatgatgagcaaggcgaagaaaaatgggcgcaagtaaaacaacaggccttagcatgctttaaaaacaaatatccgaattatcccaatgcttacaataagtttaaacattttgtgcaaaagaaaagagaagaagactttgtaagtcgtcaattaaatgacacaagatatattagcaaagaagctaaaaattacctgtctaaaataagcaataacgtacttgtagcatcagggcaagcaaccgcagcactacgccaccattggggattaaatagtattttaaatgaagtagaaaacgcaaaaactaggcatgaccataggcaccatgctatagatgctttggtaatggcttgtataacagcggggcatgtacaagctctaagccagtggaataggtacgacagaaattatgaactaaaagactttgcaatgccttggccatcttttagagtagatgcagcagtagcaataacgggcattttagtatctcataaaaaagaaaaaaaattactgaccgtaagaaaacacacggttataaaaaacggacagccatataccaataaaggaatagccgcaagaggcctcttgcacaaagagtcagtgtacggaaaaagaaaagctcctggtaaagaagaagcttatcatataagaaaacccatagaaagcataactactgaaaaaaaattagaaaaagtagtagatccaacaattaaaaatctaatttttaaaagaatacaaaaattaggaggctttgtaaaaggaaaaataccatcagaaaccttttacaaactagcagaaaacggacaaagagttcctcaaattttcttacccaataaaaacggagctcctgttcctattaaaaaagtaagaataagagaggtaataggaaaggcagtaccgttaaaaaatactgtcaaccaatatgtaaaccccaaaaacaatcaccatatattaatttataaaaatgccaaaggaatcatggaagaagaagtagttagcttttgggaagcggtagaacgcaaaaagcaagaaatagacgtgtttaaaatgccaaaaaaggggaaagaaaaactagcaatactccaaaaaaatgatatgtttgtacttggcttagacatagaaacagttgaggaagcatggcaagataacagcctgctaaaagagcatttatacaaagtgcaaaaaatatctagcaaagattatagttttagaaaacattcagatgcaagaccagacgaagccgcaaaaaaagaatatattcgtattactagtttaggagaaggaaaaaaaggatggaaaacaatgaaccctattaaggtaaaactaaatagcataggaaaaatagtaaaagcatagtgcttatagcattaacgttctttgaaatatataaacatcttttgaactataaaagattagagataacgatattttcaaatatttaattgcgttacaccaagtagttgtggtttgataaaagattagagataacgatattgttacaactgagagttttaaggagaacttagttgtggtttgataaaagattagagataacgatattaaagaattgccagagaaaaagcagagaaggttgtggtttgataaaagattagagataacgatatttaaatcctccaattgaagttggggaaacagttgtggtttgataaaagattag

SEQ ID NO: 2676 - DNA, 23306 bp, synthetic construct
  source 1..23306: mol_type = other DNA
  misc_feature 1..23306: note = Synthetic
gtggtcaccacggtcttctcgatcttctcgcggcactcctcgattaccctgttgaggcccccgagggcaacgtcataggcgggaatccagcggccgtcacagccggcatgcaggcccgaccccgggaagaggccgaccttctttgcgttgacgtagtcctggtagtaggggaaggaggtcttcatccaatcgtcggacacgttctcaacgcagcgtgtcttccaatactcgaggacctcaagcatcggcttgacctcctcctcgcggatggagaacagctggccgaccttggtccacccttcctcttcgaccgtatgggcctcatccttgccctcgacggaatacagctttgcctcttccttctggtcttcggcctgggtgaggaaggagatcatgaagtcagtggcgaattgggggacctgggtggcaccacggtcatagcgcgtcttggacatggtgatgagctcgtcctcacggataaccggcgtgaggtgctcgagcatatacttataggcaagccccctgcggacataaagcggcttgccttcatgctcgcgccatgccttggtatatgcgatgggcgcctccatgtccatcttgcacttggcgttcatgaagcgttccttcatgcgcctggtgcggtcggtcgaaggagtgcccttgacctccttgtcgacgacctcgccgctttcctgcagctgattctttgccggccacgtggccgtcttaccggtctgcagcatctcgagaaccagagactcctccatgtttcctccttcaagttacctgccgatataaacgggcacggcctgccgaccgtctctgatgatcgacaggcctttattggtgccaaatctatccggctcggaggaaaagcgacattggccgaactcacggtttttcgaggccacggcccccttccccctgagaaagtaatacgggccatcagggggataggactttcgtattatcgcgatacgcacggccacacggcaaggcacggcctcgccgctacgaatgtcgtcaatctattggagtgcgcctacggaacaagcgctcgtgcgcgtccggtctacttcgtgccgtagatgcggtcgccagcgtcgcccagccctggcaggatgtaggcgctctcgttgagctgacggtcaagggcacaggtgtagagacggacctcggaatcgaaatccagcacggtcttgacgccctcgggcgcgctcaccaacgtgagggcacgcacgtccttgacgcccgcctcccgcaggaactggatggcagccgtcaacgagccgcccgtggcgagcatggggtcgacgatgaggcagatgcggttctcgatgtcatccgggaatttgcagtagtactgatggggctcgtgggttgttgggtcacgatacatgcccacgtgcccgacgcgagccgagggcacgagttcgaggatgccctcgaccatccccaggccggcgcgtaggatggggatgatggcgaccttcttgccggagatcttcttgcagacggtcctctccagcggggtctccacctcgacgtcctcgagtgggaagtcgcgcatggcctcatagccctcgaagatggcgagctcggtcacgagctcgcggaactgcttggtgcccgttgacttgtcgcgcaggatatgcagcttgtgctggaccagcggatgatcgataaccgtaaggcgcttctcgtcaaactccattcaggatccctttcctcggctcgcatgcatcgccctctgtcattcgggccgattctaccgtatcgcactacggggagaaagcgggccgcacccggcaggagcagccgcacggccgataccagaggaaccccccgccacggcacggcggcgcgtggtgctgacggtcgtactccccctcgcagcccgtcccagtggctaccggacggggatgggatcctcccccacgccctggaaaccggggtcgtcctcgcgcatggcctttgcgacgcgaccctcgtggcgacccccgccgaactcggtggcaagaaactcgtcaactatttccttgttggtcgcgaggctcgtgaagcgtcccgagatgcacaggacgtttccatcgttgtgctcgcgaaagagatgggcgaactggggcgtctggatgacggcggcacggatgcccgagaccttgtcggccgtgatcgccatgccgatgcccgtgccacagatgaggattcccctctcggccccgccggccgccacgtagcgcgcgaccttgtcggcatagtcagggtagtcacagcgatcggccgaggccggacccatgtcgacaacctcatggccgaggccggcgaggtacgcaaccagggcgggcttctggtcgaagccggcgtggtcggaggccatggcaatcttcatgcgcgaggtcccttctctgaacggtgctagaggttccgtggtctcgtctaggaacgtgatgtcctctggcagtctatcacccaaggtcccgtcagcactcccatggcgttgcgggcatcgggcggcgggcattaggggcatggcacggcagacgggaggggtacggcgcggaggaaggccgcagctcccaactgccgactccggccggcagttccggccggcagaagcgcgcttccggtcatccgaggcgcgcacccctggaagtgagtacttttttggcctccccgggacccctggcgcccggcagacgcgctactctcggcatcaccgcaggtacagggcttgctgagatttctggaggtgtgcactggcacacacttccgatggtcctgccgccgacgatgcgcacttcgggctgtccgcggcgccatcgacgtccgtccccggaccctgggctctacgcccaggcgtcagggtccgccacgcgcatgatccccacgcttggaatggccccctcccgcaggacgcgcggatccgccccggtgcagtccacgatggtcgatgcggcggcgaggggtgacgggccgccatccagcacaaggtcgacctcgcccgcgatgcggccctcgacgccctctccgctggtggcggaggaggcgccgtgcgtgttggcgctggtgatcgccaagggcgcacccacctcgcgcgctatctcgcgcaccaggttcgagtcgggcaggcgcagcgcaatcgtgccgtcgtccgagcgtcggtactcggcaggcaccagtgggcttgcgcgcacgaccagcgtgagcgcgcccggccagaactcccgcgcgagggcgtaggcccacttcggcaccctgtggccgaagcgctccaggtcctgcacgtcggcgatgagccatggcagcgtctgggacagggcgcggcgcttgatctgaaacgtgcgggcatggcctgggttgcccggcgtcgccgcacacccgatcccatagacggaatccgtggggaccacgatgacgcccccatcgagaaggacgcgtgcgacatccctgacgaccatgcgctccggccggtcctggtcgaccgcgagcagcttgcggggccggaccatgacaccccctgccgcaaggtcgccctcgcggacggccacgaggacacgtggtcgatgcgtgaggtcctctcggacctccacccgagcccagccaccctgccgacggcagagctcggccgcgacttccgcgttcgtctcgaacaactcgcatgcgagcatgccgccgggacgcagcatgtccggtgcaacctcaagcaggcggcgaaagacatcgaggccgtcggcaccgccatcgagcgcaaggtggggctcgaagcctacgacctcgcgcggcagggtgggcacgacatccgaggggatgtagggggggttggacaccagcacgtcgaaggtccccctcagagcagggtcaacccccgaggcgaggtcgcacgtgatgacgtcgaccgcgcgggcaagccccagggcgtcacggttgcgcatggcaagggcagcggccgcaggcgcgaggtccgtggaaacgacgtgggatcccggccgctcggacgcgatggagcaggctatgcagccggttcccgtccccacctcgaggacctgggcgtcatggccggctgcgacggccacgtccacatgcgcgagcacggcatccaccaggacctcggtctcgggacgcgggatgagcacgcccccctcacaatgcaggactatatgtcgaaacggcatctcgcccgtcacgtactgcagtggctccccggcaccacgacgcacgaccgcatcgtgcatgcgcgcaagctcgtcggcagagagcggacgatcgaagctggtgtagagctggacgcggctgaggcccgtcacgttggagagcatccactccgcagagaggcggggtcgcccgtcggacctccgctcgagatagccgatggtccagtcgagcatgcggcgtatggtccaggcctcggtctccatggccataatcagacggcccgtgcgagcttctccgcacgctcggccgcagccagggcgtcgatgacctcgggcaggcggtcccccaggagcacgccgttgtaggtactgttgaagccgatgcgatggtcggtcacgcggtcctgcggctggttgtaggtacggatcttctcggcacggctgccgtggccgatctggcccaggcgtgcggcgccctgctcggcctgctgcttctcgagctccacctcgtacaggcgggcgcgcagcatctccatgcagacggcacggttctggatctgggagcgctggtcctgcgactggacgacggtgttggtcggaaggtgcgtgatgcggacggccgaatacgtcgtgttgacgcactggcccccggggcccgaggcacagtaggtgtcgatgcgcagatcctcgtccttgatctcgatgtcgatctcgtcggcctcgggcaggacggccacggtggccgttgaggtctggatgcggccctgggactcggtcttggggatacgctggacgcggtgcacgccactctcgaacttcatgaccgagaagaccttgtcgccagtgaccttgaactcgatggtcttgaagccaccagcctcggagggactggacgagaggacctccgtcttccacttgtgggtcgaggcgaagcgcgcgtacatgttgtagaggtcaccggcgaagatggcggcctcgtcgccaccgacgccggcacggatctcgacgatggtgttcttctcgtcgttggggtcgcccgggatcagcatgaccttgatctcgtcctcgagggcaggcagcttggcctcattggcaccgatgtcctcctggagcatctccttctcggacgcatccgaggtctcgcgctgcatctccttggcaacctcgatgtcatcgagggcaccgacgtactcgcgcgccttggcgacgagctcggcttggctggcatgctcttttgcgatgcgcgcgtactccttggggtcagagacgacggtgggatcgaccatcctcttctcgagctcctcgtacgcggcgatgagcttctctagcttgtctcgcatggtagttctccttgcaagtgggccgcggcgtacggaatgccgtacggtgacgcagcatgattagtcagcattgcaaagtctaccaccacaggggtgcttcgattcaggtgggacaaggggacagtccctttgtctcacccttgtctcaccactcggcaaactcgaggccgtagcgggagcgcagccaggcaacggtgtgggacgtcgcaccttcgctgaggtagatggtcgtgccgctggagttttcgtcaagcgttgcagttggatagaggccaatgctggcacggtacggcgtatcgaccgccacgcccaagaggcttcccgagctagcctggccctggtaggtggtagctcacgaccacatacgacgagcctgcgctgcgcaagaccttatctacctgaccgcgaagcacctcctcggctatggggtcttggagaaggctctcgactgcgtgcaccatcctgctgtcctcattgggcaaggcaccgttgagcgggagcgggtactgacgccaaacgctgctgccgtccttcatctggtatgtgagagtcaccgtgtagacgctcgaacccattggctcgccgccagcagcggcaatgtctgcaagctcgctgtgcagctggcacacgcgcccgatgccctcctcatcctcaaagggtacggagatgtcagagatggccgcactcttgacgtctgcaggcttgggtatgaaggctgcggcccctgcggctggggcaacgcaggcaatgctcgccacaagggccacccctgccatcaccacaagcgctggaaaacgcttgcgcaggacggcaaggccatgccccatgatggcctcggtcgccgcatacaccaataccgagaagaacacgggcaatgaacatgccagctgaggagatgccccataacggaccggggatgttctcgcgagcacaagtcctgcaatggcaaatcccacaatcgcgctggcaagcacattcaccacgttgcgcgcgacaggactcacaaaggggtcgcctgcgcgctcaaggttgcgacggacaaagagcagcatcgcaagcgccacgcacgcgagccccacaagcgcatatacggtcacggcctgcgtcagcgccgcgtcaagaccagggtctgggaaggggcatgtgctcgaccacgagatggcgaccctcaagagatgcaccagcggacttgcccaatcaatcccttcaatggatgcgtttaccaccattggcgcaaccatggcgtagagggactccgcaatctgctgcgcggcaaacgcgtagagatttgccaggaggtagcacagcagggcagaggcaggccggcccgccaactgcagacacagggcagaaatgccaccaaaggccacgatgagcagggcatgtcttgccatccaaggcagtatcgcggccgcgtcctgcccaaagccgagtatcgcggcaaacacaaagcccgaaatgcccaccgcgacgaggagaggaatcacgctcgccagggcaactgccaggaagaccgcctctctccgcaccggaagcatgccatagagctgcaccgccctgcggtcaaaagatccacgagaaggctccattttcagccgcgaacgagacggctacggagagaaccagtacacccacgccggactgcgcaagctcctgcgcggggtctgcgggcggtgtatgcccagcaattctcagcgccagaccgaccagccagaagagccagacgataaggtagcccacccccaagtatgcataccgctggcaggtgtcgagaaagagcccgaccaccggtgagggagcgcgatgcccctcgttggacttcttgataacgttgaagccggcaggcagggatgcgccttcgggcagaaccacctgcacctttgcgacgctctccaaaggctgggacaggtcgatctcctcgcgcattgtgcctttggccataatccccaggtggtcgcaaacgccctcgagctcgcgcaggttgtggctggtaacgagcaccgtaaggccgcgttccgcgacctcttcgagcaccaggcgccacatgcgccttctggcgagggggtcgataccgtccataggctcgtcgagctgcaggacgtccgcgcgaatggagagcgcaagccagatggctgcctgcacgcgcatgccgcggctgagcttgcggagcggcttcgtgtggtcgacctcgaagcgcttctccagctcgaagtagcgtgcgaggtcaaaggcggggaacatcgcacagtagaagcccgctatgccgtccgcactctcggaaccaatgaagtagggctcggaagtagggctcgccgggaacacaggagatgcgagccttgatgcctgggttctcgaagaccttctcgcccaggacgtacgtcacccgaggtggggcacatgacaccacaaaggtgcgagatgagcgtggacttgccgcaaccgtttggccccacaagcccaaagaccgcgcccttggggacggtgagacccaccccgtcgagtgcaggcgtgccgtcgaagaccttccgtaggtttctgacctcaatggccgatgtcatcacccctcgcctcccccgactctttgcccaagctccgcgggcgtcacgcccagggactcgagctcttggacaagctggtcgaaccgctcaaatagctcacgccgacgcgcctccgcggcgcccgagacgtctgcgacgaagcttcccttgccccgcaccgacgagatgcagccctcttgctccagctcgcggtaggcacgttggatggtgtttgggttcacggcgaggcgcgaggagagctcgcgcaccgaggggagctgcacccccggctcaagcactcccgccaggatctgctggcgatatgcgtcgcgcacctgctcatagatgggacgcgggtcctggtagctaatctgaatcacggcacctcccgtccccgcggtggacaatcggacggcagcacggccgagacgctcggccgtttggcatccgtcctaactgtattagtgaatttaatacagttagggtggagaaaaacaccgtcacgtggttggccggcaagcagtagcaacgtggcggcgaacgcagcgagggccctacgccctaccctacttgcccctgtcggcaagtttctcgcccatgagcaggcccatcaccgaagccatcatgaggccgcgggtccagccggaagagtcgcccaggcagtggaggtgctgcacgttggtgtcgaagttctcgtccatctggacgcggttgctgtagaacttgacctcgggcgcatagagcagcgtctcgtaggaggcaaatcccgggaccacgcggtcgacggccttgatgaactcgatgatctcgaccatggggcgcatgggcatggcggcggtgatgtctccggcctcggcgtcgggcagggtgggcaccacgttggattgtgagagctccttgggccaagtacgcttgccgtcgagaatgtcgccgaagcgttgcaccaagatgtggccggcccccagcatgttgacgagttcgctcacgcgctgcgcgtagaggatgggcttgtcgaaggggcttttgaagttgagcgtgcagagcacggccacgttggtgttggggctcttgcggtccttgaacgaatgaccgttcaccaccgcaaggccttcgtcgtagttctcctggctcacaaagccaccggggttctggcagaacgtgcgaaccttgttcttgtagggattggggtagccgatgagcttggactcgtagagcacgtcgttcacacgctccatgacctcgttgcgcacctccacgcgcacgcccacgtccacagggccggccacgtgaccaatgccgtgctcgccacacatggtgccaaaccagctcgcgccacgacgccccgtggcgacgatcgtctcgccagccacaatgcgcatctcgccgtcgcgactgcgcaccacaaggccatggcatacgccgccctcgatcacgacctcctcgcactcggtctcgaagaggacgttcacgccggcatcgagcaggtgcttctcgatgcgcgcgtagagctgctgggccttctcggtgccaaggtggcggatggggcagtccacgagcttgaggcctgcgcttatcgcgcggcgacgaatctcgacaacgtcatctgcatgtccgaggccctcgacgtgcggatcggccccaaagtcgaggtacatctggtcgacgcgatcgatggtgtcctgcgcgaactgatgaccgataaggtcgggcaggtcgccgcccacctcgcgtgaaagcgagagcttgccgtccgagaaagcaccggcacccgagaagcccgtggtaatgcggcacggctgacagtggacgcagtggcccaccttggccttgggacagctgcgcctctcgacgggcagtcccttctcgacgatggtaatggagcgcgtgtcccctttgccgataagccccagcgccgtgaatatgcccgccggtcccgcaccgacaatcgcaacgtccgtgtggatggtggtggttgtgtctgccatgctccccttgttcctctccgcgaggtgcgccgcaccgtgggtgcgtccttctcgcgtgcttcattgtgccccatttttgtgcgagaagtcttcgcggtggcgccgttctggcgaaccgcggcttcgctcggcaactccacctcttccaaagcgaagtctcccgccaatgggccatctgccgagaagcccgaattaatgtctggtgcgcttttatacttttcaatcgtcaagcatacttttccaatcgtcaaactatcagaggagcgcccatggaaaccagccgtccctatttggttctcggccttgatcccggcattgccagctgtggtttttgcctcctggacatgacgaaccacaagattctcgagatgggctcccacctctttgacgcaccgcaagaggctaataaaaccaagacgagccttgccgtcacgcggcgcaacgcccgcagcgccaggcgcaacacgcttcgcaccgcaatgcgcatgaagcactgcctggcacttcttgagggcgcaggcctcattccggagggcgcagataaaacctggctccaaagcaagaagggcgacaagcccatcctcaagctccgtgccaacggcctcgaccgccagctcacggaccgggagtttgcccaagtgctttattcgctctgcggacgccgtggatacatcccacacggcgaggggcgcctgggcgagacagacgacggagaaggcaagaaggtcctcagtgccatcaaggcaaacgaggcaaccatgaagagggggaactaccgcaccgtcggcgagatgctctataccaacgacggaaagtcgcgcaaccgtggcggtgactattccctctgcgtctacaactcgcaaatcaaagacgaagttcgtaagctctttgccgcgcaacgcgccctggggaactccaaggcttcggaaacctttgaacggaactacgtcaactgcctcgaatgggagaagaagaccgtcgatcacgacactcgcatctatgagcttgtcgggtcttgctcctacttccccgaagagaagcgtgctgccgacacggacgtctcttccgagctctgtcgcgcttacgagaggctggggcaccttgttatcgtgcatgaggacggctccgaacagagcctcaccgccaaccagattgacggctacctcaacgtgctcttctccccctcaccgctcaagggaaacaaggggtgcaaggtcacgtacggcacgattcgcaaggaccttgacctcagcgggaaggacgtcttcaaaggcgtatcacaggacaaggagaaggacgagccattctccccaaaatcctggcgctgcctgcgcgaggcgctgtgcgaggaccacgaggacctgctcgcccgaatgctcgaggaccgcgagttgggagatgacatctgcgaggcgctgaccttcgccagcaccgaggcgagcctcaacgagcgacttgaccaacttgacattaccgaggaggagcgcacggcactgtgtagcagcgtgccgtttacgagcaagctcttcaagggctacggaagccgcagccgcaaagccctgggaatactcctcggcgccttcgaggagccggagattcgaatcctcacggacgcggagaaggcaactggccttctcgacctgcgccttgccgaccggggcattcgtgccgagctgctccctccctacaacaagtatgacccgacttgccgcaaccccgtagtcctgcgcgccatgggtcgcatgcgccacatagtcaatgcagtcattcgcatccacggcgtaccagacaagattcacattgagctcggacgtgacctcaagatgtccaaacgggagaagctcaccgtcagcaagaaccagcgcgcaaacgaggcggccaacaagaagtgggccgcaaaggccgcaggcattcttggctgctcccctgaggaagttccgggacgcatcgtgcgaaagctcgccatgcgagaagaccagggcgagaaggatgcatacaccggggcgaccatcgatcttgagcatctcgtacgcgacgaccgctactgcgagattgaccacatcctcccctactcgaggacgtgcgatgacagccgggccaacaaggttctcgtgctctccaagagcaaccaggacaagcgcgggcgcacaccgtacgagtggatgacatccggagagccaagcgcgccggattgggacgagtatcgcaatcgagtcatggccacgatcaagtacgcacgcaagcgtgccaaccttctcaacaccgacctcggccctgaggtgcaggctcagttccttgcccgcaacctcaacgacgaccgctacatgtccgtagccgtgaagaactatctggaagactgccttctgttccccgaggacggtcgcaagaagcacgtcactgccgtcgccgggggcgcgaccggcaaccttcgctgggtctggggcctcaactttggacaaggaaacaccaaagaccgagacgacgacaggcaccacgccgtcgacgcggcgataatagccgcctgctcggagggcaccgtcaagaaagtcgccgaggcaagctcaaagggtcgcgagacgttcaagcagctgcgcaagtctcgccttgctgacacccagccttggcccaccttcgccgaagaggtcatcgcgcgtcgtgccttcgtggtgcccgttcgtatggccaaccacggtgtcaccggacgcgtctttaaggacacactctaccacctggagggctttaccgatgacaagggcaaatatccgctagtcagggcaggcgaaaagaccgtcaagaaaggtaacgtccgcatcagccccgacggttcggtcaagctcatcgacggaatggccttcctgcggctttggcttgatccggacgcccggcccaacggcaaggtcaagggcaagtggtacgcagagccagtctactatgcggatattcctgctataaaggcagggacgcatgtgccgagggcatgcaccatccatgtggcgagaaacgcgtgggagccggtaccggaatcagcgatgcgacagaggccggtagttctgttcttcggtgacgtgttgattgcaggcgggcatgtcggtaggttcacgggaatcaacatcaacagttgtcgactaagtatcaccagtctattgaccaaagacgaagtgaccgattggccctctcttggttcctggggtcaagacacccaagttcgcgtcctccaagaggattgcctcggccactgctatgacggccttgtcatcaatccggacgattcaacattccgtctgcgcgaataaaccaaacgagtcgggggctatgcccaaccaggcacggctcccgactcgtcatatttccttaggcagattcttgtacacgctctgcctatgccccacccgaacgacctcgatgagcagcttgccctcgttgattgtcgctagaatcctgtagctaccgaccctgtatctccacccgctcttagttcccttgagcgctttggagccaggaatggacttgggattctcctcgctattcgcgaggttctcttccacccatttgagaatcatcaaccgttgcttcttctcgatggaaagcagctcttttgtcgcagcgcgcgaccattcgacctcgtagctcattcggcttccattgccatgtgcttgactccatccatcgagtagcgtacgccgtcgtctacggccaaggcgtcctcgtactcctgacagtcagctgcgtcttcgaccatttcgagcgcagcctcacggaccacatcggagaacgtcctaccaacgaagtcggcatatgcctgaatccaggacttctcctccggctcgaagcggatggtcgttgcttccatcgccattatcgttctcctcaaatcgtatttcgtcgtaatacgattatacccagatgcacttttctaaaacgcgagagtgagctgaggcccagggtcgtttgcccggcaggcattcggccgactatctacgagcacctctcgcccctcatattgcttctcggtgagcgtaaggacggtaactgcgccggcgatgggcaggttggccttcagcctcttgagatgggcgtcagcgctgtcgcgagagagcagcacgcgagagtagacgctgaactgctccatgtggtaaccgtccttgatgagaaacttccggaactccgcatatgacttgcgctccttcttgctgcccgtaggcaggtcaaacagcactagcattctcatgattctcatcatcgccccctattccagacccgccttctcaagcgggatcaccgcaggtagctcaagtagagacacatcgtttgccttcaccgctgccttgagcgcctcaagttcgttctctatggcaacttgaacgggaactcttcccagcggaattctgacgaggtactcaaaaaccgatgcgagttccctcttgctctctgacgtcaaggtcccgccgaggcccttctggataacgagcagatcaacgactggtcggaacggctcgataaggtcgtcaaccaaattgaaggcgttgagattgttgcaatggtggatgccccgcgaaacgagccatcctccactcacggccgtacggccaatgcccgctctaaggactgtgtagccatagtcaagagctgcggtaaaggggccgttacgacgaccaccttccgtaagagcctttttgaaataggcgcttgcggcaacggattccctgtttgacgtatctcccgagaggacgtccttggctattgccctaacggaagagccatccagacccaaaagatcgagaaccgctgcctgattcaatatcttcgcttgaacgattctctgccaaaggcgcttctgtattggctttgagatggccagctggtcatcaacaatcgctgcgtgccttgaatgcgcgcccagcgggagaaggagtccgttgggcatatggtcgtcgccgcaaaacatgacaccaatgccagcatccgagaacttggagagtgcagccgtggttatctgggcctggtgggtttctatgacaaggacccagatgtcttcgagaggtataagcccgcgaagctctccatgctggcaaattgcaagtgcatcattttttatggagagtgacgcagcgttctgaatacaaacagtcctctttggcatggcttctcacctcaccgttgagctataatgtcctcgtctagcaaggtttgtatcaactggggagttggaaggaatcacggctagacaagggaatcgcttttccgattacccgcaaggtaagcccgtcagcatctctggtgccggcgggcgatccttttttctgcgaacggttttcagaaaaaggtcttcggaggaagcatttgactactccaaacgccatttttatttcaccccaaaccaaaacaccccctgctcacggggggtgttttggtttggacattgtaccaactggggagttggagggccggcaagacttctgatggcacgtaacgtgagggcgcgaaattgtaccaactggggagttggagggccggcaagacgagcttgcgagcgtctgccaggagctcaggattgtaccaactggggagttggagggccggcaagacaccaagggtgcgcgtctgtgtgttcggcatattgtaccaactggggagttggagggccggcaagacgacagacgatgtagggttcgcgacgtactgattgtaccaactggggagttggagggccggcaagacggaggcgtcgagcacgtagacggtggagccattgtaccaactggggagttggagggccggcaagacgcgcatgccgagagcgtcgatggggtcttgattgtaccaactggggagttggagctcgatggcgcattatcgcagcggcacccaagaagttgggcatactgcccagaagtcagttgcgcacatgagccaaccgcgcagtcaggaggattcacgaccatccagaagcccgagccgcttgtcattgggaacagggcgttctacaccctcacctcgtacggaccggttgacgtgcaggtgcacgttgtccacaccacggacgaggaggtcgagcttgccgtacgaagcctggtgcgagaggccggcggaaccgagaaggacctcgccgatcccgcatgggtagccgacaagttcgatggcaccgagaacgagcggcgcctgcgcgagcagacccgcgcgtatctcagctccctgagcgaggactctgccgaggagcagaaggccgacgcgtgtctcgacgcgctcgccgagcgcctgtgccagtcggtcccggcatcccaggtggcgcaggtgaaagacacgctgttccaggacatcgcgcagaaagtcgccacgaccggccagcccatggaagccgttctcgcgcagatgggcgtgcggtccgaccagctcgatgcgatgctccaggccgtggccacgaaggaggtcgagcacgaggcggcgcttgacgcctatgcaagcgagaagaacatcaaggtcgacgagaccgagccgccacacctgctgcagctctccccaccgacgcgcaagccctcatcgcccgtgcgaaggcggtgagccagatggatcagctgtttgaggcggcccgtcgtacgaaggctctcgagacagtggttgctgagtgcaactgcacctacgtgcaggcaaccgaggacgaggccaagaagcgcatggaggaggtcgtggaggtcatgcgccatcgagaggagatgatgcgcgcagcagcaggctctgcagcgcggggcgccgagggtatacactaccgagaacctaggtattgctggaatgacgagaatgccgcttggctggatcccggatagtaagcccaacccgcatatcgggaccccaaccaaacggcattcaaggccgttgccaccaagatgaaaaactgggattactccttgcagtgctttacgatggtgtcaaccatccccttccccgtggtctgagaaagaatgttctcgcacgcactcgcgtccatgaacacattcataagcttctgaagcactgccacttggtcctcatcatgcgctttaagcccaaggttgatgatcagctgagcctgcacgggatggtcaaccatggcagccataggctcaaacgccaccggcttcttgggtttaactacggcaatgtagggcttagcaatgttctcgggctcgacgtgaggaatggcaacagaaatgttatccgactcgagtcccgttgggtaattgttctcacgggtgattatggcctggagccaactgtcctcgaggtaccccatgggtgccagcttctcacgaagccaagaaaatagctctgtcccagtggtcgccgtggcatcaaagaacacgagctccgggctgaagagcgaagtgtcgagtattgccattgaattcccttcgtttgctgctgatgagtcctactaagcaagctgcttggcgccgtttgcgaaaaccttaacaacgtggtcgaagtcttcaaccagacggctgtatgcagcgcttgttaaatcgtgccagtacactattgcgtcagcactcttggagcgcttggcttccatctcagcacaagcggcttcgccggcatacttcactccataggtgtagtagttaatcttgcggattcccgagtcaatcgccttcttatagtcctcgtccgatacgcccgagcctccatgcatgaccagtggaatctttacgcggtcccggatgtcagtaaggaccttgaagttaaggtgcggttcacccttgtaaatcccgtgtaccgtgccaaacgagcaggcaagaatatccgtgcccgttgatgcgatgaagtctgctgcctggtcagggtctgtgtatactgcgcccgactcctcggcagtgccaccctcgtcgcgttgacctgcctctcgcgatcccattgagccaagctcgcattcgagaccacagtcaaagccagagcacatttctgcggcacgctgagaattctcaaggttgacttcatacggctcgaaggacccatcatacatagcgccggtaaagccaatctcaagggcgcgccgcatgtaagaaagatgctcgcagtgatccaggtggacacacagcatggcactcgaacgatccgcaagtgcaaccatgacaggcccaatggaatctaggggcgtaagaggttcgtgtccttcagcgtggctcaggataacgggatagtcagtttcctcagcaacatcaatagcagccctcagggcttcaaagctcgggacgttgaaggatgcaatggccatattgttctgttcagccacagcgcatatatcacgaagattaataatcattgttactcctgacgacaatcgtactgtcggccatttcagttccttgcagcctcttctgcatcttgctcgtcaagcgtgtgctgaccataccgatgaaaaacggagaccgcctcgtcaatttgcgcctgtgtcatctcggccatcggcctgccagtagaaagcgccacggaaacggtcttcgctgcctcctcgaggtagacgcaagagaacatcgcttggcgaaggtccctgccaactgcaatgactccatgatgcttgagcactacagcaagctgatcaccaatggattcaaccgcctgtgtacccatagacagtgaccccggattgccgtagttagcaacatgacagggcccttctacggcatttgccatcgtggagaggttgcatggtatctcatccataaccaagccgagaccagttgcatagggctgatgcgtatgaattacagcgttgaccttaggcatatggtggaagatgtagagaagcgctgcagtgtcaaccgaagcctttcgcgttccctcgacgacgtttccctttccatcaacaacaagcatgtcctcagggaccatctcgtcgtaaaccatacctgacggcgtaacgatgaaaaggtcatcacccgcacgcacgctcacattgccaccagacagtgcgattagcccatatcgatcgagcttgagcgcacattccagcatttccttcttttcagattcaaacatactgtgaacttgcctccctgatttgttgtgggcaccggttttcctctcagtgttcgtctgcctgaatcaaagttttttcgccttggtggttcttctgctccgctgcgcagacctctcccgtgaacggatggcctcaatctggtcagcatgttccaagtagtccttatttacatcatgcgcacgggcaagaagcgaattagggtgaactttgttgcccaaattgacgaggtaagcaaagagctctcccccatctgagaacatctttgtggggacccagtatcgtcctttaaagatgttgtggtcctggacgcgtatgtatgtctttcctgaacttggaaaaggcctcactagaaaagtcgaaagctcagagagtttgtaggagtccacgcgcccaaggccagagaacgagatggaatcgccctcctcatcaatctccactcgctctggattggaaagcgaaacaaacgtattccatacctggtagaatgcgacagcgccaaaaatcaatgcgagaccacgagggatgaaggcatcaaggaccgcaatcgcgatgcaagcgatgcaaaccacggcgcaaagcgcgccagtgaaagtcacctcgatcttgtaaaatggtggctcgtagacaaaagacttcttcatgactctccaaacacgccggggccgcacaaaggtaagtgtggccccggcgttaggaatgctaggaaatgacccaggggaccaagacctcgtgctgtctacttactcctcactcttgacagcgtgaagctcagcagcctccttgagaatgcgcttgcggttccagatagcaagggcaatggccaggaccgcaatcacgatcatgccgataccattcatgagggagccgatgcggacgatgaaccacgtgagcgggtttgcgccgtcacaaatagaggaaattgcggttgcggtacccatgtcaaactgaacgtttgcggctgcggttgtaatcagtggcgaaaggtcagtagcaatgtaaagaccaacagtaagaacgatgataccaatgatgatgccgcggaagccgttgttgtgcacgacaggggtgatgagaacgaacatccacggaatcacagctaggtcagcaaagggaagcaccttgttgcccggcaggatgacggcgaggaagatgcagagcggaacgaggacgaacgagatggcaagcgtcacgggatggccaacgcctacggcggaatcgaggccgatgtaaatcttgccacggttcttgaaacgcttctctacaaaggtggatgcggcatcggaaattggaagcaggccctccatgagcagcgcggccatcttgggaatgagaaccaacacagcaccaagggacacagcaagggtcagaacctgagtgattgaagtggcaatatcactgggatcccaatatgcgaggcagccgataacaaggccaatcatggtaccaacgagaattggctcaccaaagacaccgaacttcttctgcagggtatccgtgttgatgtcgatatcacgaaggccgggaatcttgtcaaaaatccagttgaagagcatggcgattggcgcatacgctgccgtaaaaccgtgaggcagagagacgccaggcatgttgagagactcttcaaccagaggagccgtatagtcgccaaggaccatgatgacaatcatgttgaggatggcagcaataatgccccaaacgattgagtcggtaacaatcgcgacaagggcacctgtgaaagcaaagtgccagtagtcccaaatgtcaacatcaaccgtctgggtcgtattggtaagaagcatcacaatgttcactgcaaggccaagcgggatgatgatgattccaacagtggaacccatggcgattgcagcagcagcaggccaacccacgtccacaaccgtaagggacaggccaaagcgctcgaccatggtctggacggcaggagaaagggtcgtgccgagcagcgagttaatgacaaggttaaggccgatgaaaccaacgccgacagtcaaaccggcgcggagactcttaccaaatccggcccccaagcaacaccccaagatggtgagcacgattggcatcattaccgacactcccagtcccgaaataaactggaagaatccaagaaaagcattcatctccattcctttcctcaaatacttagcccaacgtctatgcgcccatcagcgcaagcaacacccaacatatcccttgaggaatgtgaaataagcaatctgaattgttggagagcagagaagcgcagccgctaatcctcttccatgagctttagaatctgagcgtcagtctcctcagtcccccggcccatcagatacgggaccccattcacataggggcagtggagctcagtaggggctatcgaagtcgcaacaataaagtcgtagtttcgagacttctccggagccgaagccaagggaatctgagtaatttcgtactgccccttatagccatggctgtcaagaagcgcctcgaccttcttcctcgctaccgtcgaagtgacgattcctgaaccgcaggagagaagaatgtgcttcatctttgccatcgtaatcctccaattcacctaggaacgaataactcgctccgctaccgacagacttgaaacagctactcccccatcaccacgacgcgaagcttgcgggtgcgctcacgcgtgcgatcgaagtcaacgaagaagatgctcgcgaggccgttcatctcgagcctgccgccggccacctcgaaggtctggctgccacccacgagcacggagcgcaggtgcgcgtcgccgttccagagcagggtgcggtcgccccctgggaggtaggcttccgcgtccggccagccctcgacctcctcgaagtggcgaaggccggggtagcggtacgtcttccagtcgcgctgctcggggaagaccctgtccaggccgtccgagaggtcggcctgcatgaaggtgtcgccggccggggtcatgtcgtggtcgaactcctgggagtagacggcgcaggtcgtgtggcaggagatgcagtggacgacgccctccctgatgccgctccatgagacgatgtcggcaacctcattggtgacgtcgacgtaggtcggctttccggcgagcgtctcgaccctcaccagccccttgtagaccgtcatggccgggcctccccctggatgtcggcgcggacgcggccgagcgcctcgaacatctcctcgagcttcgcctcggggtcccccgcgcagacgatgcccgaggtgccgcccgtggcgtcgccgccgtagtggatggcgtcatagacgtcctggccggtggagatgccggcggcctgcaggaccattgtcccgggcgagacggacttgacggcctccgtggacgcgcggatgtagtcctcgccggcgatgcggccggtgccgatgaggctgttgggctcgcacgtcatgatgtcggggtggagctcggcgatggccttggcctcctcgacggagtcggcgcaggcgcaggtgaggatgcccacctcgcgggcacgcacgacggtcctggcgagctcgcccaccgtcatggggttctcggcgtggttgaggaacgttgcgcgcacccctgcggcggcgagcgcctccgggaggacgtgccccatgccgcggccgggcctgaggctctccatggcctgagcgcacgggatgagatgcgggcagttgtccgcaacccaagcgagatcgatgagctgcgcggtaaacagggactggaagccgtaacgctcgcagagcccatccgtcttgcgagcgagcctgcggagcttctctccgtacaggtaggacttggggttgacgacgaagaacgggcgcctgagaacaatcttgtccatgaaactctctcctcaactcgccattgcaacgacacagaagcaaacagttgtcctctaaaaagtggacaacacgcttcttgtccagtattgaatgtacaagttaagatagatatgaagagtccatgaacggcatgtatgtgccgacaaatggtgcggaggccctttagtaggggagcttagctatagctctcaggctgatatgcggtacccacgattgattggcccggagtcagccatgtgacactccactctatcttggcgtcatcttcaaggtgaatgacctgctcaaggtggagaacagccgtattctcgtcacagccgagcagcgcgccgtgctcagaccccgcaaccagggcctcatacttcatttcggagtatttgaccttacgctttgatgtcttctcgacggcatcaaatagcgagacctta

SEQ ID NO: 2677 - DNA, 23120 bp, synthetic construct
  source 1..23120: mol_type = other DNA
  misc_feature 1..23120: note = Synthetic
gcaatatcatgcttcgccgtccgggtggcaagactaccccagacggtgcgcctacccccaacggcatgggcgccccagacggtgcacccactcccgtcggcacgccgatcgcatggagcacgaacacccctctggagtgctgcctcatcgacctgggcagtgccatctttatgcgccgggacgaagccaccttcaccatgaccatggacgtatggcgcaacgccacccccgagtacgcgccgcccgagatgctcgccctctccgaccgtggctacctcgaggcacgcagatcccccgctatcgacgtgtatgccctgtgcagcgtgctctacgagacgtacagcggccacacccccttccgtctggtcgatcatccgggcgagtcggcttacgagctaaaaacagctggccttcctccaactccctccctccacgaggaacacgatgcgggactggtcggggctatcatgtccggacttgctcaggaccaagcagaccgtcccaacgccggggatcttttcgacgcaatcgctgcctggaggacatcggtcaccggccagacaaccgaccaccccggtcccggccgccacgcatctgctcggggagccgctcacctcactctcgcgagcataccggcaggccagagcgcagcagctcagccacaagattattccgcagccgtttcagcgtccgaccgggcatttcttccgacgactgaccgcgcatcgggttcgtccacgccgggttcggcaactagcccagcgccttcgccagaagaaacaccgacgcgcggtagaagcatttcaaggcgtggactgctcgtaggagctgccgctgcgacagcagtcgttgcgagcggagccctgtggtggcgccaaacctcgcccgccggcaacgcgcggcgttttgccaatcaatcctggggagacctagcggatctagcgcatcgtctctcggatgcaggcacaagagaggaagccctgtccctcgccgtggaggcgggcatcgctcaaaaggacggcagcatggtagacgacctgatccacgaagtcgctctcgccgacggtaccacagcctccgtgcaggtagtggacttctgccatgacgaccgcgccgacagtcagggcaaggcgggtcttaccttctcctttgtcgacccggtggctgcacgacccatggccgagcagaccatggcttcaggcggctgggagcaatgcgatctcagggtgtggctggattccgatttccgcgcccttctcccaagtgagctagtcgatgtcctcacgcccgtgatcaaattgaccaacaatgacggtgccacgcgtgaggtctccagcgtcaccaccaccgaagacatcatctggatcccctccatgacggagctgggcggcggccgtccggcgtcgggcttttccaccgactatgcatacctggctgacatcctcggtgccgagggcacacagtaccgcctctggcaggacaagatggtcagctccaccacctacaatgaagccctggagaggagctgggagggcaaaccctgcctctggtggaaccgctctcccagccccgactgctcggaggaccatggggtaacttggttcaatcgggttggtgccaacggcgacgtcttccacttcgcctgccctgctaccggcgatgacgatgtcacctgtgtgatcccctgcttctgcctataagcttctatctgtaggcttctgcgcgggttatcgggtctgcacgcggaatggaaagcccccggatgcttcgctgcatctgggggctcgcttctcgatgggacacgggctgctgatctaggtgcgcaggaccatctcgtcaggcaagacggactgtctcgcaagacgacagagcgtcttatagcacgtgcacgtccgcgggatcgaagttgacccaggcggtgtcgcccacctcgtagatcttcttgttgcgggggttgtagacctggatcttgagcgtgtcgtcgcctaccttgatgcggtagtcctgataggcgcccatgaagcgggacagcacgatctctcccttgagctggccctcgtcggcgatggtcgcggcctcgggacgcaggacgagcgtgacgtcgtcgcccggctcgtggttgtccacgtagcggatcttgacatcctggtcggcataggtcacgacaccgctgtcggcagtctcgtccttggccgtcagcttgccgcgcaggaagttggactcgccgatgaagtccgcgacaaactcgtcgcagggcctgttgtagacctcgtggccggtgccgacctggtccacgacgcccttcttcatgatgatgatctggtcggcgatggccatggcctcggactggtcgtgcgtgacgtagatggccgtgatgcccgcctcctgctggatgcggcggatctcggtgcgcatgtccacgcggagcttggcgtcgaggttggagagcggctcgtcgaagagcaggacgcccggctcgatgaccagggcgcgcgccagcgcgacgcgctgctgctggccgccggagagctggttggtcatgcggtcttccatgccgtccagacccaccaggtgcatgatgttggtgaccttctccttgatggtggcggagtccatcttgcggagcttgaggccgtacgcgatgttgtcgtagatgttgtagtgcggcagcagggcgtagctctggaagaccatcgcggtgtcgcgcttgttgggcgtgagcctgttgacgggctggtcgtcgaagtagatctcgccctcgtcggggctctcgaagccggcgatcatgcgcaggatggtcgtcttgccgcagcccgaggggcccagcaggcaggtgaaggagcccggctccatcgtgatgttggcgtcgtggaccgcgtagaagtcctcgcccgtcttggggtcctgatagatcttggagaggtggtccagacggaccgcagtcttgtggtttgccatagtgttagtcctcctcgacgtggctggcggcgcttgccttgccccagtgcttgatgatggtgttcatgatgagcacggcggtgtaggtgatgatgatcaggatggtcgcaaacgcgcaggcgatgccgtactgacccttgccggcgaactcgttgatctggacggtgatcatgaggatcttgggcgagaccagcaggataaccgcggagatagccgtgatggagcggacgaaggtggtgacgaagccggagaggaaggagtccttgatcagcggcagcgtgaccgtcttgaacaccgtgaagctgtcggcgcccatatcgtaggcggactcctcgatggacttgtcgatctggcgtagggcggagatgccggagcgggtgccggtcggcagcgagcggaccacgaagacgatgatcaggatcgcggcggtgttgtagatgttggagaggaagcccgtgccaaagacaccgttgacgaaaccgcggatgtagccgacgcccaggacggtgccggggacggccatggccagcatggagacgaactcgatgaaggccttgccgtggaactggcgcttgaccaccaggtaagaaatgatcatcgagaagagcgcggtgatcggcgaggcgatcagcgacagcaggaaggagtccttgaaggcctcgaggccgtcgtacttgttgaagaccgcgtcgaaccagcgcagtgtgagcgagtagtcgcggccccaggtcttgaagagggcgcccaggggcacgcaggcgtacatcacgacgacgaagagggcgatcacgccgcagatgaccgacagcgggatgcgcacggaggcgtcctcgatggcgttgcgggcgcggctggccttgccggacagggtcgcggtggacttggcctcgagcacgtacttctgcaccaggaacatcgcgagcgtgatgagcagcaggacgacggccatggccgatgcgccctgcttgtcgtacgcgccggtgatctgcaggtagatcgtggtcgccagcgtgtcgtaggagccgccgatgatcatcgggttggcgaaatcggcgatggactcgatgaaggtcacgaggaaggcgttgcccaggcccggcatgatcagtggcagggtcacagacgtgaagaccttccagcgggaggcgcccatgtcgcgcgcggcctcctcgagggaggggtcgatgttgcgcagcaggccgcgcagcatcatgtagcacacggggaagaaggtcagggtctggacgatgaagatgccccagaagccgtagacgttgttgtcgtagatacccaggatctgacgggtcaccaggccggccttgccgaacagcaggatgatcgacagggacaggacgaaggggggcgacacgaccggcagcatcgagacgagtcggaaaaggcccgtcaggaacttggtcttgaggtccacgtactcctccacgtaggcaaagagcaggccgacgagggccgagcagatgcctaccaggaagcctaccttgagggtgttggtgatggccgtggtaaaggacggcatgtcaaagatgcgctggaagaccgagaacgacagaccctggtctgtgacgacggaatccacgagcagcaccgcgagcgggtacaggataaagagcgtcaggagcgcgatgagcaccacgatcgtggtgaccatgatgggatcgccgaagaatttcgcgcgttccagctccgccccttgctttgtcttggcttttgccatgaggcgccttacctccaatcgggataaaagagggctaggcgacgacctgtgccgcctagccccgtacgctacctatctgcgataacgtccaaaactacagctactccgtctggaaacggtcgtcgccgccgcccagggcctccatgaggtccgtgcggtacttctcggaattctccttggcatcctcgaagtcgtagtccatgacgttgtcgggatcgaggccgtactcctcggcctgctcgggctgcgtggcgttgtcgatgacgaggaactgataggagccgttgtctttggccatgtcgacgcactcgggcgacagggcatactcgagccacagcttggcggcgttggggtgagcagcacccttgagggctgcggtggcgccgatctcgaaggaggcaccggagctcgggacgaccaggccgatgttgtcgtagccgttgtccacgatctggtagatgccgtcatgcagcataccgatgccgaccgtgcactcggcggtgccgatgttcttggacggaccggagccggacttggtgtactgggcgatgttcttgtcgagctccttcaggaactcgatgccggcctcctcggagcccttcttctggatcatggtgttcatgaagagcagcgcggtaccggaggtgttgtagttggccagccagaccagacccttgtacttctcgtccagcaggtcgtcgtagtcctcgggggcgtcgatgcccaggcggtcgagctcctccttgttgtacatgatgcccaggatgcccttgtagatgccgtaccagtcgttctcggtggacttgtagatgtcgtcgatcaggtggctggcgttcttgggctccacgacctcgagcaggccctccttggaggccatgttgtaaggatcggtggtgccgccgaaccacacgtcgccggacggcttgccgccctcctcctcgatcttggcaagtacctcctcggtggacagacgctggtaggtggtcttgatgccgtagagctcctcgaagtggctacaagccggcttgccgtagtcctcctcgcaggagacgtagacgacgagctcgccctcgtcctgcgcggccttgatcaggtcagcgtcggcgccgacgggatcggcaccagcggagctaccagaggcagcgctggaagagccggagccgccgcacgcggcgaggcccagcgtcgtgatgccggcagcgcccaggaagcccctacgggtgagattgttcatactcgttcccctttccccacaaaaagatggtcgaaagcacttgttgccatcgacgttttcaaacgcatattttgccattgtgttacgcaacggtaacgtagcatcggtcatcaaacggatttgttcggttaatggcaaatcgtggcaaatgtgctgttaaacgttgctatttgctttgcgtaagtgtaagttaagcagctcaaaataataaacgcttacattacccttacatttgagtactgaccacggagaaggacaaacccatgactctccttgactgctgcatacgacttgggctggctctcgcctgcggctacgccatcggttacgaacgcggcaaccggctcaaacaggcgggtgtccgtacccacgtgattgtcgtccttggcgcctgcctcatgaccatcgtctccaagtacggctacaccgacctatccggcgccgccgccgacggcctgctcaagtgggacgccagccgcatcgcctcgcagatcgtgacgggcgtctctttcctcggtgccggcatgatcatcatgcaccaccgcaccgtgacgggcctcacaaccgcggcgggcatctggaccaccgccggcatcggcatggccatcggcgcaggtctctactgggcgggcatcatcacgaccgcgctggtcatcctcgtgcagaccgccttccgcggcgacggcgccaacaccctgggcatgcagaccaccaattccgacatcaccgtcaaggtggagaacaacggccgctacatctccaacatcctcgacttcctcgaggactccgaggtggagatcatcgcgctggacatgatccgtctgggcaccaccgccaagctcgagctgaccctgggtcttaaaaacggcgccgacctcccccgcctcgtcgagaagctgcagatgatgggtggagtcaagagcgtcaagatgtaagacggacgctgcgcctcgcgctaccgctcttgcttggaagacggaccgtcctgcttgggcggtcctcttttgtgcgaggcaaacctgccttgctagaccatctgctcggggtggaagacggcgtcgaactcctcgcccgtgagatagccgagggccaggcaggcctcgcgcaggctcgtgccctcctcgtaggctttgtgcgcgaccgcggcggcgtgctcgtagccgatctcgggcgacagacaggtcaccagcatgagggagcgatggaggttgtcggccatcttgtccctattggccttgatgcccgagacgcagtgctcgtcgaaggaacggatgacgtcggcgagcaggcggaccgactgcagatagttgtatgcgatgaccggcatgaagacgttgagctcgaaattgccctggctcgccgcgaagccgatggcggcgtcgttgcccatgacctgcacggcgaccatggtcacggcctcgcattgggtggggttgaccttgcccggcatgatggaggagcccggctcgttggcggggatggtgatctcgcccaggcccaggcgcgggcccgaggccagccagcggacatcgttggcgatcttcatcatgttggccgcaagcgccttgatcgcaccatgggagaagaccatcgcgctcttgcccgtgagcgcacggaacttattcgggtcgctccggaaaggctcacccgtgagctgggcaagctgcgccgcgacctcatcggcaaaccccttgggcgcgttgaggccggtgccgaccgcggtgcctcccagcgcgagcgccagcagtggcatcgtgctggcctcgatctcgtcacgcgcgccctccaccaagccgcgccagcccgagatctcctgcgagaaggcgatgggcacagcatcctgcaggtgcgtgcggcccgacttgaccacgcccttgttctcctcctccagacgctgaaaggtggcgatgagctggtcgatcgcaggtagcagctgctcatgcagcgccgtgaccgcggccacgtgcatcgccgtcgggaaggtatcgttggaggactgcgacatgttgattgtgtcgttgggatgcgcgggggcaacgagctcgatgtcctgctcggcggcgagctggttcacgcggttggccagaacctcgttcatgttcatattggattgcgtgcccgacccggtctgccacacgaccagcgggaacatgtcgtcccaacggcccgccagcacctcgtcggccgcctggcagatgaggtcgcaggtcacccggtcgagcttgcccagctcggcgttggcgagcgccgcggccttcttgacctgggcgaaggcgtacacgatctcgcgcggcatgcgctcgccgccgatcgggaagttctcgtggctgcgctgcgtctgcgcgccccagagcgcgtcggcgggcaccagcacctcgcccatggagtcgtgttccacgcgtgtcttgcccgcattctcagccatagctgcccctctcggttcctacaccatagcttcgacgatagtgcaaccgtcacactcaatcgtccgcatgcccggctgtttgtcccgattgaaattaaaactcagcaggtagccctctgcctgtcgatagccatgaaggtagtcggcaagttgttgctcgccagcctcacggtatttgtcgccgcgccagattttgagctcgataatgtactgctcgcccgcatagtcgacaacaacgtcggtacggcgacgattacgcgtgcgggcctcgacataatagttgcccgtaccgttgataatgggcttgagatacaagaggaacagccgtcggccgttttcctcgacaaagccatcatcggcatcgccgaatacatcctcaaagtactcgacgaacctcgcgagtacgtgttccatgtccaacttgccaccacgcacgaactggttcttttcgggagcctcgattttgctctcgatcccggacgtcaaatcctccgagatgaaatagttgtacaggaaggtctcaaagacgcgattggccactgcaacattgccgccatcatccacgagatagccgaacatcgtgccgagattcatggtctggttgtagaagttatacgggtacaccgcgccattaaaaagcatggcacgcagcatcttgcgcagctcagggtactcgttgatctgtttaaccaggtcgtcgaagagcgtattgggtgcacgcagcaacacacccacagcacgaccgatatcctcgggggtccatgcgtgaagccgctcgtcgagcaatttgcagatagcggagacgagataaggatagccaccagcgtagtcagagatagcctgagcggcgcgtcctaaatcgaacgagacctcaggatgctccttctgatactcgtggagcatgccggcgatatcatcagctgagaaacccatatcgacatcgaactgctcggcaatattccacgggctgttgtaacgatgctgctcatctgggcgaatctttacccgcaaattacgaatgtcatagacgcctgcgaggatgaccgactggaacgtcggcgtgacatcgcgcgtgaggtaatattcgcgcagctgaccaaggaagtcgagaaatacctggttattcgatgcctgatcgacctcatcgataatgagaacaatgggcctcgttgcctttgcgcaggtagcagaaagtttgacgaagaggtctgtaaggccattgcacatccccagcggctcaagtgtctcttgtgcactgaccagcgcatcaaagtcccgagcaaaggtttgcgcaaatacggactcgtccgaaaagaccgcgctgctgtacttctggaagcttgtagcaacgacaaggtagtccgcgcgcagccgagccgagagcgcttgcagcatggtcgtcttgccatactgacgcgcacggttgaccgagaagtagtctccgcgctcgaccatctgacaggcggcatccaggcgatgggtgatatcgaccatgaaatgccgcttcgaatcgcatgcgcccgtaatgttgaatcgccgttgcacgtctgcacctcccgttgtctccgcccattctaaaccaccaaggcagctagatgattaggcgtccggtcagcttgatgacacacgcttttatcttctgcagagtagaatgcggataatcgattactcgtccaggggagcggcaatggggcaacaaaatcaggagatggcgaacgcaaggcactaccttgtccttggacttgatcctggcatcgcaagctgtggcttctgccttctcgatatgacagatcacaagatcctcgaaatgggctctcacctctttgatgcccctcagaacccaaaaagcaaacaaaacctttctgtcgagcgccgtaatgcacgtagcgcgcggcgaaatcttaaacgtacacgcgataggcaaaagaagtgtctcgaacttctcaagcaatgtggtctttcccctagtgatgcggataaacaatggttgcagtctcgtaagggtgataagccagtaataaagcttcgcgcttctgctttggatagaacgctcactgaccgcgaacttgctcaggtgctctattcccttactggcagacgtggatacatcccccacggagaaggccacctcgacgatgtggacgatgccgaagcaggcaaggttctagccgcagtccgtgagaatcagaatcagatggcaaagaaagggtaccgtaccgtcgggcagatgctctacaaagagggccgttcacgcaatcgcggtggcgactatacgctttgtgtcctcaactcccagattatcgacgaggcgaagattatcctcgatgagcaacgctcacatggcaatgccatcctcacaaagatgagcaatggggagttcgagcaattcaccaattcttatattgactgtcttacatgggagaaaaagagcaccaagcacgatgagcgtgtctactctctcgttggtgcttgtacatatttccccgaggagaagcgggctgctgaggcagatctctcgtcagaactctgccgagcttatgagaggttcggtcacctcgtcatggtcgatgcggatggcaccgagcatcgtcttagcgcgaaagacagggctaggtacctgcagattcttttttctcctgtcccaatccgcgggaataaggactgcaaagtgacctatgcgacaatccggaaggatctcgatctttccgcccatgtctccttcaagggcatagaggcagaacgcgagaacaaggaagagcccttctcaccgcgcagatggagaaagttgcgcgcctgcggcgtaccagagggtttgctagcgaggatgctcgaagacagagacctcgccgacagtatcggcgaggcactcgcctacgccagcacagaggaatccctaagagacaagctctccagcctcgacctctcagacgacgagattaatcagctggctgtgaacgtcccgtttgcaggaaagctcttcagtggatatggatctcgtagcctcaaggcgctgcatatgctactcgatatgtttgaagacgagagcattctcaccctggatgatgcagagcgggagtcgggcttacaggcgttgcgcctcgccgataaagggcatcgcagccttaacctaccgccatacgatatctatgacccaacctgcaacaaccccacggtcctacgcgcgcttggtcgcatgcgccgcatagtaaatgccatcatccgcatctatggagtgcctgacgagatacatatcgagctgggcaaggagctcaagcaatcttcgaaagaaaagaagagtattgccaagtccaacctccagaacaaaaaagataacgagcgcatcgcaaagacgatagcggagctgctcggttgctctccggacgatgtacgaggaaagcaaatcaggcgctttgctctccgcgaggagcagggatgcaaggatgcctacacaggagactccattgatttgatgcgcatgctcacggaggaccgttacaccgaaatcgaccacatcctgccatactctcgcacctgcgatgatagccgcgcaaacaaggtcctcgtccttcagaagtccaatcaggataagaaggagcgcaccccttgggagtggatgagcgatgatgcgagcaaaggtgcaccggactgggaggaatttaaagcccggacgctcacaaaccaccggcttagctataaaaaacgtgaccacctgctcaatcagaacctcaatggccaggaacaaagcttcatcgaccgcaacctcaacgacacccgctacatgtcagttgcagtcaaggattatctggagaaatcgcttctcttccccgatgatggacgtaagagccacgtgattgctgtggccggcggtgcgacgtcagcccttcgtcatgtgtggggtcttaacttcggtgcagacaacacaaaggaccgcagcgacgaccgtcaccacgccgtcgacgccgcagtcatcgccgcttgtagtcaagcaacggtcaagaaggtcgcggatacctcaaagctcggccatagcgaatttaagcgtaagcgcgaaagccgtctcgccgatactcaaccgtggccgaccttcgcagacgaagtcatcgcacgacgagagttcgtcatcccgacccgtatggctaatcacggcgttaccgggagcgcatttgaggacaccatttaccgttacgagggcatccgcgagggaaaggacagtctcgcggtactttcaaagagccagggaaaggataagccaagagccgtaaagccgtccggaaattaccgtttggacgccgacggcggtgcgcatctctatgatggcattgcattcttgaggttttggctcgatgcagaggcacggccaaaaggaaaggtcaagggtaagtggctgattgaaccagtctattatgcggatattccgctcatacagtgtggtaggtacatacctaagtacattccagcggctcatcttgcgcgcgaccaatgggtagaaatacctgaatctgtgttagctaccgatcctgtgacggtcttcttcggtgacgtcctctacgttgatggtcacattggtaggtactcaggtttcaacattaatggattaaagctaactatgcacagtgtgatatcaggcgaaagtattgcatttccacctgtaagttcaacgtggagcaaggattctgaggttcgcatcatagaggaggatgtactcggtcgttgctggacacctaacatagctaagttggttcgcttgcaggaagctgccagctcttcttagaaagtaagggtaagctgagagcccgtatcgactgatttgggtttctgagcggtatgcaacaataccgctcggttctcaaactgcttttcggtaaggacaagcacggtgactgcacccgccgctggaagattggctttgattcgaagcatatgagtctcggcgctttcacgggagagcagcactcgtgaatatacgctgtactgctccatcgtataaccgtcctttatcaagaactttcggaaaagggcatacgacttccgttctgccttgctgcctgtcggaaggtcgaacaacactagcattcgcatgaccctcatcccctaccaccgcctcgctattcaaaccggcccttctgaagagcaatcacttcaggaagcctgagtttggtatagtcgttgtccagaactgcttcccgcaaggaatgaaaaacatcagttatggctgcctgtacaggcatcttcccgtctggcatctgcaccaggtattcgaataccgaagcgaggatagccttcttatctttcgtgaggtcatcacgaatatcgtttgtcaatacaatcaagtcaaccacgggtcgaaaaggctcgattagatcgtccacaaggttgaacgcattgaggttgttgtcgtgatggataccgcgtgagacgagccacccaccgcccaccgcctcacgaccaataccagcgcgcagcacgccatacccatagtcaaaagaggccgcgtatggtccatctctcctcgtaccatacggtattgcagtgcggaaatacgcgcttgccgctgcggcttctctattcgtcacatcgccggactgtacttccgcggcgaatctaagcacactctttccatcgcgcccgagcaaatcagcaactgcagcttggtttcttatctttgcaatgaccatctgctgccaaagccttttcttcaagggcttcgaaatggcaaactgatcctctacgattgccgcatgtcgtgagtgggctccgattggcagtagtagtccatttggcatatggtcgtcaccacacatcatcacgccaatgccgttatcaaccattgccgacagtgctgaggtggatattctcgcctgatgcgtctctagtatgagaacccaaatgtcttcaagcggaatcgttgcagatcgctggtcctgctcaatcagcaggaggccatttcgcacggagagtctcgccggattttgaatgcagatggtacgtttcggcacgtcaaaccacctccgtgtgttaaacttttttcagtataggcaatgttgtactaactggggagttggaaggacatacgcctagacaagaggaccgaggaacatatccctggttactcgcaaggttaacccgctaaggacattgttcttggcgggcgatcctttctttataggcgcccttttttcaaaaaccgtagtacggaatgctcagaaaaggatttcgtggcccgttttttcatagacaaacccaagaaagcccctggtaacaggggctttcttgggtttggtattgtaccaactggggagttggaagggcgccaagaccacggcgtcaggctggccgtcctggtcgtaattgtaccaactggggagttggaagggcgccaagactctatcatgtcgcacaattccccgattgtcattgtaccaactggggagttggaagggcgccaagacaactcggactggctcggcccgctcgtggtaattgtaccaactggggagttggaagggcgccaagactgagcttgattcgccgatttaagcagctcgattgtaccaactggggagttggaagggcgccaagacctcggaatgcgcggtctgcccctccgcgccattgtaccaactggggagttggaagggcgccaagactcccattcgacctctttctccgtcccgtctattgtaccaactggggagttggaagggcgccaagacttggtcgctgtaaacgtaggtgcgggtctttattgtaccaactggggagttggaagggcgccaagacttgccgatcaagtcagacggtacgcccgccattgtaccaactggggagttggaagggcgccaagaccgcgcggcgttgcgcctcgcgattgccgcgattgtaccaactggggagttggaagggcgccaagaccgagatgaagtcggccggcgtggacctcgaattgtaccaactggggagttggaagggcgccaagacgaagctgatgctaggtcaggataaacctggcctagcatcagcttcgcttcgcaaattacacctcgagagaaatggtctcccttcttagctcacaatgagatagttcaggcttgcttctacctatttgagttaaatcgacatcctaatttgttcttatccacaaaggatattgttagcgtcttccccataccttctgcgagcttatcaagggttctaacggtcggattcgtatcccccgtttctatcaggctgattgtcttctgtggcacgcctgtcgcccgagagaggtcgcgttgagacatgcccgcatcaatgcgtgcctggataagcgcacgttgggcctggtattctccctcgccttccgcccatgcacgtgcaaattcagggtccttcaattgtcttgcgatgtgctcatcaagcgtgtgtggtttcattgcgcacttcccaatcatgtttataacgaagcgccttttcgatttcgcctcgtggggttttctgagtcttcttaatgaatccgtttgtgacaataattcgctgtccggaataaaagaaatagaacattcgtattgtatctgaactaaatcttaccctgagctcaaatatgccttctcgaatatgcttgctctccgttctccctaattccggcccgtactcttccagcaacaagagcgcatggaatgatttctcgcgtaatttttatcaggaagaccatcgataaagtcctcaactggcaccctgccgtttggcaacatatagtactcaaccttgtacacgattccctctcaaacgataacatatataacgtcaatccttctttctctttctgattcttattttagcgtaaatttgttctattacaatatgtatgttcctaattttctattatcactaaaatatatgttctattatttgacacattggagagacgaagaagcgggcaagggggacttcgcctcgtaccccttgcccgccgtatcatcgacgcaggttgtcaatcagacgctacagcgtgtgcgccacctcgtagccgtcccagatggcggtcaggatgttggccaccttgcggcagtcaccgatctcgtagacctcggcacccaggcccttgtagtcctcggcgtgcgtcgggcgcggacggaagccgatcgcgatcacgacggtatcggctgcgatcgtctgctgctcgccgccctcggtcggctcgaccacggcgccctcgcccgtgattgccacgatcttggtgcccgtgtggatgggcgtcttgtggtcggcgaaggcgtccatgaggtactccatgttggggtacgggaccgcggggccggaggacaggatggccggcagggcctcgacgatctcgacgtccttgcccttgtggatgaggtcgagcgccagttcgcagcccacgaggccgccgccgaccacgacgaccttctggccgatgggcttggtctcgagcagggcgtcgatgcagccgacgcacttgtcggaatcgataccctcgatccggggcgtgatcgccgaggagcccacagccaggacgaccgcgtcaggcgcgatggccgcgacgacgtcgggcgtagcctcagtccccatgcgcacgtccacgcccaggtcgtccagttcgcgctgataccaggcgttgagctcacggacctcgctcttgaagtcgtgcgcgccgcccgagatcaggtggccgccgagacggtccgtcttctcgaagagcgtcacctcatggccgcgcagggccgcggtgcgtgcggcttccatgccggccacgccgccgccgaccacgacgacgcgcttctggatcgccgcaggctgcagacggtagctggacggacggccgatctcgggattgacggcacagcccgagggcaggccggcgaagaggcggcccaggcagccctggttgcaggcgatgcagggacggatgcgctcgggcgtgcctgcctcgaccttcttggcgatgtcggggtcggcgaacatcgggcggcccagcgcgacggcgtcgaacttgccggtcgcgatggcgtcctcgtccacctgcacgtcgcccatgcgggagccgacgatgatcgggacctggacggcggccttggcctgctcggcgagctcggtcatgtagccgcgctcgaggtacatgggcgggcaggcgtagtagaaggagtcgtagacacccgtgtcgacgtcgaagccgtcgtaaccggccgcctcgaggatctggcagatgcggacaccctcctcgagggtgcggaacttctcgccctcgcccgagatggtgccctgcatccagtccttcacgtagcccttgaggcccaggcgcaccgtcacggggaagtcggcgccacacgcggccttgatgccctggacgatctcaatcgcgggacgcaggcggttctcgaggctgccaccgtactcgtcctcgcggtggttggtcatcgcggaggcgaactggtcgagcaggtagccccagtggatggcgtggacctcgacgccgtcgaagcccgccttctgcgccatggtcgcgccctgaatcatctggtcgatcttgagcttgatctagtcgaccgtgagcaccggcgacgtctggtcgggcgcgccaaagaccgggttggccgaggggccgtagaggccgacgtagttgcggccgaggcccatggtcagctggatgaagaagcgcgcgttgtaggcacgggtccgcgtgatcatggcgtcggaggtggccaggaagcccgcagggttggtgaggatgctcgcgccgagcgcgccggcgggatcgacctgggtgtcggtcgagagggcgccggtctgcagcaggccgaatccgccctcggcgcgacggacgaagtactcgatgccgtcaggcgtgaaggtgccgtcgggcgccaggtaggagccggtcgtcacgggtgccatcacaaatcggttcttgatcgtgagcttgccgatcgtaaaggggctggacagggcgggaaacgcagtggtcatggctagtcctctcctcttgtgcctcaccgcacgtgaggcgatacgtgcctttttcaaaggctctactgctcacattgtgcaaagacgaacagtgccgcagcatccgcaatcggcaaacaacagcgccgctcccccagacgggtgtctagatcagcccgcagaccatcttgaccctgaggatacgggtcaggctctggtccacgcgctcctgcgagagctcgccggagtccatcgcgctcacgacgccacgataggcggccgagaggctgttgggacacagcaccaggtcgcccccggccttgaggaagcccgcggcggcctcgtccgaatggtagtcgttgccgatggcggccatggccattgagtccgatacgaccagaccgtcgaagcccagctcctgacgcaggatgccgtcgatgatgtccggactcatggtcgccggcaggtcgctgccggtcacggagggcaggccgatgtgccctaccatgatcgcgggagcacccgcctcgatcgccgcccggaagggcacgaactcgcacgcctccagctggtcgcgcgtgcgggtgctggtggccttgccggtgtgggagtcaccagccgtgtcgccgtgacccgggaagtgcttggggcagcaggccacaccagtgtccgcgaagccctccacctccgcctcgaccatggaagccacaaggtcgggatccgagccaaaggaccggctggctatcacggtgttgtccgggttggtcagtacgtccgccacgggagcgaagtccagcgtaaagcccacgtcgtgcagataggacccgatggtctggccgatgtgctgtgcctgcgaggtgtcgcccgcctgtcccacctctgccatagtgggaaacgtctccacgtcgaagtagcccgagttggcgatgcgcgcgacgagcggaccgccctcctcgtccacggacagcagcacggggatgcccgctccgacttgcccggtcgcctcggtcaggtcggccaggagcttgcgagtctggtccgcgcccgcgatgttggcgccgaagaggcagagcgcgcctacggggtaggtcttcagagcctcgcggatatcctcgcccacggccgtcacgccctgctcaccgtaggagtcgctcaccgaggcgtcgacgtccagggcgccgagcagcccctcgggtgtgggggccaggagctgggcggccttttgctccgcggacatgccggcgatgaggtcggctatccggtcggactctgactgggcaatcgagtcggagacggtctgggctttgccgccgccctgttctccttctccgcccttgtccttgcagccggcgaccagccccgacgcgattccgcccaacgcgagtgctgcgcctcccacaaaggccctcctggatatcgccatctcgactcccgtctcgcctgcccgcagccacccgccgacggcagcgccttatacaatcggcagcgcctcgtacgcatcactccgcgtctgtaaaatctaccctgcggcgaccgaccttatcttcgcgcatagcggctcgaaaatgttgtgcaacaaaggcgcaagttgtaagggatatcctcggcttgtcgcgtacgatggtaaccggctagcgcacagtgactcatcgcgcaccacaccctgagccatcacgcaagaaatctgcggtcaaaacggaggttcaactatgttttgccccacatgcggcgcccagatcgaggaaggtagcaggttctgcgtgtcctgcggagcgcccattcagccgcacgaggacgcgtccgcgtccggtgagcaggcgggcgccgcggaggggaagacggacgttgcggcagttccttcctccgcagaccagaccatggtcacccccgccgccttgaccgagcgagccgcgcccgaccagggcatgcccggccaggatgcaactgccgaaatccgctattgcaccgcctgcggggcgcccatccaacccggcatgaggttctgcgtcagctgcggcgcgcccgtagaggtgtttgctgacggtgacacagcctacgccaccgggtcggcggcctacaccaccggtccggcatatgactacgccggtgctcaagccggcggctatcccccgaccctgcccgccgattatcccggtggccagtccaacggctgcgctgccccatccccgcaatacccgccgcaagagattcccgcggcgcagagcgccggacgccccaatccagcgctgatcgccgtgcccgtggcattggtcgtcgtgttgctgggctttgtggccgtccactacttcgggctcgtggacgacaccgaggcattgcccttcctgcccacgcaggagcagtcatggtcggaaaccgctggtaccggtaccgaaaccagcaacaagaccgacgacaatcaaggccagtcggagtcctccagccagcctgacgtgcagtccgataccgtcaccgtacccgacgtcacctacgaatcccagagcgccgcggagaacgatctggaggcggcgggctttaccgtcggcagcgtgaccgagcagacgagcgaccaagacaggggcaccgtgatctcgcaatccgtcaccggcgaggccgacaggggtaccagcgtcgacctggtggtctccaagggccgacagaaggcgtacacggtcatcagccaggccgtgacctgggaggaggccgaatcctactgcaccgcgcacggcggccacctggcgtccatcacctcgcaggaggaatgggaccaggcgctggcggccatgcgggccagcggccgcaaggtcttttggatcggcggcacccgcgacagcggcgacgacatgttctactggatcgacggcagcccctggagcttcacggcatgggccgacggcgagcccaacaacgatgacggcagcggaggcagcgagtactacatggccatctacctggtggacggcagctacggctggtacgactgccctgacgatctgtcgagctactacaaggactcggccatggccttcctgatggagacctactaacggaatcgcggccggaccgagtgactgcgcacctgcgaagtgaagcctggctcccatctatccggagccaggcctctctattcgtcgaaatgtctttgcggacggagcgtccttgttatcacgcgcgtaaaagatccgtcgggtgcatcaaaagtccgcgttgcccacggtgcgcgggtgcggcaggacgtcgcggatgttgtcgacgccggtcaggtacatcacaagacgctcgaagcccaggccaaagcccgcgtggtggcagccgccgtaacggcgcaggtcgaggtagtacttgtactgcgaggcatccatgccgagctctgcgatacggcgctcgagcacgtcgaggcgctcctcgcgctgcgagccgccgatgatctcgccgatgcccggcacgaggcagtccgcggccgccacggtcttgttgtcgtcgttgagacgcatgtagaaggccttgatctcggccgggtagtcggtcacgaaggtcggcttcttgaagtgctgctccgtaaggtagcgctcgtgctcggtctgcaggtcgacgccccagctcacggggtactcgaatgtggtgcccgccgcctgcgcgtcttccaggatcttgaccgcatcggtgtaagacacacgcgcaaagtcggagccggccacgtgctcgaggcgcgccttgaggcccttgtccacgaacttattgaacatcgcgatttcgtcggggcagtgctccatcacgtagcggatcacgtacttgagcatggcctcggctacgtccatgtcctgcgcgaggtcgcagaaggccatctcgggctccaccatccagaactcggcagcgtggcggcgggtattggagttctcggcgcggaaggtcgggccgaaggtatagacgtcgccgaagctcagggcgaagttctcggcctggagctggccggagaccgtgaggttggtggccttgccgaagaagtcctggctccagtcgaccgagccgtcgggcagcttgggcacgttggcgaggtcgagcgtggtcacgcggaacatctcgcccgcgccctcggcgtcggaggcggtgatgatcggcgtattgatgtagacgaagccgcgctcctggaagaaggagtggatcgcaaaggcggccacgctgcgcacgcggaagaccgcgcggaagaggttggtacggctgcgcaggtgctgctgggtgcggaggaactccttgggctggcgctgcttctggaggggatagtcgtcggcgacgggaccctcgacctggatctcggccgcctgcagctcgaagggctggggacggtcgggcgtgagctccagcgtgccgtggacgatgagggccgcgcccgtaccggtggcggcgatctcgtcgtagttgggtaggcccggcgtctcatcggagccgtgctgcatcacgacctgcaggtccttgaagcagctgccgtcgttgagcacgacgaagccgaagtttttcatgtctcggatggagcggacccagcccgcgacggtgacctcggtgccgccgaaggtctccttgtcggcgtagagctgagcgatcttggtacggttcacagtaactcccctgtctgttccgttgttgcccgcttgcctgcggcatgcgagcctttcgtttgtcaaccgctctagactaccgcaaaccacccgacagtgaggcgcttacagtttttctgtacgctgcgccgtttagttttgcacgcggttcgggccgaaaaacatggcatggaagcacctttttcgggccagaccgcgtacaaaactaaaaattaagcg

SEQ ID NO: 2678 - DNA, 23045 bp, synthetic construct
  source 1..23045: mol_type = other DNA
  misc_feature 1..23045: note = Synthetic
cgggacgcaccccttccgcatgcgggtgcgcatggggcacagggcctgccgcacgccagtcacccgctcgtctcgagtgataggaaaccacgtgcgcgacaagcagctggccgtgcggatgcgcaacatcagcaagtcgttcgggcaggtccaggccaacagcaacgtgagcctggatatctaccggggcgagatccttgcgcttctgggcgagaacggcagtggcaagaccacgctcatgaacatgctctcgggcatctacttccccgatggcggcaccacggagatcgacggccggagggtcaccataggctcgcccaaggacgccttcgactacgggatcggcatgatccaccagcacttcaagctggtgaacgtcttcaccgccgccgagaacatcgtcttggggctcaaggagccgggccggttcgacctgcaggccgcgtcggagaggatccgtgcgatctgcgacacctacggcttcgacgtcgaccccaaccagaaggtctacgacatgtccgtctcgcagaagcagacggtcgagatcgtcaagctcctctatcgcggcgccgagatcctcatcctcgacgagcccacagccgtgctcacgccgcaggagaccgaccggctctttgccgtgctgcgcaacatgcgcgatgccggcaaggcgatcgtcatcatcacccacaagctccacgaggtccaggagatcagcgaccgcgtggtcgtgctgcgcaagggggagcgcgtgggcgagatggtgaccgccgagtctaccaccgaggagatgaccaccatgatggtcggccatcaggtggccctcgacatcgaccgcccgcgtcccgtcaatcccaagcggcgcatgcgcatccacggcctcaccgtgcgcgacggcgagggcgtcctcaagctcgacaacgtctcgttctcggtgtactccggcgagatcctcggcgtggccggcatctccggatcgggccagaaggaactgctcgaggcgatcgccggcctgcagcccgtcgagatcggcagcatcgagtacatcaacgacgacggcacgatagaccagctcatcggcaaggacccgctcgagatcgcctccatgggcgtagcgctggccttcgtgcccgaggaccgcctaggcatgggcctggtcgccagcatggacctcaccgacaacatgatgctgaggtcgttccgcgacggcccctcccccttcaccgaccgccgggctcccaaggagcttgccgagaaggtcgttgacgagctggaggtcagcacgcagagcgtctcgacccccgtgcgcaggctctcgggcggcaacgtgcagaaggtgctcgtcgggcgggagatctcgtccgcgccctccgtcctgctcaccgcctacgcggtgcgcggcctcgacgtgaactcgtcgtacatgatctacgacctcatcaaccggcagaaggccagcggaaccgccgtcgtctacgtgggcgaggacctcgatgtgctgctcgagctctgcgacaggatcctcgtcctgtgtgggggcaaggtcagcggcatcgtggacggtcgctacaccagcaagaacgaggttggcatgctgatgacgaagctcggaggtgaggcgcggtgatccacgtcacaaagcgcagggagctgcccccgcaacaggtgcttgccatccgtctggccgccatcgcgctggccctggtcacctgcggcatcatcacgaccatgacgacggggctcaaccccatcagcgtgtacgggaccatgatcaacggggccttcggctcccagcgcaaggtctggatcctgctgcaggagaccgcgctgctactctgcgtctccctggccctcacgccggcgttccgcatgaggttctggaacctcggcggcgaggggcagatcctgatagggggcctcgcggcagcagcatgcatgatcatctccggtggtcgcctgcccaacgtggtggtcattccgctcgagatcgtcgccgccatcggcgcgggcgccgcctgggcactgctccccgccctcttcaaagccaagtggaacaccaacgagaccctgttcaccctcatgatgaactacgtcgccacccagctcgtggcctactacgtcatgatctgggaggttcccaagggctcgggcaagatcggcatcatcaaccagggcacccaggttggctggctcccgcagatcggcagctacaagtacctgctcaacatcctgatagtcgccgtcctcacggtggccatgtacgcctatctcaggtacagcaagcacggctacgagatctccgtcgtcggtgagagcaccagcaccgctcgctacgtgggcatcaaggtggagcgggtcatcatccgcacgctgctgctctccggcgccatctgcggcctcgcgggcctgctgctggtcggaggcaccgaccacaccatcaccaccaccatcgcggcggggcgtggcttcaccgccgtcatggtggcgtggctgtccaagttcaatccggccatcatggttgccagcagcctcctgctggtgttcatgggccgcggcgccggcgagatctccaccatctatggcctcaatcacagcttcggcgacatcctgacgggcatcatcctgttcttcatcatcggcagcgagtttttcatcacctaccgtctcaacatccagaggaagggaggcaagggcgatgattgacctggtctcattcataccgagggcggttgcccagagcatcccccttctcctgggcagcaccggggagatcgtcaccgagaagtccggcaacctcaacctcggcatcccgggcgtcatgtacgtgggcggcatctgcggcgtcatcggctcgttcatgtacgagcgcagcctgagcgatccctcgcagatcaacgccttccttggcatcgccattcccgtgacgtgctgtctgctgggatcgctgctcatgggtctgctgtactgcttcctcacggtcaacctgcgagccaaccagaacgtcacgggccttgccatgaccacctttggcgtgggcttcggcaacttcttcggtgggtcgctcatcaagctcaccggcgccgacgtccccaccatctcgctgggaaccaccagtcggctcttcaggacggcgcttccctttgcgagctccatgggatggtttggccaggtgttcctctcgtttggcttcttggcctacgtcgccattgccattgcgttggttgcgtcgtacatccttaacaggacgcgagtcgggctgcagctgcgcgccatcggcgaagaccccgcaaccgctgacgctgccggcatcaacatcacgcgctacaagtacatcgccacgtgtggtggctgcatgatcgctgggctgggcggcctctactacgtcatggactacgccaacggcatctggtccaacgacgccttcggtgaccgcggctggctcgccatcgcgctggtcatcttcaccatctggcgccccaacgtgagcatccccgcctcgatcctgtttggggggttgtacatcctgtacctgttcattcccacaggcaaaaaccttgcgatcaaggagctctacaagatgctcccctacctcgtcaccatcgtcgtgctgatcataaccagcatgaggagcaggcgtgagaaccaacctccggagagcctgggcttgccgtacttccgcgaggagcgctagctagcggccgggacaggtcgtgcgcaagaccagggaccacagaagggcaggccagagaccttcgtctctggcctgcccttctgtgggggacgcttccaggcgtctcgcacctgcgggattgccgagcgagggagcgcccagcacaggcttcaagccccttcctgagtttgtctgcactttattcggagctcgaaaacaaaccccacctacaaattagattgtctgttgattttgactaccgaaggtcacccctacgcctgtcccaacttcaaaagtacagacaaactctccttcggtcctgaaccaagccaatgctgcgccgacaaatcaacttgtctgcattttgggaaactgttgctctggagatcgccccatgccttggatggcgtttggccaaatgcagacaagttgatttgtcggcgcgaattcatcgccctaagagagttattttcgatttgtctgcacttttcgatgacccaatcgaaaatctgaatttacagctacgaaaaaagacctacgaactaatttgtaggtgcatcaatatctcaaggccaccaaaacctacagacaaatttccgtgaagcctcgttcgctgccacaacccacccccagcagggcaatgccactctctcaggcatgccggtcaggccaagagccggtgaaaaaaggaggggcccgtagggcccctccccttgccacgcgatgagagctacacctacttggcagcggcctgcaacgcggccttgacctcagcatcggtcttgaactgcatgatcttggcgaccagggcgtcggcctcctccttggtccactgggagatgacgcgacgcgccttgaggatggagggcgcggacacggagaactcgtccaggccgaagccgatgaggacggggatgaacagggggtcggctgcagcctcgccgcacatgccggccatgatccccgccttgttggcctcgccgatgatgcgctgcagcgagcgcagcacggcaggctgatacggattgtagaggtaggccaccttgtcctggccacggtcggcgcacatggtgtagccgatgaggtcgttggtgccgatggagaagaagtcgcactcggcggcgaggatgtcggctatcagcgacgaggcgggcgtctcgaccatggtgccgatctcgatgtcgggattgtacttgaccccgcgggcgtcgagctcggccatgcactccttgacgagggccttgaccttgcggatctcatcgatgcaggtcaccagcggaaccatgatcttgacatcgccgaaggccgaggcgcgcaggagggcgcggagctggaccttgtactcctcggggttgttgaggcagtagcggatggcgcgatagcccaggaacgggttctcttccttcgggagatccatgtaggggatctccttgtcgccgcctatgtcaagcgtgcggatgatgaccggctggttcttcatgcgcagggcgaccttctggtacgcggcaaactgctcctcctcggagggaagctcctgggcatccatgaacaggaactcggagcggaacaggccgacgccctccgcatcatgctcgatggcagcgttggcgtcgttggggttgccgatgttggcgacaaggatcttctcgatgccatcggcggtcctgctgggaacgccgcggaaggcctcgagggcggccttgtcctcggccagcttcttggccttgtcgcggtagtcggtcagctcgtcatcgctcggatcgacgatgacgacaccctttgcgccgtcaacgatgcagagcaggccaggcttgatgttcttggtggcctcgggcacggacaggaccgcagggatctcgagagcgcggcagatgatggcggcgtgggaggtgcgcccaccggtctcggtgacgatggccgccacgttgtccttgtcgatgtcggcagtcatcgagggcgtgagctcctccacgatgacgatcgagtgctcgggcagcgaggagaggtcgacgacctccttgcccagaaggtccgccagcagggcgatcttgacgtcggcgacgtcggcagcgcgctcgcggaagagctcgtcctccatgccggagaacatgttgtagtacatgtcgtaggcatcggtgacggcctgctcggcgcagatgccgccgtcgatggcggtctcgaccatctccctgatgccatcgtcggtgccgaactcgatgtgggccgtcatgatgccggcctccttctcgagcccgttggccttcatgcgctcgatctgggcctcggtggcagtcacgaacttgtcgcgagcctccaggaaacgcgccttctcggctgcagcatcctcgaccttgaccggcacaaaggacaggtcgggagcaatggcgacctgcgcgacaccgatgccaattccgtcagaagcgttgacgccctcaaacatacgatacctcctgttgacaaagacctacatgaccctgcgtgcgaacagctatgcaaagcggggccctgaggccccgcatggtaccggtatgtcgtctatgcgccctgcgccgcgatgaccttctccaaggccctgagcacacgcatgatcgtgctgtgcttggcgatacccttggaggccgccgtggcggaaccgcaggccgaggcaaatcgcagcgccgtctcgtagtcctcgcccgcatcggtcttcgccacaaagcccgcgaccatcgagtcgccggcacccgtggcgttgaccaggcggatcttggcggtcggcacggtgtggatgttgccaaactcgtcgtagagcagggcgccgtggccaccgcaggagacgatgacgttctgggcgccgcgctcgtgcagctccttggcgaaggggatgcactcctcgggcgtctcggggttggccccaaagatacggccgacctcgtggttgttgggcttgatcaggaacggctctcggtcgagcgactccatgagcagcgagcccggggcgtcgacgacaaagcggatgccgcggccctcgagggtcttcatgatgatgttgtacatttcctcgggcagggacttggggatggagcccgtcagcaccagggtgtcgccaggggcgagaccatcgatgcgacccagcagctcgtcgaccttcttcagcgggatcttgggacccatgccgttgacgatggtcatgacgatgccgttcatcttgacgttgatgcgggtgtagccgcggtcaagcttcacgaagttgcaggagatgcccttctcctgcaggcgattcacaaggtactcgcccgtaaaccccgcaacgatgccgaaggcgacgttgatgacgcccagctcgttgaggagagtggagacattgatgccattcccgccgcagtggatctcctcgtttgaggacctgttggtgaaccccatgtccagcgtcaacggatgcatcacgtagtcgatggccgggttcaaagtcacggtgtaaatcaacgtaagctccttccagcgctccaatgatgttcattatgctgcaagcctcggtgagcttttgccgagaacctagtgagtgacgggttgagtatgccaagtggtatcgttctcgcccccattgacatcggcatcgttcgacaccggtgccgcctaggcggacgttccttctccatttatattgtgtactaaattttagtgtgctagtatcaggagaacgacacgacgacaaggagagacatcatgccaagcagcatctacgacttcaccgtaaccgcccaggacggcaccgagcgcagcctcgtcgacttcaagggcaaggtcctgctcatcgtcaacacggccaccggctgcggcttcaccccgcagtatgtgggcctgcaagagctctacgagacgtatcacgaccgcggcttcgagatcctcgacttcccctgcaaccagtttggcaaccaggcgccgggcagcgatgccgagatccacgagttctgcgtgggccgcttctcgatgaccttcccccagttctccaagatcgacgtgaacggcgagaacgaggacccgctctacacctggctcaaggcacagaagggcggcttgggcggcaagaagatcaagtggaacttcaccaaattcctcgtcgaccgcgagggcaacgtggtggcccgctttgcccccgccacggagcccgccaagatcgaggagagcatcgccagcctgatctaggcccttgtcgggacatgggggcaagatgcggggaggacgtcatgggacggcctccccgcacgctcacgtatcgagcaacaggctgccgaaagccggggcgccctcgcctgccgatggcccggacactcgggcagcccgcaccctcgctccgggcctcgctccggccccagccgcaattccagttccagccctagccccagccctagctcctagctccagtccacgtcgatgtgctcgacctcgctgccgcatgtggggcagcccacggtccagatgtgatcgacatagcgctggatgcccttggagcggacgcgcacgcccgacgcctcgttgtcaaccaccgtgttgcagtggggacagcgcgcgggggcgatggtgtggcggaagatggctccggagtcatcctgcaggtaggccaccttgccactgtagatgcgctggcagtaggggcagcggaagtgggcgccccgcatgcgcacgtcaacgtgcacgcgcgcgtcatcgctcatgagggccttgagaaggcttccgtggacgccggcgacggcctcctcgacgaagtcgggaggattgagtgccttagcgctgtagcctagatgaaacacctcgccacgcgcgcagttatcgcaatgccaacctagctttcgtcccatacgatcgcacccctctcatgccgcgagaacgcgcttcgtccgccacaagcatacgatatggtgcggggagcttggttggacgggatgggcgagtcggcaattggttgggggtgagtggtgccgacgcgtgatcttccatgggggcgcgtctgcccgtgatcgctcggttgtccatccgcaagcggcccgcccaactgcccataactgatttcattatgagtaattgggagataacgtctacagttcctgctggtatttagcgcgagtaccgtacgatctttccggaactacccataattgattctattatgggtagttccgcagggcactgccgagaggatcgcccgtctatgtgagctccacgcacctctgccctgcgggtacgacgctcccgcaatgcggggagaaagtgcttttattacgaaataaaatactattctacttctcaacgtgatgcgacgtgatcctcgggccactccgaggtgaatgcgccagtgtgggactgctccgtctcacagtgagcaagttgcagagccgcagcagctcccccgctcgtccatatccacaagacaggcatcaagagtcatccgcgtgtgcggggagcatgggtcctggtaccctgcaccctcaccactcttcgagtcccgagcctcaccggaccctcctctgatgttggctgccggccccgctccttctctcgggtcatgtgcggatgcgtgtgcgcgtcatggaggagcggtaacaggaccctttgcagggccctggtcgaaagcttcggcaccaaaacgcgaccgggacctaggggcgcgaggctgtggtctccgtgtcggcctcgtcgcggcattggcacttccagtcctcgaggaccgctccctcgaagaacaggtaagccgcctcctcggtgcagcactccttgcatgcaatggacctcgcgatatcccgaagggtgcgcgtcaccctaatgccgtcagctatgatatatgttttcgtcatatgtacatccgagcacctctcaccctcggctcctcgtagaactcggctgcggtggtctctggcggcgccctgtagcgcttcagcttctcaccatcaccccgcatggcgtcgacctggtcgggtatggcgcgcgggtgtgacacaagggcactcagagcctgcccgacgactgcgagtacgacgtagaccacgaaccaaatcgcggccaacgccacgagcgcaatcccgatttcgcgaccaatttggcgcgttccctcactctccaactccgcgctctgaagcgaccacatcccggcaacgagcctgggccactcccccctatcatctggacgtccgtgaccacgattgccatgatgattgcgaaggacagtcagctggaaaagaaggctcgaaagggctcaggaagcgtgcggcatcctccaagaacgtaggctgcacgaaagtccatgtctagagagtcctctatacttccagaaggaatgacaatacgtgaggagcagacatggatacctctcgtccctaccttgttctaggccttgacccgggaattgccagctgcggattctgcctgctagacatgacgaacaatacgatattggaaatgggctctcatctcttcgaggctccgcagaacccaaagacgaaggaaagccatgccgtcactaggcgtaacgccaggagtgctcggagaagcacgctgcgcacaagtctgagactcaagcattgcctcaagctgctcaccaagggaggccttgtgccagatggggcagacaaggcatggctccagtcacgcaaaggtgacaagcccatactgacgcttcgtgcacgtgggcttgacatgctgctttcggaccgagagctcgcccaggtgctttactcgctctgtagccatcgtggctacatcccccacggcgagggtcggacgggtgagacggatgacgtagagggtcgcaaggtcctcaatgccgtcaagaggaacagtgaggtgatggcatcagggcgataccgcacagttggagagatgctccatgcagaaggaagatcccgcaacaaaggcggagactacacgtactgcgtctacaacagccagattcaagacgaaatcaaggcactctttagaacccagaggaggctcggaaatgagaaggcgtctcagaaactcgagaatttctacctagaatgcctgacctgggagaaagaggcgctcgaacacgatcaacgagtctacgagatggtgggcaagtgtaattactttcccaagctcaacagggcggccgaggcagacgtgtcctcagagctctgtagggcatacgaacgtctgggacacctagtcatcgtcgatgaattcggtcatgaaactaccctcacgaaaagctgggtaaaccaatatctggcgattctcttttcccccgctccattgaaaggcaacaaggattgcaaggtcagatactcgaacatccgcaaggatcttgacctaggtggaaaaagcatgttcaaaggaatagcgcgagaacaagagagcaaattagagcccttcgcgccgaagacctggcgttgtctccgcagccatggcatcccccaggagttcctccaacgcatgcttgacgacaaggagcttggtgaccaggttggcgaagccctcacgtttgcaagcaccgaggccagcctccgcacaagactcgaattcctcgacctcacgaaaaacgaactcgaagctctctgcaaactgccgtttgctggaaagctgttcaagggctacggcagcaggagcctcaaggctcttggcatgcttctggatgccttcaaggacgacagcgtgcgaacgctcaaggatgcagaggaggccagcggacttctcgcgctcaggctctcagatcgcagcgtccgctcgaggctgcttccgccctacgcggtctatgatcccagctgcagaaaccctgtcgtcctccgtgccatggggcgcatgcgccgtatcgtgaacgcactcatcaggctctacggcgtccccgacgaaatccacatcgagctcggccgcgagctcaagcaatcgaagcatgaaaagaaagtcatctcaaaacgacagaaagcgaacgaggctgcaaacaaaaagtgggcaggcgtggcagccggggtgctggggatagagccggaagccgtgcccaaaaggattgttcgcaagctcatcatgcgcgaggagcagagcgagagagacctctacaccggaatcccaattcctttggaaacgctcatcagggatgaccgctgctgcgagattgaccacatcctcccctattcgaggacatgcgatgacagcaggaacaacaaggtcctcgtcttctctaaaagcaaccaggacaagagggagaggacgccctacgaatggatgaactccggagaggatggcatacctagctgggacgagtaccgcaaccgcatcatcgccacaatcaagaacccccgcaagagggccaaccttttgaacaccagtctcggtgatcaaaaggtccaagaaggcttccttgccaggaatctcaacgatagccgctatatgtccagagcggtaaagagctatttggaggacagcctcgcattccctgaggatggtagggtcaaacatgtctccgccgttgccggcggcgcgacgggtaatctccgctgggtctggggactcaattttggcaaggacggtgacaaggacagggcagatgaccggcaccacgccgtagatgccgccatcatcgcggcctgctccgacgcaacggtgaagaaagtcgcggaagtgagggcacttggccgcaactctttcaagcagatgcgagaatcccgtctggcaagcacgcaaccttggcccaccttcgcagacgaggtcatcgcccgccgagaactcgtgatccccacccgcatggtcagccatggtgtcaccggacgtgttttcgaggacactctctatcgcttgaacgactacacggatgacagaggaaggtatcccatcatcagcgttgacaaaacaatcaatggaaagcgccagagaaagtctatcaaggctggtaacgtgttcttcaaccctgatggttctgtaaaaattatcgatggcatggcgttcctgcgactctggcttgatcccacagcacggccaaacggtaaggtcaagggcaagtggtatgtggagcccgtctactatgcggacattcctgctataaaggacggaacgtacgtaccaagggcttgcacaatccatgttgcaagggtcaactggactccggttccagccaccgcacttgtgtcatctccgattgtgttatttgctgggaattcattcatagtcgacaaccacattggcagattctggagtttggatatcagtggctgtcgccttgacgttcgcgatatccgagataaccaagctcccgccccagagttccctgtaacccccaattcctggggaagggagacgactgtcaggatcctgcaggaagactgtctcgggcactgctatgaccgcatcacgcttcggcccgatagctcgctctttgaggtacgtcgctaacaacatcatccctccacccaacctgcccagttgggtggagggagcattcaatcctcagcagcaacatccctagaacgatagcgtcaactgcggcccagggtcgggagtgccgtggtgatgcacgccacaattgatgagtatctgtctactctcatactgcttctctgttagcactatcacggtaacggctcccgcagacggaagattggcgcgcatcctgttcagatggacctccgcgctgtccctagagagcaggattctggagtagatgctgaactgctccatgtgatagccatctgatatcaggaactttcgaaactttgaatacgtcttacgctcttccttactccccgtcggcagatcaaacatcacaagcatcctcatgattctcatcacgacctcactactccaggagcccaacgcgtgcaagcggaacgatgccaggcaaccgcagcagcgaggcatctctcgcgttgattgccaactttaaggagtcaagttcgtcttcgatagctgtttgaaccgcagcaacgccttcctgagtcgaaacgagacattcaaacaaactcgcaagtgaccgcttggtctcgctcgtcagagttcccctaagcttcttctgtatcacgataagatcaacgactggcctaaagggctctatcaaatcatccactaaattgaatgcgttcaggttattgctgtggtgaatccctctcgagacaagccagccaccaccaacagccgctcttccaattccagccctcaggactgtgtagccatagtccagcgcggaggcatagggtccattccttcgacttccctcgggtaagagggatttgaaatagctgcacgccgccacggactctcgattcgagatatctccggattgcactgctctcgagatagcgtggagagcagctccgtcttttcccagaagatcgagtactgcagcctgattctctatcttggaaaccacaatccgttgccaaagccgtttcttcagcggctttgagattgccagctgatcgtcaactatcgccgcatgacgagaatgagcccccagtggcaacagcagtccatttggcatgtgattgttgccacagagcatgacgccaatgccagcatctacaagctcggacaaagcagcggttgttatctgcgcctgatgggtctcgagaatcacaacccagatttcctcaagcggtattagcccctttagacttcctccctgcttgactgcaagcgaaccatctttgatagatagaagtgccgagtgttgaatgcatactgttctctttggcatggctcctcgcctgatcataggctataatggctcaagtctggcgtggtttgtatcaactggggagttggaaggaatcaacggctagacaagggaatcgtttcgacgatacccgcaaggtaagcccgtcaatgtcctcagatgttggcgggtgatcctttttctgcagacggtttttcaaaaaggacggacggcaaggtcatttgattgctcaacagctcttttttcacatgcctcgatcagagaagcccctgctcacaggggcttctctgatcgaggcgattgtaccaactggggagatggaaggccggcaagacatgatggtctgatcaacatacggcttgtacattgtaccaactggggagatggaaggccggcaagactacatcatcgaccgtgaccttgagctgtgcattgtaccaactggggagatggaaggccggcaagacactggtccacgtacggcttgtacggtccggcgattgtaccaactggggagatggaaggccggcaagacttgggtgcgggcattgtgcctacctttctgattgtaccaactggggagatggaaggccggcaagaccagcgtgcgtcgccggccttcgtccacgcaattgtaccaactggggagatggaaggccggcaagaccatgacgatggagacaaagagcacggtcagattgtaccaactggggagatggaaggccggcaagacgggagcggtctacttcgccacgaggaccaaattgtaccaactggggagatggaaggccggcaagaccggtactggtcctcggtcagctcggtggtcattgtaccaactggggagatggaaggccggcaagacatttctcgctctcgtagtgccatgtctgccattgtaccaactggggagatggaaggccggcaagacccgctgttccagttgccgctgttgtggttgattgtaccaactggggagatggaaggccggcaagactgggtgacgcgccacaccgctccgtcgtggattgtaccaactggggagatggaaggccggcaagacgctcctgccatccgcgagcgaggccggccaattgtaccaactggggagatggaaggccggcaagactcgctggggaggtacccacagcctgccttcattgtaccaactggggagatggaaggccggcaagaccccacgcgcgggagtcgagcttgtagctcctattgtaccaactggggagatggaaggccggcaagactcactcatttgccatacccgtggagcttgaattgtaccaactggggagatggaaggccggcaagacctcaccgataccgacgcaacgtcggcggtggtctcggacgtgctcttctgcttgttagctttaaatacagctaacaagcagaagagctggtaagagatgggcgtgggatcaagtgagcgcaggctctacatcggccctacgctgcaagcttcgtttacaaaactgcccgcaactccgttgcactttggacctcatttcaccaacaaatactcactagaggcagcgctattatgccgtaaaggagcagaagatcggtcagtaccctacgcttgcggcgccatgctcagcctgttcgcgcgtgaagccctcgtattcgagctgttcaatgagcctatcgcgtgagaatgaagcccaggacatgtagctagcagcgcacttctcagcttgaacgaaccagtcggcaccacaatggtcagcagcaaaggttgcgtcctcgttggagaaaccctcgtactcaagctgctcagtgaggcgcttgtaagagtagcctgcccagctcaagtagctagcagcggtcctcatggcattcctctgcgacgtcgtgagctcaatcgtatattcttcagtctcaagctgcgtgccgcaccctgtgcatacccttgcacgttttcctggaatgacgtcgcctgccgaagtgacagtgaggtcatcaactatctgccagtcgccaggagtgtgatcaagtctcgtgattgactttgtttcatccttgccacacgcattgcagatccgctcttgttccccttcctcggagcatgaggcttctttggtggttttccatttgctgaaatcgtggtcaatcattgccagcttgcgtctttgctctttgttacagcgagtgcacacaccggcctcgacgcccttctctgtacaggtggcctccttggtcacctcccacttgtctatgctgtgtccaagcggttcgccctggggattgccacaacgcaagcagacctctggttcggtacaagtggctttctcccactcgtggccaaggtgttcaccttggctgcgtccacatttacgacaaatctgcggattcgtgcaggtagcgtccatccaatcatgaaagcaaatgatgtgcgaagcgaacaagcatactatgaccagggctacagtagctactaaaacgccaatcttcccgttctttgtcgagaggagttgtctggcctttgtaccagcatgtgccaccatgctgtcaagcttttcggttcgagcatcacgtttgtcttcctgagcgggtgaagcaacagttggcatacccacagtctctgcattagtcccggcaactgcagctatttccgatggagcttctgtcgtcgacttgtcctctacgattgtatcggctgttccagcatcagtcgtgacttcatccaacgggtggtcgacgtttcctttcggaatgtcgctcattcctggatcatcaatcgcttctggtttgtcggcatccttattatccgatccctcttcagccaggactgtctcgtcattgttctcggtagtgtctgccatgttgccctccgtgtcatacatcgtccttgtgtccgacagaagtatgatgccattatctagatacgatcagcatgtgagttcgctccatgtaacggttgcgaccttgaaaggacgatgaatcggttgcctgctcagattgctgttatagacaggctcggtggccagttagaaactcttacgtgaagagcgacaaacgtgtgcttggacgtcgagccgtcaagttgcaaaagtcggccagacccggacagctggaccagagctggccccatcggatccacttgagactggacatgcagcatgtccgtctgaggagtccaaagctcattccatccgaacgctcgaagagctcaatctcagatctttgcatacgatcccgctacccacattgtgttgcatctggttccagacagcgctacctcacccgtcgctagacttggaaacctgcatccgcgcgttcgcttccgcgcacgacttgtccacaagatacctgctttctcccgagtcccaatcccaaaatggataaggctctctacatctgcagcccgctcgtcacgtcacgtccagtttggactaaacttgcaagccgatgtccgtccccacccgctatggtagacaccacacggcagaacgacacaaggagcaccccatgagactcgtccccatcctcgtccttgcaaccgcgattgcgcttgtgctcgtgggctgctctcaggcacccgccggcaccagcgccacaggagaagcgagcaccgggaaggccagcaccgtacagaccgtgagcggcgcggaggcactcgagatgatggagcaggaaacagaccacctcatcgtggatgtgcgcactgcggaggagtatgccagcggccacatccctgaggccatcaatatccccgtggagaccatcggcagcgacccgatacccgagctgccagacaccgatcagaccatcttcgtgtactgccgcagcggcaggaggtcggcacaggccgccagcacactggtggcccaaggctacgcgcgcgtcatcgacatgggcggcatcatcgactggccgggcgaggtcgtcacggactgacccagcggcatcacgggtggcgcgacacaggatgccccatgcccccttcgtcccatgcccccttcctcacagagcgtaactcgacccgctccttgtgcaactcggtcgcacgaggagccctcccctctcacgagccactagactgcagttgacaggccgtcagcccgcaacggcaagggaggtgacgcaggatgaacgtccgactgatcgaggagcccggccgcacagagatcgagatgacgctgcgcagcgcaccgggcgacccacgtgcgctgcgcatcgccgagcgcgtgcggggcatgttcggccgactcgtcgggtatccggacggcagcacgatggaccggcatgtcatcgccgtgatcatgctgacgctggcaatagccattggtgcgctcacctcaggcctggacgcgggaaggcgactctgcatcagctacatcgccgccggtcttgttgggggcatcctgcagcagctgtggttcaactatcaccctgccatgagactcacctatagcacgcggctcttttggtttggcaccgcctacttcgttgccctcgccacctgcgctcgcttgggagcgtggctgcccgtggacaatccctgggcctgggtgagcttctcggtcatattcctcgtgatctttgcggtgctgacccttgccattggcgcgatgctcaggcggcagggggtcgagtacaaggcgaagctcgacgagtaccgcgcgcgcaaggagaacgggtagtgcaaaagcccacgggcagcgcgaccaccgcccacgacgggaagccgggcgccctcaacccccccctacgggatgggagcgcccggattgcttgtggcagaatgcgatttgtctgtacgtaatcgctgcctatctgctggttttggaaggttgtctgtactttccgaagaggccctctccgtgctgcgtttgtaggtgccgtatttctacagacattctcatttgtaggtggggtcatttccaacgagtgcgaaaaagtaccgacaatcttcgcgttgacacccggcgcaccatacgtgcggcacgagcctacccaccgcagatcttgcacgggcggcgccccatcgcctcggcctcggacacggtgacccatctcatcgagcgcgcctgcgaaagaccgcggcacgtctcgtcgtgatggtacgccctccccgagcccgtgatgatcaccttgcgctccccgccctcgctcgccgaggacccggtgggcaacacgggagccgcagcaacgtcgcgctcctcgtcggccgcaccagctgccccaagggccgcgagccctagcgatgacctgatttcctccgcagcctcccgcgcgtcctccgtgaccgagaactcgcccgtcgcgtagtcgatctcaaacccacgtgcggcgttgtacacctcgacacgctggtcaacggaccggtcgctcgtccgcacatccacgatcacgctgcgcgcgagcagctcggtcccctcgtacacgggcgtcgcggcaaagtacaccgttccctcgggatgcgcctcgagccagtcccgcacaagcgcctcggcgtacgccatgcctccttcggacccattgacgttcgcgccgacgttttgcgtgcgcgtgcccgtgatgaggttggccgccacctcctcgccgccgagcgacttggccaccagatgcgagcggttgaacaggaggccgtggtagatgctgccatcaggcatggccatgtcgacctcctggttgtgcccccagccggtaggctcgatgtccgtcgtgccctcgcgcacgcgactcctgccggccatcatggagtcatacgtcacgcaggccaccgctcccgtcgctcgaccccgcccgtcaagctcgccgtaggagatggttcccggctccgggatctccccgaccgaagcggcgccaagcacgcggtagtagttggggctgtcggcctcgctccatggggtgtgggaaacggcaggcgcctcagcggcgagcatctccatggcgagctcgccgccaacctcctccgcatcgtctgcaggagcgtcggcaggccgatcaaccgacgccactccctccgaagcgggcgctgtctgtggcaggtcctcatccgcacagcccaccatcagcaacagcagggccagcgtgatcgcggcccaccagagatatgatgtgcgctttgtcatgtcccctccgtagctcctgctgagatagtaccgcgccatccgccgacaaggccacagccatgcccaccatgctagaatagtctgcactttcacgaccgcgccaatagctcagtaggatagagcaggggacttctaatcccaaggtcgggggttcgaatccctcttggcgcaccacgagaaacaggcccctgacctgctgaagcgggtcaggggtgcttccatgtctgatatgtgcccaccacgctgttcgcccgttgtccacccaagctggccggctttcgggcaaagtcccccatccccggcccgcacgcgcgtgcacaccaggcgcctctcctcggaaggacgcatgaccgccaacctcctgcgcgtatcgcgtcgagcgcgggagcggcttgcgggaaggccaggagcccagggataggcacctcgagcatacgacgcaaatttgtctgcacttttccgagagtgtctcaccggcatgcacctacaaatcaacttgtctgcactatttggccaccgaaaaacccagtcttccagcccctcgcccaaaaagtaccgacaaactcaaattcccgcctctgagcacgcgaaactgcacctacaaatcaacttgtatgcgtcccacacttgcaggccaggcaccggcgccagccgcagtgctacagcgacgccgcgaacagcgccgccacgaccgtcttcgcgtcctcgatgacatcggcgcgcacggcggccaccacctcatcgaggggaacccaggtcacgctgataaactcgtcggagtcgggatgcgccgggtgctgcaagaccccgtccgcgtaaaacacgcgcgtcctctcgttggtgaacccgggggcgctgcagctcaccgcgatggggatgagccgcttggcgacaagacctgtctcctcggtgagctcgcgcgcggcgcaggtggcggggtcctcgcctgggtcgagcttccctgcgggaatctcgagcgtcatgcgcccgagggccacgcgatactgccgcacgaggcacatcctgccgtcgcgcaccacgcagacccccgcgccaccgtcgtgcagcacgacgtcgcgctcccccacctgaccgtcaggctgcgtgacctgccagcgctcggcctcgaagatgccgcagcgccacatgctctcgcgcgcgtccacgcgctcgacgagcgcagggtcgtctgcgagcagcgctcgaatccgagagaggcgcgcgtcatcatcctcaggtggcagaaggtcaaggcccatgggaactccttggatcagaaaacggcccgttggctcccctcaggtcggagagccccacccagcatacctgttctcccgccgaaaagcagggccttgccccaccccgcgccattggggcggtcagaccaccgctagtcctccgtcatggcgaggaaggccctcacgcgcgggtcccgaggactcaccatgacctcgtcgggggtgccctgctccacgatccggccgtcaagcaggaagcagatgcgatcgctcgcctcccgcgcgaagcccatctcgtgagtcacgatgccaacggccatgccgtcggcggccagctcgcgaatcaggcgatgcatgtcggccgtcagcttgggatcaagcgcgctggtggcctcgtcaaagtagatgacctgcggcctcattgccagcgcacggcagatggccacgcgctgctgctggccgcccgagagctcgcacggcaccttgtcggcatgctcggtgaggtcgaggcgagccagcagcgcgcgggcctcagcctcaacctcgtcgaccgcgcggccctggaccaccacgggggcgtcgcacacgttctgcatcaccgtgtagtgcggaaacaggttgaagctctggaagacgatcccaaagcgcatgcgcgcctcgtggctggtccgcttgtcgtagatggcgcgacctcgctcgtcatgactggtgacctgcagcgcaccgtaggccagcgtgcccgagtcgaaggtgtcgagcagggtcaggcagcgcagcatggtcgacttgccggcaccggagggtccgatgagcgagacgacctcgcccctgtcgatggtcagcgagacatcgtgcaggacctccttgctgccgtaggccttgcaggcacccttgacgtacacggcaggcaggcctgccgcggaggcgaagctcacgtcgggtgtggggatgtccctcatggtcgccctagtcatggtagtatcccagcctcctctccgcgcgacgcaggccgaactcgatgacgaggcaggtcgcccagtagatggcggccgcgatggcaaagggcaccatcgagcgctgcgacgccaccagggcccgaccggtggtgaacatctcggccacgccgatggagaaggccagcgaggtgtccttcaccagcgtcacgacctcgtttcccatggcaggcaggatgcgcttgaacacctgcggcaggatgatccggaagaaggcctgtgccggcgagtagcccagcacctgggccgcctcgtactggccatgcggcatgctctggatgcccgagcggtagatctcggcaaagtatgccgtgtagttgacgacgaacgcgatgatcacggccacgaacttgtaccccgggcccgtcttgatgc

SEQ ID NO: 2679 - DNA, 23042 bp, synthetic construct
  misc_feature 1..23042: note = Synthetic
  source 1..23042: mol_type = other DNA
  variation 17339..17438: note = n is a, c, g, or t
  variation 18056..18155: note = n is a, c, g, or t
  variation 17729..17828: note = n is a, c, g, or t
gagggacggcgccctcgctatgacctcggcggtgacctggcctatgaccccacgctccttgggggcgactacctgtttcgcacggcggatcgccccgcggggggcgaggcctgcgcgcccggcgcgtacctggtgcgggacgtgacggcacagaaggcgcgcgagctgttcgagcgagcgcttgagacggatgcgacctccttcatggcggcgctcccgcgggaggcgtagatgatcaaggtcgcaaagttcggtggctcgagcgtcgcggacgcggagcagttcaagaaggtcaagggcatcgttgacgccgaccccgaccgccgcttcgtggtggtgtcggcctccggaaggcgcttcgcccaggacaacaaggtcacggacctgcttctgctcgtcaacgcccacatcgagtaccacgtcgactgcaccgcgcttttgcacgagatcgagcagcgctacgttgacatcaaggaggcgctgggcctgagcttcccggtgcgggagaggttcgacgacttcatcgacgccatccatgcccattcccccgagttcgtcgtctcgcgcggagagtggttcacggcgcagctcatggccgagtacctggaaaagcccttcctcgacgcgcgcgacgtcatcgtcttccaccatgacggtaccgtcgacctcgagcgcacgcagctgcgcattcgcgacgcggtgcagcgcctgggggactttgtgatgccgggcttctacggctccacggtggacggctccatcaagctcttccagcgcggcggcggcgacatctccggcgcgattctggcccgctgcatcgacgccaacctctatgagaactggactgacgtctcgggcttcctctcggccgacccgcgcgtcgtggacgacccgcgcaccatccatcgcatcaccttcgacgagatgcgcgagctgtcctacatgggcgcgtccgtcctgcaggaggactccatcttcccggtgcgcgaagtgggcatccccatccagatcaagaacaccaacctccccgagaagcgtggcaccacgatctccgaggtggccaaggacggcgcccgcgagcacctcatcaccggcatagccggcaagaaggacttcctggccgtgcacgtgcagaaggcgcacatgtcgtccagggtgggcttcgtgcgtcgggcgctttccgtcttcgagcgctacggcgtctcggtggagcacatccccacgggcgtcgactccttcggcgtcgtggtcagcgccgccgacgtcaaggacaacatctatgccatcgtccatgacctgcagaaggagctcgagcccgacagcatcaacgtggtcgaccagcttgcgctcatctcggtcgtcgggcgcaacatgagccgtcgtgccggcacgtcgggccgcgtctttggcgtcctcggcgaggcgggcatcaacatccgcatgatcacccagagctcgcaggagatctccatcatcatgggcgtcagcaacgcggacttcgagcgcgccatccgttgcatctacgataacttcgtcgacaccgaaatggtcgacatgcccaggcaggctacgctcgcctaggcgacggcgtcgcccgccgacgggcgcccacgctcactcacgctaccaaagggggcagacatgacaggtaaggttgttgcgatactgggcgcgacgggcgtcgtcggcacgcagatgagacgctgcctcgaggagcgggactttcccgtgcgcgagctcgtccccctggccagcgcccggtcggcaggaagcacggtgagctttcggggcggcgaggtcactgtgcgcgaggcgacgcccgacgccttcgagggcgccgacatcgtgctgggcgccgcaggcgatgcgcaggccaaggagctgctgcccgaggcggcccgtcggggggccgtggtcgtggacaactcccacgccttcaggctcgacgccgacgtgcccctggtcatccccgagatcaacgcccacgacatcgcccggcatccgcgcaacatcatcgccaaccccaactgtgccacgatcatcggcctcgtgcccgtgtggccgctgcatcaggcggcaggcctcacgaggctcgtcgtgagcacctaccaggcggcgtccggcgcgggcaagccgggcctggacgagttggagcgcgaggtcagggccatcgtctccgggaaggagccgggggccaccgacccgtttgcctatcagctcgccttcaacctcatacctcagatcgggggctttgacgacgaggggcacacgtccgaggagatgaagatgcagaacgaggggcgcaagatcatgcatcttcccgacctgcgcgtcagctgcacctgcgtgcgcgtgcccgtcctgcgctcccactccgagtccatcacgctggagttcgagcgtcccctctcgccggacgaggcccgagagatccttgccgacgccccgggcgtgcgcctggtggacgaccctcgcgcgctgcgctatcccatgccgctcgagacgagcgaccaggacctggtgtacgtgggccgcatccgccgcgacctctcggcgcccgagggcacccacgccctgacgctcttctgctgcggcgaccagattcgcaagggcgccgccaccaacgcggtccagatcgccgagcacctgctctgaggggcccctgccgctgcgtcgcggggcccgtgggtttcccgacgcaggcgcgcgggcggcgcccgtcgtttcgccgcccgcgccccactgccgtagaatcaggatgacgcggcgcgaggatgcgccgccggacgtcgcctcgcggtggcggcttggaaggggagtgcggaggtacgtggcaggagacgcaggtcagaggaacgtccggagggcgcgaccccggccccgctcgacggggcagagtccgtcccggcgcaggggctcgacgacggcgcggaaccggacggcgcggccctcgacaaaggcccggcctgcgggtcctggcgccacgcgccctcgtcaggggggcgcaaggccccgacctcgcgccgtcacgccccgcgacgacgtcgccgagcgctccctgcgccggcgttttgcgagacgcctctgggtcgtcctctcgtgctacgtcatgggttgggcgggctaccttgcgtgcttcgtccttcatcccgacctgctcggctccgtcaaggtggcgcttcccctctatctgctcatggtgacgctcaccttcgcgctgggcgccgcagtcgcgccccagcgctcctggggctgggggcgcctgctcgtcgtcccggcccttggcctcgcgtttgtcctgctccagctgggagtggtgctgggggctcgcctgacgctcccgcacgggtcgatcctgccgctctgggagtacgtcgccatcggggcctgcgccgccctgctggggctcgtcgcggggctgtacgggtccttcatgctgcgtcgggcccgtggcgacgaaggtcgctagcggcgcggtggccccggggcgtctttgacaggcccccgtgtcgccctgaaggtcgctggcgcatatgcgcaggcatgcagacaggcgccccgcgcaggtggctatcggatacaatgggtgggctatcgcgctgtcgtactgtccctagattcgcgtttcgtgtgacggaggattcatggcactttccaccgaggacgtcgccggcatcgccgactacgcccgcatcgcccttgacgcccaggagctcgaggagatgaccgcctatctcaacgacgcggtccgcctcctggagcccatacgtgcctacggtctcaagggggtcgaccccacctaccatcccatcggggacctctccaacgtgatgggacaagacgtcgtcgacgcctccgagcgcgcgctgcccctggacgacgccctccgtaacgccggcagcgtcgagggtcgctactttcgcgtgccctccatcctgggcgacggggaaggtgatcgctgatggtcagccttgacgagctctcctgcgcacagatcgcgcggggcgtggcggccggtgacttctcggccgtggaggtggcgcaggcctcgctgtccgccatcgaggcgcgcgagcccgccgtgcgagccctgttgcaggtgattgccgagctcgcgctggcggcggctcgcgcgacggacgagcgacgcgcccggggggaggcccttggtcccctcgccggcgtgcccacggcgttcaaggacaacatgcatctggtgggcacgcgcacgacatgcgcctcgaggatgctcgaaggctacgagtccgtcttcacggcaagctgcgtgcagaggatgatcgacgccggcgcgacgcccatggccaaggccaacatggacgagttcgccttcggctcgtccaccgagacctccgccttccaccccacggccaacccctgggacctcgagcgcgtgccgggcgggtcgtccggcgggtcggcggccgccgtggccgccggcgaggtgaccctctccttgggctccgacacgggaggctccatccgccagcccgcctcgctgtgcggcgtcgtggggctcaagcccagctacggcctcgtcagccgctacggcgtcgtcgcctttggcagctcgctcgaccaggtgggccccttcgggcgtcgcgtcgaggacgtggccctcgccatggacgcgctcgtcggccccgggcgcgatccctttgactcgacgagccaggactgtcgcgccgacttcctcgagagcctcgaggattccatcgaggggatgacggtgggggtcgtgcccgagcttttggaggtcaaggggctcaccgacgaggtgcgtcaggccgtcggccgggcgcgctcggcgctcgaggggcagggcgccaacgtcgtcgaggtcagcctgcccaacatcgcgagctccatagccgcctactacgtgatagccccctgcgaggccttcagcaacctcgcccgctttgacggcgttcgctatggctatcaggagccaggctgcgccacgctcgccgagcagagctccctctcgcgtgcgcacggctttggcgaggaggccaagcgccgtcagatgctcggggcctacctgctctcgagcggcgtgtacgaccagtactactacccggcccaacaggtccgcaccctcatcacgcaggactatgcccgcgccttcgcgcggtgcgacgtcatcctcatgcccgcctccccccgcacggccttcaagtttggcgagataagcgaccctctgcagatgtatgcgtcggacatgttcaccatcagcagcaacatcgccggcaacggcgccgtctcggtgccgctgggtctggggcgcgacacgggcctccccgtgtccgcgcagctccagggcccggccttcgatgaccgccgcctgctgaccttcgcccgcgcgctcgagcgcgccgtggacgccgggggaggcctcggcaagggggcgcccgtcgccccgggctgcgccggcaggggaggcgagctttgatgaggtcgcttccggaggtgctcgagaactgggaggccgtcatcggcctcgaggtccacaccgagctcacgacgctcgacaccaagatgttctgcaactgccgtctcagtcacgacgacgagcccaacgccaacgtgtgtcccgtgtgcctgggcctgccgggcgccctgcccgtgcccaaccgccgggccatccagtccatcgtgatggcgggtcttgccacgaactgccagatcatgcggcgctcgatgttctaccgcaagcactacttctatcccgacatggcaaagaacttccagaccacccagggtcccgtcgccttctgcatgcacggccatcttgaccttgaggtcgccggagagcatgccagggagcgcccgcggtgggaggacgacgcccccggcgaccggacgccgccgatcgagcgcgccgaggacggctcgtacgtggcccccatccgcatcctgcgcatccacatggaggaggacgccgccaagatggtgcacgccggcggcgcggagggccgcataaccggggcggacgagtccttcatcgactacaaccgctgcggcacccccctcatcgagctggtcacggagcccgacctgcgcacgccggaggaggcgcgcctgttcatggagaagctgcgccagacctttttggccctgggcatctccgactgctccctggagtcgggctccatgcgctgcgacggcaacgtctcgctgcgccgccggggcgagacgcgtctgggcaccaagaccgagatgaagaacatcaactccttcaagagcctgcatgacgccctggagtacgagatctgccgccaggcggaggtcctggaggaggggggcgtcgtctttcaggagacacgccactgggagccggcccgacgccgcacggttgtcatgagggtcaaggagaccgctgacgactaccgcctcttccctgaccccgacctcgcgcccttcgacctctcggacgccttcgtcgaggaggcgcgctcgcgcatccccgagctgccggatgcgaagcgtgaccgcttcgtgacgacccttggcctcaagcgccccgacgccgcgcagatagcgggcgaccccgcgacggcggcgctcttcgagcgcgcgctcgacctggcgggcgagaagacggccgggacgctggcgaacgtcgtcgtcaacctcctgcctgcctacgcgtccgtcagcgcctcccaggcggcctccgtcgcgcggctgctcgcggccgacgccataagcttcgcgcaggcccgcgaggtgctcgaggcggtggacggcagcgagcgtgaccccgaggccgtcgtcgacgagcgcggcctgcgtcagagcaccgacgagggagcgcttcgcccggtggtcgacgtggtgcttgagcgctgccccgaccaggtgcgacagtatcgcgacggcaatgccaaggtcctcggctttttggtgggccagtgcatgaaggcctccaaggcggcgggcgtcaagggcaaccccaagctcttcaaccagctgctccgcggcaggctcgaggcctaggggccccgtgccgccgccctcgcgcccgccgaccctgcggcgacatgcgaggccgacaggagacatcgtctcgtccgcaccgaccacggaggcagccatggcagcccacgacctcaccgtcatccatcacccccgatgcggcacctgcaagagggccctgcgctggctcgacgagcatggcgtcacctacgcgctgcgcgacatcgtcgccgagcggcccgccaaggacgagcttcaagcctggcaggccgcctcgggcctgccgccgcggcgactcttcaacacgagtggcaggctgtaccgcgagcggaagctcaaggagcgccttgacgccggcatcagccgtgacgaggcgtgcaccatcctcgccgaggacgggatgctcgtcaggcgacctctcgtcgtcggcacccgagatgacgggacgccgctggtcctggtgggcttcaaggagatccggtggcaggatgagctcctctagggcgcccggcgcgcccgtcatcttgtgcggggccgccgtgcggcctatgattgaccccatcacggcaggggaggcaagctcatgcccaacatgacggattacctgcggtggcgtggggacctacactttgacgagcggccgtttaacgaggtggacgccctggtcctggcgaccgcgtcctatcttgatctggcccgcgtcgtgccgccgcggggaagctgctccaccttgggcgacgcctgcgcgcagattctcgccgaggcccagggggacctgtcgccctttgtgcgctcgctggcaagcctggacgttgagtttgtccgcgcgcttgccacaagccgccgctttgggaccttgcgactgagcggctgcgtcgacgtcgtcgacgagtcgcgcgccctgcagtttgccgccatgtgcgtcgagcttcccgaggccctcgtcatcgcgtttcggggcaccgacagcacgctcgtgggatggcgggaggacttcctgctcgcctccaccgtcacgcaggcccaacggtgcgccgcagactacctggacggggtcctgcgcgccgccggcgcgcccccgctcgtgctgacggggcactccaaggggggctgcctggtcgaatatgccctggccacctgtcctgacgagcagctgggacgcatcgagctcgcgtacagcttcgacggccccggccttgaccgcaccctgtgtcccgtgggcgcccacgagcgcgcgggggcggccttcaggcgcatccagccgtcgtattcggtggtgggtcagctcatggaccgtcccgaggcgccccggcgctacgtgctctcctccgagcgcgggctgggacagcatgaccccctgagctggcaggtggggccgacgggcctgtgtcgcgcggaggggctggattctgacgcgcgtctgctgtcggacacgctggcgctctggcttgacggcatcgacctggacgcccgcgcccgcctcgtggacgagctcttctcgattctggaggccggcggcgcgacgaccctgcccggcatcatagagggcggcagcatcgggcgcgtgctcgccgcggcggcgggcgccagcgacgagacgcgcgccgtcgtcgcgcggctgctcgacatcctggggagggcgacgaggaagtcgctcgccaacgacgtccgcgagggcatggaaggcctcgccaagggactgaggaggcggggcgaggagcttgtgcagcggggggcgcaagggctcgccgctgcgccgtggccccaaagcgacgacggggcgccgggctcgcggctacgagaggccggtcgcgccgcccacgagcagggccacgacggagatgatgacggcaccgacgagggcggagccaaacgagccgatcgtgatgccggcgtggaagatctcgcgcgagaggtagctggcaagctccagcatgatggcgttgataacgaggtagaaaatgccgagcgtcagaatcgtgaggggaagggacagaagctccacgacgggcctgacggtggcgttcacgagggcgagcgccagcgcgaacatggcgggaccgaggtaggcgcccccgacggcctcgatgccgggcacgagccagacagcgacgagcgtggcgacggcggtgacgacccatcttccaataaagcccatgagcactccttcgaacgtggccctgcgtcgccgcgggtggcgggcaggtgaacgacccccttatacccaagccctcccgtcccctgacatccgccgcctcgagggtggcgcgtccattgcgctacactgaggcacgtatgtcggcaggaaggggcatgcccatatggcacaggcatcgggcgacatgacgtcgcgcacgggcaggcggctctgcgcggcgctcagcatgctcggcgacgccgacgaggcgcgcgccctgctcgttgacctctgcaccccgggcgagctggccgacttggcccagcgcctcgaggtggcgacgctgctgagcgaggggcagtcgtacgtcgcggtgtccgcggccacgggagcctcctcgaccacggtgagtcgcgtgagcaagtgtctgctgcacggtgccggcggctacaagatcgtgctgggacgccttgacgagcgcgcgacgtctcaccctggcggcgtcgcggaggcgggccttgaccagggcgcggcagcttatcccggtgagaatgcggcgcatcgccccagcgcggaagtggcggctcggtagggggctgccttcctccgtggcggcatgcacgtggagtgccccagcacaggcaaaggggccgtccaggaggaaaaggcgggcacgtttgacgcccggggctcctggcggcctgggacgcgtctgacattcttgacaagcgcactggcaggcctcatggtcccagttgccgtcgggggatggccgtcgctcaatgtcgagggggtaaagtacactgggtgcacaacacaaacctgattgacccccctgcaggcatgatacttggaggagctgccatgaatcaggagcgacacaagctcgtactgggtcttgaccccggcattgcgagctgcggctttgccctgcttgactgcgacgatcacaaaatcttggagatggggtcgcatctgtttgacgttccgcagagaagcaaggacaaagtgagccttgcggtagttaggaggatggctcgctcggtccggcgcaataccctacggacctccaaccgtcagaagcattgtctggagttgctccagggcgcccacctggttccccacgatgccgacaagaggtggtttcagtctcgcaagggcgaccttccgctgctgcagctaagggccgagggactcgaccgtaagctggaggcccgagagcttgcccagatactgtactgcctttcgggtcgtcgtggctacattccccacggtgaggttgcaaagaggcgcactggacctgccagccaggaaggcattggccaagacgttgccgacgtagagagccgcaaggtgctcggtgccatagcaaacaacgagaagctcatgcacatggagggataccggacggttggggagatgttcttcaagaccaaccgctcccgaaacaagaagggcaactacgacctgtgcatcaccaatgcgcaggtgcaagacgaggtgcgccaactgtttgaggcacaacggagccttggaaacgacattgccacgacggagcttgaggaaagctatctcgtaaacctttcctgggaacacaaggaccttgactatgacgagaaggtgtatcagcgggtaggaaattgcacctatttttctggcgagccacgtgcggcccgggcggacctctcatcggagctctgcaacgcgtacgaaaggtttggccaccttgtgatggttcatgccgacgggagcgagaccaggctgagcgcggcgcagcgcaggaagtttctggacatcctcttttccccggttgccttgaggggaaacaaaacctgcaaggttacctacgccgcggttcgcaaggacctcgacctttccgcccatgacgtcgtgttcaagggagtgggcctggaggaagaaagcaaggacgaggtctatgttcccaaggcctggcggcggctgaggacgctcctgccagaatctctcatggggcgcttgctaaaggatcgcgagcttgccgacgacatatgcgagtctctcacctatgcaagcacagaggagtccttgagacgccgcctgacggagcactaccgctgcgacctcagcgatgaggagctggacgcggtgatgggactgccattttcgagccagctcttcaaggggtatgcccggcgctctcgcaaggcgcttgcgatgctcttggacgcctttgactccgacgaggagggaacggtcctcacgctggatgacgcggaggcaaactccggcctgcgcagttttagggcttccgccgagcgaacgcaaaggggcagctttcttcctccgtattcccgctatgaccccagctgcaacaatcccgtcgtgcttcgcgccatggggcgcatgcggcgcattgtcaacgccattattcgtcggtatggcgtgccggatgagatccgcattgagttggggcgcgacctgaagcagtccaaacatgagaaggacctcattgcgcgggcaaacaggaggcgcaaagaccagaatcaagcatggcgcgagagcattgccacgctcaagggctgcggccaggacgaggttcgtgggcgcgacctccttatgatgtcgctgtttgaggagcagggaggcaaggatgcctatacgggagctcccatagacctatgcaggctgtttgatgcgcaggaacagcgctactgcgagattgatcatgcgctcccgtattccagaacgtgcgatgacagccacaacaacaaggtgcttgttctttccaagtcaaatcaggacaagcgggagcgcaccccatacgagtggatgacctcgggggagcccggtgccccggactgggataggtatagtgtgctggttaggctaaacaagaggatctctccaaggaagcgacgctaccttctgaacatgaacctcgacgagaaggcgcaggaggagtttctcagccgaaacctcaacgacgaccggtacatgtcggtggcagtcaaaaactttattgaggattccctcgtcttccccgaggacgggctcaaacggcacgtgtatgccgttacaggcggcgcaaccgcccagctgcgccgcgtttggggcctcaactatgggccccatgacaagaaggaccgcgacgacgaccgccaccacgcagttgacgcatgcattatcgccgcgtgcagcgcggccaccatcaagagggttgccaatgcgagcaagcttggaagaaacacgctcaagcaggtacgaaaggagaggtttgcgcagacgcagccttggccaggctttgccgacgaggtaagggtccgccgagagtttgtgattcccacgcgcatggccgaccatggggtaacgggccaggtttttaaagacaccaactaccgcttccttgggataactaatgataagaagcagcttgcgatgctttgcggtggcggaaaagagctcaagaagggcaatgtcgttattggcaaggacggcaacgctcacattattgaggggatggcatttgtgcgcctatggctggaccctgcgggcaagaagggcaagggcaagtggtatgttgagcctgtctattacgtggacataccgcttatgcggcaagggaagtacgttccccgctttgccgttttgcgtcttgcgcgccatgcatggccagctgccccagaccatctgcttaagcagacgccaatcgtcatgtggcgcaatgacgtgcttgaggttgatggcaagctcggaaggttttcaggtatggacattatgaattgttcgcttgagtttgccccccttgccaaggggatggcaaccaacattcccacgcttggcaggtggaacaagaagacgaaggtcagggtcattgaggaggactgtttaggttactgctacgatgcccggacaatgggtggcgtctagatgaccagcgtcagctgtgagccaatgtcctgggggagcttcttgggggcggacgtgtttaccaggacctcccgtccctcaaactgcttctcggtgagcatgagggctgttaccagccctgccttgggaaggttcttgtgtaggcgggcaaggtgcgcgtctgcgctggagcgagacaagagaacgcgcgagtacacgctgtactgctccattgcatagccgtcctggataagaaacttcctgaagcgagcgtatgacctgcgctctgaggcgttgcccgtgggaaggtcaaaaagtaccaggagcctcatgattctcacctcgctgcaccccttacgcctagcgccctaaaaaagaacaggagcgtggcaagctccgtcgtgcgatgtggtccattgccaacgaactctgcggcgccgttgcgaccgagacctcacgtggttggcagcgcctggcgacggcctgtcctaaaaactgcctttttacaggtataatgcccatgatctgatttggtagaatcaaaaaatcgataatcttccctttgagttgaaccaggaaaaggtgaatgccctctttgaggaccatcccaacgaggatcaggtcacgtttgcctataggcttcagattgacggccaagacgagccgggaaaaccctgaaatataccgtaaaaaatcgagcccctaggatgtaaaacagaaaatttatcaaggcccgaggcgtctataaccaaaaagggaaactgggcaatggggagttcctgtttaacatcacgattgacaccgagcttcgttcccccaacgaatatgtgatctatgacacgccggatgtcaacctgggctttgacggacttctcagcatctatgacacggcaaatcacagcgacctggacaagaaaattttctccaacgacaacaccgatcccaatggaacctatacctcttcgcaagtaacggccaatgggacaaaaataaaagcctacgacgtttattttgtgaccaaagagcctctggcacaaaaccaggccggagtatccgcctggacggaaaagaccttggaattctatcgggatgacgtggaaaacaaggtcttgcaaagcatggataaggcgacggtacctaaggaagtcttatttaaaaaaccgctgggtgcaaagctgactgcggaagaggaaaagaagattgaagaggccggcggactgaataagaaggtgggcaaaggctttaagataaccctttccgactacaagagcgcgtacgtaaacaagggcggctacctaacctttgtctatcgactgagcatcaagaatccgtcccccgagctaaacgcggataacaatccaatttataagaactatgccacctactatgcccagaaaatccccaattgcaaaccgagggatgagcactgcacgtcaatacaaagcgaaaagaccaagatgacggattcgggctctcccgacaacccaataaagggagaagtgaaactgggaaccatcggtgcagagatgatcattccggcgacgggatttaccaaggtggaagcggaccaaaatggcaatcctctaaaagacaggccccttgccggcgcaacgtttaccatctataagtccgacgcccaaggcgctaagggccagatggccacggacagggacgggacggccctggagggtttggtcacaaaccaggatggaaagctgaccaaggaaggaaaagccctttctctcaacctgaataagggctattaccttgtgagcgagactgcggcgccggaaggctacgacatcctcaaacaggacagcttggtcgcagtgggctataaggcccaaagcattctggtggctaataaaaagaagaccccgcctgcaaccgatcccaaaccggtgactctggagggggagaaggcgttcgctgttttcaagaaggtggtaggaaaagatgccacagaaaacttcaccttctgcttggcggcagaccccgccaatccggccggctgcgacatggttgccccgcaaacaaatagcaccgtcaatgggataaaggatgggacaagccaaaaggttgcctttgacgccatcaccttcacaaaggaaggtagcttccggtttaccgtgaatgaggtcgcgggggaggcgccaggatgggcctatgaccagacccagaagaccttgacggttcttgtccagaaaaatggggccggtaacctggaggccgtggtaacgggcaatgagcctacctttaccaacacctatacggaaacgtcacttgagcgtcctaacccggacaagcccactccggagacgcccaaccctgcaaagaccaatgtggagaagcctgctcctgaggcgccgcaacagcgaacaacgggtgggtcaacgaagagcgaggcggcactgccaaaaacaggcgatgatgctggcattgccggcgccatggccctgtttggcctcggttcccttgttcttgttgcggccaggcgtacaaaaaggcctcaacagtaaccatgacgttctagagaaaggttaccgggaaggggagtcctcgcactagcgagccaagctggctcccagccccgcacaacaaaaaagaggaggtcggataacttctatccggcctcctcattcgtataaggcacaactaaagtgggcttttcaggccgttcccattgcgggataggtgggatagtccaaacaggcgccgccggttacgtcgtattggagaggcggccaaacaaacaaaggtcgctgacgctttccctgggtggggaggcaacaagcatcattgaagccctctgggaactggcagttcaaagattgccgttcctgggcctgcaagaatccgaacaaagaagtgaaaggatgtcatatctctccgatcgggggtccccaccccttctcctactccaacacggcagtttccaggggcagtatctttggcaggctcatcttggaggcatctgcttctacgacggagcgcctcagtccactgagctcctcctggattgcggtttgaacgttcatctttgtgtggcttacctcaaccagcacctcaaacacctgggcaagctgggcgcgcttttccggagagagggtgccgtcaaggtgcctttggacaaccatgaggtctatgacgggacggaagggttcaatgaggtcatctaccaggttgaaggcgttgtaggcgttgtggtggtgtatgccccgagagatgagccagccgccggacacagcctcccgggcgatgcctgccctcaagattgcgtagccatagtcaagcgcgccggtaaggggccctgaccttcttgtatatccttccttaaggagcctaaagtacgcttgggccgccgctgcctcgcggttgtcggtatccccagagcgaacgcagctggaaaactttgcaacggaagaggcatccgtgccctgaagctcaagcacgcgtgcctgattcttgattttttgaactactatcttttgccaaagctgcttggaaagcggctttgagatggccagctggtcttcgacaattgcggcgtgcctagaatgtgcgcccaatggcaggagcaggccgttgggcatgtgattgtcggcacagattagcacgccaattccgctgtcaacgagggttgagagggcagaggtggaaacttgcgcccgatgggtctctattatgaggacccacatgtcttccaagggaatcttggttgtttgcccggcacgttcaacttggagggagccctgcctgaccgatacttttgcggggctttgtaggcagattgtcctctttggcgttttgatcacccgtcttaggatataattactgcatcacgcggaaactgtatcatctggggagttgagagtaccgcgtagacaaggggactgtctgtgacagtcacccgaaaggtcagcccgtcgatgctttgcgtcggcgggcaaacctttgactggcgccaaatacgctgtcacaggatttttgaaaaacgagaaaatgacaggcagttctatgagcagcaagcatttttctgagcggatagccaagaaatcccctcgttagaggggctttcttggcggttcattgtatcacctggggaattgagaggccgcgaagacattgtcgggacaggagtcgggacaattgtcattgtatcacctggggaattgagaggccgcgaagactttctcccgacataggtaccgacataggtaattgtatcacctggggaattgagaggccgcgaagaccagtggggccagcggactcatgttcgagtaattgtatcacctggggaattgagaggccgcgnnnnnnnnnnnnnnnnnnnnnnnnnnnnnnnnnnnnnnnnnnnnnnnnnnnnnnnnnnnnnnnnnnnnnnnnnnnnnnnnnnnnnnnnnnnnnnnnnnnntatcacctggggaattgagaggccgcgaagactctcccacttcaacacccgctctacaagtcattgtatcacctggggaattgagaggccgcgaagactccgtggcgcgtgtcgttatttgtgccacaattgtatcacctggggaattgagaggccgcgaagaccacaaaggttgtcgtgtcctcgcgcacctcattgtatcacctggggaattgagaggccgcgaagaccgtgtctcatgcgcctcgcctcgtctcacaattgtatcacctggggaattgagaggccgcnnnnnnnnnnnnnnnnnnnnnnnnnnnnnnnnnnnnnnnnnnnnnnnnnnnnnnnnnnnnnnnnnnnnnnnnnnnnnnnnnnnnnnnnnnnnnnnnnnnntatcacctggggaattgagaggccgcgaagacctccgagcaagagatccgccacccccagggattgtatcacctggggaattgagaggccgcgaagactaaaccaacagaaaggaactaccatggcactattgtatcacctggggaattgagaggccgcgaagactatcgcctggtagacgggaccacggtatggattgtatcacctggggaattgagaggccgcgannnnnnnnnnnnnnnnnnnnnnnnnnnnnnnnnnnnnnnnnnnnnnnnnnnnnnnnnnnnnnnnnnnnnnnnnnnnnnnnnnnnnnnnnnnnnnnnnnnngtatcacctggggaattgagaggccgcgaagacaggcgcaaaagcggatacgggtgcggagacattgtatcacctggggaattgagaggccgcgaagacctgctcgtagatgccgagaaccgtgtcgaagattgtatcacctggggaattgagaggccgcgaagatcgcataccgcatactgcacggctgagaatattgccgtcccgccccgcccgctggaatgcgcctgtcgccgcccgagaccgccagcgccccgccctcccgtgcacttcctgcgtacatcaagaatatccgcccatgcgatatccgcccgcgtgcgcccgtgcgttacgcatgccccgcgtgtacggcaggtgtgtctggggcacgcgctaccatattgcacgtagcttcttgtgtggcgcacgacgcgccacacccaccaacggcagggagtgtcatgtcgctcaccatagtctggacgagggaagagacggttgtgtgctcgtgcgcacgcgaggtacttggggaggccctgcacgccggcggccgcgcggtgctgctggttcccaacttccaacggcaggtggatgcgagcacctcccttgccgaggggggactctcgcccctggggctgatggtttccacccccgcggcatgggcgcgggagcgctgggaggtctggggagatggaacgagggtgattgactccaccacgcgcactgcggcaatgcagcgcacccttgcccaggcaggcccagataggcttggcggcatgggcgccaacgccgggacggtggacgtcctgtgctccctcgcctcacgtgcgctgccttggctctcttcgaaaaatgacggcctcgcgcctgccagggatggcctcacgggcgcggagggcgccgcgctcctcctggtggaagactacgcccgcatgattcacgcccacgggtttgtggagggctgcgaggccatggcgcgcctggcggacgtgctgcaggagcagggcgtgacgcccgtgcccgtggtctttgacggcttccggacgctcccgaggacgctgcgcgagcttgcgctggggcttgccgcccacggcaacgtcacggttgtggcacgctgccccaaccgcgttgcggccgaggggtttggagagaatctggacctgctatgccgggctgcgcgggagcgcggcatcgttctgcgcgagccacgtcgagaggacgtcagcgcttgtgcgcagcctgggcgctcccatgagctgggtgcgctgctctccacgctctatggcgcccgggagaggttggtgagtgccaccggtgccgtctcgctccttcagccggcggggcccctggccgagggggagtccgtggcacggtgcgtccgctccctggccgacaggggctgccgctccgtggttgtcgcggcggcggacggctcgcgggcctggagggagcttgcgcccaagctcgtggcccggggcgtgggtgtgcgcgcccagcttgccgagcgcgtcttgtcaaccgaggcgggcagggcgttccttgagtttgcggagtcggtggccctgctctcggagcttgcccaaaggtggccagactcgcagggcatggaaggggaaacgctggttgggctgggtgacatgtcgtggtggcctccacgagccctgtgcgacttcctgcgcagcgagatctctcacgtgcccgtgccaaaggccctctcgctcgaccgtgcctggagggcagaccgcctgcttacgccacgtgacgtgctcgacacgctcctaagcccccgccgcacgagcccggagatcgccgccgccacgcgcgagctgcttcgcggcaggctggcttcggctgcggcgcggctccttgcgccctatgccgccggacaggtagctgacgagctggcagactacgtcgtcgatgacgcgggcgagatgcgccaggtccataccgccggcgcggacgccctggcggagtcgctcgcaagcggcgccctggctgcggtaattgaggttgcgcgggccctgaggtcgcttggcgtcacggcggacccagaggcgcggggcggcgtctccctcgcgcgcctcgtctccctcgcgcgcgacgccctgggcgaggcgagcgtggtggcgcgcccacgcattgaggtcgctggggcaggcgcgcaggtaacgattctctcgggccacctggcatcctttttggcgccgggcagcgtggacgcggccgtcctctgctcgcagacctccgaggaggcgccggtgggcaatggggacgacgtggtcaccgccatcctggaccggttgggcgtggagcccaaggcagaccccatgctggcggcgcgcgcggactttgcggccctcgtggcgcttccctcgcgctttctggtggcgcagcgctgctcgtttgacccccagggaaagaatcgctatccctcggtcatgctgagcgagctccttgcctgctacggcgtggactcaatgcgtgatccccgcgacgtggggcttgccgtagaggagctgggtgatggcgcggcagatgccaacgcggccccgtcgggggagccctccgtgccgcgtggcgaggagcgtccctcaccggcaggcaggatcggggcggcaaacagggccctcgtggttgttccgcccgagggaagggacgacctgctggacgggcgtccgctgctctccgcctcgcagatagagtcgtatttggagtgtccgtacaagtggttcagcctgcgtcgcctgaggctgcaggactttgacgcggggttctcgcccatggagacgggcacctttgcccaccgggtcatggagctgacgcaccgtgagctcctgtgccgcgcgctcgaggcgtccgacgccctgggcgagggctttgaccccgaggatgcgccaacggttggcattgccggctcacgcctcttggagggggacggggcaacgcgggagctggtccggcagattctcttgcacacctttgacgaggagctgcgccgccagctgatacgggagggcaagcactcgcgctaccaggcctttgttcctcacactgcggcggaccgggacctcctgcgcaccctcagggaagacctgctctcggcgctcgactttgaggcggggctgtttttgggctatgagccgcgctactttgagtggaactttggcaggaaagacgacctggtggagtacgcgggcgcctatctcacgggcaccatcgaccgggtggacgtggatcggcacggccaggccgtggtaattgactacaagcacaagtctcccaagggattcgcacaggagcacaacgtgttgcagcccgacgactcgtcgttttccctgccacgccgcgtgcagtcgctcatctacgcccaggtggtgcgtcggcgccgcccggacctcagggtcactgcggcggtgtacctgggcaccaagggggaccacgccatcgccggggcggtgggcgcaaacgcgcttgagaacgtgctgggatcccgcgctccgcgcagggagaaggccgctcgggcgctcacggtggacgactccgcaacgtatggcatggagggcgaaagcggcatgggcgccttcctcgatgccaccgagcgggccatccgcgagaaggtgggcgagcttctcgacggaaacattgaggcccaccccaaggacgagcgggcctgctcgtactgcccggtcatgaactgcgacaggaggatctctcaatgagcggaatcgacctctccggcctcaatgacagccagcggggcatcgtgaggacgctggaccgcccgctgttcgtggaggccggggcgggctcgggcaagacctttaccctcacgcgccgcatcgcgtgggctctctctgcgggctccggggaggggggcgccgcgtttcttgatgacctctcgcaggtgctcgtgatcaccttcacgcaggccgccgcgcgggagatcaaggagcgtgtgcgctccaccctgcgggccgcgggcatgggcgaggcggcgctgcaggttgactctgcctggataagcaccatccatggcatgtgcacgcgcatcctcaaaaggcacgcgctcgacctggggctggacccccgttttcgcgtggcctcgaaaaacgaggcgaagtcgctcatggaccaggcgctggaggaggtggcgagctccgccatccgacaggggggagactcgctcctccttgacgcgatcgccgagtacggcctgggttccgcggcggcatcgatgcccggcggcgtaatgggcatcgtcgatgcgattatggacgccgcgcactccgccccccggggctttgagtcgctcgagctcgtcggcgatgacgagctggacggctgcatggggcgcctgctggggtcgctgaaagcgatcggggcacagagcggcgtgacggcgaaggcgctggagacgatcgcgctctccacgcgcgtgctcgaggcgtacgaggccctgtcccccggggcgcgcaccccagaggcggcgctcgaggcgctgggcggcgtcggccttccccgcaggagcaatgcgatcgcagagctgatccccgacgcaaaggaggccctcgccctcgccagggcgcaggcggccctcgcgagggtgcgtccgctcgcgggcaggctcgtctcccttgcccggcaggtggacgaccgcttcataaagctcaaggcctcccagtcgctgctggacacggacgatttggtggcgcttgcccttgcggccgtgcgtgacaacgatgccattgccgcagactacgcgggccgcttccgcctggtgatggtggacgagttccaggacaccgactcaaggcagctcgagctcatccgcctgctctcgggcgagggggagcggcacctggcaaccgtgggcgacgcccagcagtccatctacggcttccgcgg

SEQ ID NO: 2680 - DNA, 23027 bp, synthetic construct
  source 1..23027: mol_type = other DNA
  misc_feature 1..23027: note = Synthetic
actgaggtgacacagtagtgcggtttcttgaacgatttcgcccttccggctccgcaaacgtgagacagggggtgccccacggctctatgccagaagcgcggcaacctttcccagctcggactcgaagctcacgccgcgaacctcaaagtcgggttggagtcgggtgatgcgcatggcatcgcgcacgaaggagccggcaaactcgacggcgtcgtgcatcgagcgaccggccatgatggcggcgagaagcgagctggcatacaggtcgcccgtgccatggagcatgtagggcagaagctcgctgacctgctcctcaaacgcgaggtcggtgccaacgaggtagttgcggatgagcttctcgcccgcgtgtaccacgcccttgagcacgacggtctttgcgccttgttcgagcagcgcgtcggtgatacggcgcacataggcctcgtccacgtcctgaccctcgtaggcgatacccgtgagaatggaggcttcggtgaggttgggagtcagaacatcggcaccgttgaccagctcgcccatggcctcgcagagctcgtcagtgtaggtctggtacttctggccaccgtcgcccatgacggggtcgacgatgcgcagcgccttgggatgctcctcgtacaggcgcttgatggcacctacctgctcggcggcaccgagaaaaccagaatagattgcgtcgagctcgatgccctcggccacccaggcatccaggtacggcgcaagcatgtcggtggtgtcatgcatgtggaagatggggaagcgcgtgtgcgccgagaagagcgaggtggggacggggcaaacgtcgcaacccgctgcggagagaacgggaatcgccacgccgagtgagcacttgccgtagccacacaggtcgtgaaccgcagcgatgcgggggatgtaggcgtccttgcgctgatagaggtagaggtcctgagcataggtggtcatggctgactcccttctgatgttgcataggcgatggaccttgtttggcatgattctagactgcccgtagcgcaatatgcgatatgaaacaaatcggaaatacagaatatatagctaggttcctgcgagttaatcaaatggaaataaagtgctttagcagccaagaacgtcgttcaacaaaaagcaggggcgccgcgaaagcgcccctgcctgcaagtgcgtgttgtggagccttagaactggaccgtgggagcctgacggacggcatcgtcctcgacggtgaagccctggcgcttctggaacttggagccagccacgatgttgcccgggaaggtggtgattgcgttgttgtactcgagcacgcagtcgttgaagctcatgcgagcgtagctgatcttgttctcggtgtcggtgaggtcggcctggagctgggcaaagttgctgttggccttgaggtcgggataggcctcggcgacggcgaagagatggccaagggcctgggtgagctcgccggaagctgccatggcggcctcgggggtgctggcgctggcgacggcggcacgcgcgttggtgacggcctcgagggtctcacgctcgtgggtcatgtagccctggaccgtggcaaccaggttggggatgaggtcgttacggcgctgcagctgggcgtcgatggtctgccaggcgttgtcgcaacggttgtccttgacgacgatgccgttgtggatgctgatccacgcagcgatgcctgcggcgagaacggcaatgaggatgatgataacggcggtcatgacgggctcctttccgagcttgcaaaccaaacggccagtgacgggcaccgactggtgtttcaatttaggcggaggaggagggattcccgcgttgccttgcggcaacgctcataggcctcgctgcgctcggcccgcagcgcttatcgcgctgcgacctttcggttcgaatccctccgtagcctccagggactccttttggccagtgacgtacactgacctgctattcaattatggcggaggaggagggattcgaaccctcgagacctttcggcccggcggttttcaagaccgctgcattcaaccactctgccacccctccacagatatgcagctatgataccccactctgggctcgatgattcagtcagttgcaacagaaggtgccaaagggcgcgcgtcgcgggaggagctcactgctaccatgtatcacatggacacggaccagacatacatgcagctagcaatcgaggaggcgcgactggccgctgccgagggcgaggtacccatcggagcggtcgtggtgtgcgacggccaggtggtcgcgcgggctcataaccggcgcgagctggaccacgacccctctgcgcatgccgagtttgccgcgatggtcgaggcatcgcgcgtgcttgaccgctggcgcctcaccggttgcacggtgtacgtgacgctcgagccgtgcctcatgtgcgcggggctcatggtcaacggacgcatcgatcgctgcgtgtatggggcgcccgatcccaagggtggcgcgctgggcacgctctacgacgtgagccacgacccgcggctcaaccacgagttcgaggtcacagcaggcgtttgcgcagatgaatgcgctgatttgctccgtagcttcttccgcgagcgccggcgtgcgcggaaggcacaagcggactaggcagctctgtaacaactgtcacatttcaagcgtgccaacagtatcaaaccccgacgaaaatgcgctattgtaaggtaactggagagcatctgaaggggagatcggatggcacgtcatttcaccggcgaagatgtacgcgcggcctacgagcgaatccacacgcgtgtgagacgcacgccccttgaggactcaatctacctaggtgacgacgaccataaataccgcttcaagttcgagagccagcagctcggcaagagcttcaagattcgtggtgcgctcaacaccatgtcgcagctcacgccggcgcaggtatcccgcggcgttggcacggtgtccacgggcaaccatgcggtggcggtggcttatgctgcaaaggagctcggtatcgagaactgcgtggtaatcgtgccgtacggcatcgcccgcagcaagcttgaccgcatccgctactatggcgcccgcatcatgacgatgggcagcaactacgacgaggcgctgaccctcggcctcaactacatcgaccgcaacgagctgttctacgtcgatccgggccagtatgaccctcgtgtttatgcaggtcaaggcactattggctacgagattgccctccagcatcctagggtggacaccattgtggtgcccgtgggcagcggcggcctcatcacgggtgtcgccgtgggtgcgcgggccatcaagcccgagatgcgcatcgttggcgtgcagacggcggcctgcccctcgatgtaccagtcactcaaggaccgcgtctgctataccacctatcccgtctctggcgagaccatctgcgacgccgtggtgggcggtgccggacgcatagcctacgagatgctgcctaacctagtcgaccagtgggtaatcgtcgaggagggcgagattcgcagcgcgcttcgctttatggtcgagcgcgagcagaccgtcatcgagggcggcagcgccatggtggttgcggctgtgcgcgagtatcccgagctggtcggcggcaacaacgtggcgctcatcatcaccggaggcaacgtggacgggcgcatgctggccagggtgctcaacgagcccggcgagcacgaggttgactagcggcgcccctacacaacctggaagacaaagaagtcgaggtaatggctcggcggaaagccccacaggatggggtggtccggtgcctgctgacgctcttctacctgcttgagctggacgtttgcatcgtgtgcggcctcggcgacggcgcgcgcgagaaggtcgcgcgtcatgtgctgggagcagctgcacgtcgcaaggtagcctccgcgcggaagcagccgcagcgcctcgaagttgatctccttatagccgcgtgcggcgttgcgtaccgttgagctgctcttggtaaacgcaggcggatcgagcacgataaggtcgaagggtccgccctcctggcgcagatagttgcggtcagagcgaagcgcggggagatactcgagcacgtttgcgcaggtaaacgacatgcgctcgtcgaggttgttgagctttgcgttctgtgcggccagctcgatcgcggtcttgctcacgtccacgcagcgcactagttcggcaccgcccgcagcggcgttgaggccaaaggggcccacatgacagaagcagtccagcacacgcctgcctgcggcaatctcgcgcacggcgcggcggttgtacttctggtcaaggaagaaacccgtcttctggctgttctccaggtcgagtccgaaggagaggccgttctcctgcacgacgatgcgcgtgtcgagggtggacgcaccgtcccaccagccctttcggagaggcaggccctcgcgctcgcgcacgggcgagtcgcagcgctcgtagatggcgcgcacgtcctggccgtcctgctgcagaacctcgagcagcaggggatagagccggtcgcgcagaagctccatgcccacggtgccgatctgcgcaaccagcacctggccgtaacggtcgacggtgagacccggcaagccgtcagcctccgagaagatcacgcggcaggcatcgatgtcgggcgccgtgccaggcagcgcgcggctccccatggtggacacgcggtgttgccaggcccacgagatgcggcgcctccaaaacgcgtcgtcaaagcggtcgttggcgttgcgcgaaaggatgcgcacgcgaatcttgctctgctgggagatgaggccggttccctgccaggtgccgttctcctcgaccacgtccacgaggcaaccgttggtgacgggggtgccgtcggaaggcgcggggtctacgcgcacgacctcgccctcgaagacccacgggtggcctccggcaagcgatcgggccgccttgcgcgtgaccgttacctgcggatatgggcgtatctgcttcaagacgtcaccaagctctctgtcgggcggtctagtagtgccggccgaagcgtccgctgctgggaccgccaaagcccctgcggctcttgcttccgctgaacatcgtgcgcgtggtgcgcgtggtggcgcggctcgggttgggcacgatgcggccactgtcgtacgcaaagcccgggaggtcccagacgggcacgagcttcttggtaaagtactcaatctcgcgcagcggggtgatctcgtcgggagcgacaaaggtatacgcgtggccggttgcaccggcgcggcccgtgcggccaatgcggtgcacgtagtcctcgggatccatcggcacgtcgaagttgacgacagcgtcgatgccgctcacgtcgatgccgcggctcatgacgtcggtggccacaagcagctgcacctctccggcgcggaagcgctcgagcgccctgtcgcgcgccttctgtggacggtcggcatgcatgacctccaccttgaggcccgcggacttgagcgtcttggagacgtcgtccacgcgatgcttggtgcggcagaacactagcacgcgttcgagctgcgcgtcgggctcggcgccgccagagctgacgatggcctgcagcagctgcgtcttctggccctgggtgacagggcagaggtgctcctccacggtatcggccgtctcgcccacgcgggcgatctccacggtcgcggggtcggtgagcatggcgtcgatggtgcccttgatgctgggcggaatggtcgcggagaacagcaggttctggcgcttgctgggcagcgctgccacgatccgacgtacgctgggccaaaagcccatgtcaagcatgcggtctgcctcgtcgagcaccagcacacgtacctgcgagaggtccacgtgcctgtgcttcatgaggtcgatcaggcgaccgggcgtggccacgagcaggtcgcatccgcgcgcgagggccttgagctgccggtcaaacttggcgccacccatgacgatgacggagcgctggcccgtgtgctcgcacaccgtggtcaccacgcgctcgatctgctgggcaagctcgcgcgtgggcgtgacgaccagcgcgagtgggcgtgcgggcccaccagttgcaacgggagcggacgagctggcgttgcccttgccgcgacgccgacgcctacggcgacggggtttgggagcctcctcggcgggagaggcctcctctgcaggtgcgggtgtgtccgcagccacggcttgcgcctcgtcagccacgtcggcagaaagccccatgatgagctgcagcgtgggcagggcgaacgcggcagtcttgccggtgcccgtctgagccgacgcaacgatgtcgcgcccctcaagcaccaggggaatggcctgctcttgcacgggggtcggttgggtgaagccgagggattcaaccccggcgagtatctgctcgtttagcccgagctcggcaaatgaagtagtcatgggtgtaagtatggggcatgcaagatacctttgggtgcccctcaccaaacaatcaggacactgacaagagtggcacataagcgccagaaacgcccgtgctacgtctatgagctgcgaagatgtccagcatgtgcatgtccggccactttgccgccataagctgctatgctagaaaagttatgttttagcaccgttggaggcatcaagtgacgagaaccccagagacgctatcgggtcgaatgcacaagtgcggatagccgcacttgcccatctacctgcaccttttgtctcacaaggagttctgccatgcccatcaacatccccgacggcctgccggccaagactatcctgcagcaggagcgcatctttgccctcgaggaagacgtggccagccaccagcgtattcgcccgctgcgtgtcgccatcctcaacctcatgcccaccaaggtcgagaccgagacgcagatcctgcgcctcatctccaagtcgccgctgcaggtgagctgcgacttcatgcgcgtgagcagccacgagtcaaagaacacctcggcggatcatctggtcaagttctacgacaccttcgacgcttaccgcgacgagaactacgacggtcttatcgttacaggtgcgccggtggagcacctgccctttgacgacgtggactactgggacgagctctgcgagatcttcgactggagccaggagcacgtgttctcgaccatgttcttgtgctggggcgccatggccggcctctaccacttttacgggatccacaagaagctgctgccggcaaagctctttggcgtgtttccgcagcgcctgtgcgacgagtacagcttcctcaccaacggcttcgacgagatgcacaacatgccgcactcgcgtcacgcgatgctcgacgccgccgagctggcccagcaccccgagctcaaggtgctctcggagggcttcagcagcggtccggcgctcattgctacgcacgacttccacgagatctatgtgacgggtcacttcgagtacggccgcgacacgctggccgacgagtactggcgtgacttccacaaggggctgcccattcgcctgccggagaactacttccccgacaacaaccccgagaaccagccgatcttcacgtggcgcagccatgccaacctgctgtatcgcaactggctcaactgggtgtaccagatgaccccctacgagctcgacgagatcccgcaggctgtcgcggcactgcgcgccgacgcctgggctctcgccaacaagttccagcgctagaccacgagaccagaatcttttccgctttgttccaagggagcgcgtttgggctattttgggcgccagacggctggggatgaagcataatcgtggggcgcgcgtcttgagtacgcgaccgtgaccgtaacgaggaggaacacctgtgatcgttcccgatatgctcaggctcaatgccgccaaatatcctgacgagattgccctggtggagatcaacccggccatgccggaggaccgtcacatcacctggcgcgagtacgacctggtcgagacgactgacgacgagccctaccgccgcgagatcacgtggtcggtcttcgacgagaaggcaaatcgctttgcaaatctgctcatctcgcgcggtgtcggcaagggcgacagggttgccatcctgctgtacaactgcatcgagtggctgcccatctacttcggcatcctgaagactggcgccgtggctgtgccgctgaacttccgctacgcctcggacgagattctctactgcgtggagaagtccgattctgacgtcattctctttggacccgagttcattggccgcatggagtccatcgtcaacaagctccagaagggccgcctgctcttttacgtcggtgatgactgccccacgtgggccgagagcttccgcgagcttgaggcactgagctctagccgtgacccgcagatcgcgctttatgagattgacgacgcggccatttacttcagctcgggcaccacgggcttccccaaggccattctgcacaaccatgagagcttgacgcaggccgccgagatggaggctgtgcaccactccatcacgcacgacgactgcttcctgtgcattccgccgctgtaccacaccggcgccaagttccactggatgggctgcctgacctgcggcgctcgcgcggtgctgctgcgtggcgtgagcccccagtacatcttcgataccgtgagccgcgagcactgcaccctcgtgtggctgctcgtgccttgggtacaggacatcctcaccgccatcgagcagggcacgctcaagcttgaggactacgagcttgaccagtggcgcctcatgcacgtgggtgcccagcccgtacccaagagcctcatcaagcgctggaagcagatcttcccgaaccacgattacgacaccaactacggcctgtccgagtccacgggccccggctgcgtacacctgggcgtcgagaacatcgagaaggtcggcgccattggcatccccggctatcgttggcgcgcaaagatcgtgggcgaagatggccatcgtgtcgagcgtggccaggtcggtgagctgtgcgtcaagggcccgggcctcatgacctgctactacaacgatcccgaggccacgcaggagaccctcatcaatggctggttgcacacgggcgacatggcgcgcgaggatgaggacggcttcatctggttggttgaccgcaagaaggacgtcatcatcactggtggcgagaacctctacccggtgcagatcgaggacttcatgagtgcctgcccgctcatccaggacgtggctgtcatcggtctgcccgacacacggttgggcgagattgccgccgcaatcgtgcagctcaagcctggcgtggaggccaccgaggacgacatcaacgagttctgcctcgatctgccgcgctacaagcgtccgcgcaagatcatctttgccgacgtgccgcgcaacgccaccggcaagattgagaagccgcgcctgcggcagatgtacggcgccgagaacctggtcgaccgcgagaaccagggctaagcacggcgacgccctaccaacatcgaagctaaacgggatgcgggagcccttctataaggactcccgcatcctcacgcctggtgttagcgtctgccagatttggctgaaaactgcattatacctagggttttgctacttgacgattccgtgacgcgactgacgagcttcgcctggcactttacacccttgaacctcaagactgaagcgagttctgctctgagtgtcgtgtttcaggctgttcgacatcagtctgacaaggcggatacggaaggtgcgtcctagaaagcgacattgctaattacggttatagtggctggttccaatattgcattaagctattaaagtcgcgttgcagatcagctatgtgggcgtacgacttctgttaatctcaatccatgtcagttttgtgactgagcatataagcaagcctgcgctcaggttcggctattgatgacctcggcgattcgtggagaagtcaaactaggaggagctttcatgcagaatccctatttggtacttggtattgatccgggaatcgccagctgtggcttttgcctacttgatactgcgaacggcagaattctcgaaatgggtgcccacctttttgatgcgccacaggaagataagactggcgttagcctcgccactacaagaagaaatgcgagaagtgcccgtaggaacataaagaggcgttcggaccggcagaagcactgcctcaagctgcttgccgagttcgggctcgtgccgcaagacgcgacaaagaaatggtttcaatcgcggaaaggcgacgctccgattcttagtctgcgagctaaggcgcttgacaagttgataactgatcgcgagctcgcgcagatactgtactcgctgtcagcgcatcgaggctacatacctcatggcgaggggtcgctgacaggcaaaggggacgtggatgcagagactggaaaagcgcttcgagccattagcgcaaataccaaggagctaaacgaaggcggatggcgaacgatcggcgagatgctgagcgctcagaagcgctcgcgaaataaggggggtgcatatgatctctgcgtcctcaattcgcaaatagttgacgaagttcaccaggtgatgcgcgctcaacgggaatttggcaacgctcacgcctcctcagaacttgaggaacgctatcttgaggtgctcacttgggagaagccttcgctggggcatgacgaaagggtatacaaccttgttggaagctgctcttacttcccagaagagcgtcgcgcggcaaatgcaacgttgtcctctgagcgctgccgtgcttacgagaggcttgggcatctcgtgatagtcaatccagacggcagtgagagggtactgagcaactacgagagggaagagctgctgtccatactgtttgcggcaaaggcaatcaaaggcaacaaagagtgtaaggtcacgtatgcctacattcgaaagatgcttgaccttagcgcgaaatgcttcttcaaaggcgtagatccagatgacgaaaagaagtgtgaaccttacgcgccgcgcgcttggcgcaatatgcgatcacatggcatacctagcgcccttctagaacgaatgcttaccaatagagactttgctgatgagattggcgaggcgttgacctttgcaagtacggaggaaagccttcgaatgcgcttggaaagtctggatttgaccgatgaagaatatgaatcaatagctgcgctccctttcaacagcaaggtctataaagggtacggaagccgcagcctcaaggcgctcaacttgttgctagatgcctttgaggaggaagggattcaaacactcactgatgcagagagagcttcggggctgctcagcttgaggctcgcgaagagcgaggcgcggacgacccaactacccacatatgatgtgtttgatcccacttgcaacaacccggtcgtgctgcgcgcgcttagcagaatgcgccttatcgtaaatgcaatcattcgcatacatggtgtgccaaacgagatacacgtggagcttggtcgcgagctaaagcagtcgaacaaggagaaggcggccattcagaagaacaacgccgccaacgaacgcgataggaggcgttgggcgggtactcttgctgagatcatgggcattagtccggacgaggtgtcgaacaagctgatcagaaaatgcatcatgagagaagagcagggtgagatagatccctatacgggcgatgcgctcgagcttcagcgtctgatagacgacgatcgctactgcgagatcgatcacatcttgccctattcgcggacttgtgacgacagcagaaggaataaagtgctcgtgctttccaagagcaatcaggataagcaagaaagaactccctacgagtggatgacaagcggagaggtaaacgcaccatcgtgggatgattttcagaaaagggtactaaattgcaaggctctcttgcgaaagaggaactatctgcttaaccagtcgcttggtacggatgaagaggctaagttcctccagcgaaacctcaacgacacgaggtacatgtcgcgtgccgttaagaactggcttgagaaatcgctcgcacttcctgagggcgggagagttgtcgcggttgctggcggtgcaacggcgagtttgcgtcatgtctgggggcttaacaccgctccaaacaataaaaaggaccgatcggacaatcgccatcacgctatcgacgccgcggtcattgcggcatgctcccagggcacgcttatgaaggttgcgaaggcaaggtctcttggcgcgaaaacgttcaggcgcatgcaagaaagccgcctttccgacacgcagccgtggacgacatttgctagcgaggttctggcgcgggcagagttcatcatcccgacgcgcatggttgatcatgggctaactggcagggcgtttgaggacacggcatataggtatgttggagaatctaatgatgcgaatcgcagaggcgtcctctatgcaaaaggcaaagagattaagaagggcaattttcacataggggccgacggtaatgcgcgaatcgttgacggcatggcatttcttcgtctttggcttgatgtggaaggaaatgcaggtgcaggtaagtggtatgcagagcctgtctactatgccgacataccacacatcatgaacggagattatgttccacatgtcgctccaaaagcccatgttggcagaacacttggctggattgagctgccagaatcagcgcggaccacagcaccgattgtcgtttttaggaatgacgttctggaagtggacggccaaatggtgcgttatacgggattccatgttgatggtgtgcgaatcgagtacgagccaataggtaaggctgcaatgcaaatggccataccgacacttggaaagtggaacaacaacacgagagtcagggtgtttcaggaagactgtcttggacactgctatcaagagttcggctataacaaacctacagcctagatgaccagagtcatttgtgcgccaggatctgatggccctccaattggtcttgtgtcaataaggaccctacggctttcgtactgcttctctgttaaagtgatgactgtgacggcgccggctggtggaaggtgtgccctcagcctcaccaaatgggtttcaatgctttcgcgggagagtgtgattctcgagtagacgctgaactgctccatgtggtagccgtcttcgactagaaattttctgaattgggcgtaagatcttctttctgtcttgttgcccgtggggaggtcaaacaacacgagcattctcatgattctcattgcttcctactcatagctggcgaattcaagaggatgtatttcgggcaaaacgagaagcgaatcatcggaagcgagtacggcatcgcgcagtccacataaaacgagatgtatggcatgctgtatgctgacgctcttttgtgacatgtaaactttgacttcgaaaactcttgcgagcaaggccttgtcttgcggctctaatggcgcttttatcccgctggaaatgacaagaaggtcgacaactggcctaaacggttcgattagatcgtcaacaagattaaaggcatttaggttattgtgatggtgaatgcctctcgacacgagccatccgcccgagacggcctctcgagcaatgcctgcgcgaagtactgcatagccgtaatctagaggcgcttcatacggtccgtctcgacggcttccttccgtaataagaagcttgaagtacgccgaagctgcagctgactcctggttggtcgtatcgcctgatagcactctggaagccctgctctttacatctacgcacggaatatcgagctgctcaaggactgctgcctgattcctgatcttagcgatgacgatacggcgccaaagacgcttggccaacggcttcgaaatagatagctggtcctcaacgattgctgcgtgtcgtgagtgagctccgaggggcaatagcaggccgttcggcatgtgattatcgccgcagatcataacgccgattccagcgttgacaatctctgagagggcggatgttgacacctgtgcttggtgtgtctctagaattacgacccatacgtcatcaagagggattgagaaatcagctgacgagctcgacaccagaagctgtgactgcttgacggtaatctttgagggactttgtatgcaaatagtccgtttagccatcttttacctgctacattttgaataccgcaatcgtatacatcgagtatagtgtagatgtctaaggcaacctttgtaccaactggggagttggaagactgcagtagacaaggggaccactttgtggttacccgcaaggtcagcccaccgacagagtgctgtcggtgggtgaaccttttttcgccaaaacaccctctttgacgtggctcagtatgatcctacgcttttttctacaatgcctcgcccgataaacccctgttcaagggaggtttatcgggcgaggcattgtaccaactggggaattggaaggctcagaagacaccaacgtgacggaaaccaccgtcatggcaattgtaccaactggggaattggaaggctcagaagacatatgcggttatcggctggacttagttccgattgtaccaactggggaattggaaggctcagaagacccacgcgagcggagatgccctcggccgcaaattgtaccaactggggaattggaaggctcagaagaccaaccctgcaaagcggtacgcacgagcacaattgtaccaactggggaattggaaggctcagaagacgtgctggacgtaggggccgtcccccgcgagattgtaccaactggggaattggaaggctcagaagacagcttggtcgcagacgcactcccacgtgtcattgtaccaactggggaattggaaggctcagaagactagtcctcgtcggcgcgctcgcgcagccgcattgtgccaactggggaattggaaggctcagaagacacgagcctgttggtgtgggccgcgtcccacattgtaccaactggggaattggaaggctcagaagactaacaggtagcacgcaagcgacgccgcaacattgtaccaactggggaattggaaggctcagaagactacgtctcgcagttcgccgacgcgttcggcattgtaccaactggggaattggaaggctcagaagacttctcgtactcaaccggcagcgcggcctcaattgtaccaactggggaattggaaggctcagaagacggggatggtcacggtgccagccttggtcgaggattgtaccaactggggaattggaaggctcagaagaccggaacgtcagcggaaaggccctcggtgatattgtaccaactggggaattggaaggctcagaagacataaccatgttgcagctcacgatcttggcaattgtaccaactggggaattggaaggctcagaagaccatgtgggaacctgcaagcacagactccaaattgtaccaactggggaattggaaggctcagaagacatcgagctgttctccaacgagttccgtcgtattgtaccaactggggaattggaaggctcagaagacttcacgcggttgaagatgccctgcacggtgattgtaccaactggggaattggaaggctcagaagaccctgtggcacgtcggcgcaactcgtcatagattgtaccaactggggaattggaaggctcagaagtcttctcaggcgtgccgatgatctcatacgtattgtaccaactggggaattggaaggctcagaagacgacgtagtccatggccttcgtcatcacgagattgtaccaactggggaattggaaggctcagaagacttctggaacttggccatgaccgcgcgctccattgtaccaactggggaattggaaggctcagaagacaacggttgcgcggtcgtcgtcggtggcggtgattgtaccaactggggaattggaaggctcagaagatgagtcttaccattgaccccgagcgcgcgatcaagaagcaaaggtttccgtgattgttttcacggctgttttctgaatctagctgatagcggacataagactgtacctgtgagcaggtgggcttcgacaaagttcagagtagctgcttcttgagtctgcgaaacacacttgtcgcatggcgcgactatactggttcgagtttcgctgttggagaggactaccctatgagcaaacaactgctatcgggcaacgaggccatcgcgcagggggcgtgggaggctggcgttgccgtgggagctgcctatccgggcactccgtcaaccgagacgctcgagaacctcgtgcgcaagcccgacgtgtactgcgagtgggctcccaacgagaaggtcgccttcgaggtgggcctgggcgccgccatgggtggcgtgcgcacgctcgtcaccatgaagcacgtgggcgtcaacgtggccgccgacccctttatgagcgctgccaataccggtgtcaacgccggcctggtgctgctcgccgcggacgatcccagctgctacagctcgcagaacgagcaggacagccgccactacgccgccttcgggcgcattccctgcctggatccgtccgacagccaagaggcctacgagatgacccagcaggccttcgacatctccgagcagtttgacaccgtggtcatgctgcacgagaccatgcgcatcgctcacacaaagacgctggtcaacgtggtcggcgaccgcactgccatcgacccgcgcccctacgagagtcgtcccgagaagttcgtcatgatgcccgccaacgccgtacgtcgcacgctggtctgcaacgaccgcgaggacgagctggtggcctgggcagaggagaccccgctcaaccgcgtggagatgcacgacaccaaggtgggcatcatctgcgctggcgctctctacgtgcacgtgcgcgaggccatgcccgatgcctccgtgttcaagctgggcgtcacctggccgctgccgcccaagaagctcgcggcgtttgcctcgctgtgcgacaaggtctacgtggtcgaggaggccaacccctacctggagacgcgcgtccgcgccatgggcatcgatgtcgccgagccgcccgcaggtcgcctgccacgctccggcgagatcactccggcccacatccgcgccgcctttggcgtggctgagcccgcgcacctcgctgccgccgagggtctgcccccgcgtccgcccgcgttctgcgctggctgcccgcaccgcctggtgtacgtggagctgcgccgcatcaaggccatcgtgaccggcgacatcggctgctacacccttggtgctgtggcgcccttccgctccgtcgactccgtcatcgacatgggtgcctcgctctcgatggctcacggcatggagctcgctggcgcccccgagcgcactggccgccccgttgtcggcgttatcggcgactccaccttcgcgcattccggcatcacgagcctgctgggcaccgtctacaacggcggcaagggcacgctctgcattctggacaaccgcaccacggccatgaccggcacccagggcaaccccgtcaacggcgtgaccctcaccgatcaggcaaaccgcgtcaacccgctcgacgtgcccgctggcaagcagcttgacctggtcaagctctgcgaggccatcggcgtggacgagatcgaggtcgtcgacgcgcagaacgccgccgagatccgccgtgccctcaaggaggccaccagccacaccgacatgctctcggtcatcatcttcaaggcaccgtgccgcctgatcgaccgcagccgcaagcccatgccgaccatccgcgactgccgtcgctgcggccgttgcatccagatcggctgcccggctctcggccgcgacgagaccggccacgccgtgatcgaccccaaccagtgcatcggctgcggccagtgcgcacagtcctgccccttcggctgcattcaggaggactagccatgccgcatgacacctctaccaactatggcgtcgccgagggcggcgcgcgcgtgaccctcgacggcaccaagaccatccttctggtgggcgttggtggccagggcaccattcttgcaggtcagctgcttgccatggtggctgccgacgcgggtctggacgtcaaggtctccgagatccacggcatgagccagcgtggcggctcggtctccaccatcgtgcgcgtgggcgagcaggtgcagtccatgatcgccgactccggctgcgccgacatcgtggtggctttcgaggccatcgaggcgctgcgtgcgcagcagtttgtgcgcgagggcggcagcctctttgtcaacgacgagcagatcacgccggtgccggtcaacatcggtgccttcaagatgcccgagggcgttcacgagcagctcgagaagatcggcgcacgcgtgattgacgctggcggcatcgcgcgcgaggtgggcagcccccgctccaccaacgtggtgctggtcggcgccctctccacggccctgcccttcgaggtgtcggagtgggaggatgccattcgccgtcgcgttccgcccaagaccgtcgaggccaacctcaaggccttcgcccgcggccgcgaggctgtcagcgcctaggtaccgcacacatagacccgaatcgtgtcgccggacagcttgttgcgaacaagttgtccggcgtttgcgataatctttacgttgtttgacccgagcctaaggagaagcgcatgacgcagcaggcacagcacgaggagttgacagaggagctgttgcagcgcctgctggcgagcgcaacgcccgaggcctatctcgcgcagacgacaacggacgaccgctccctcgccgactacctgctcgacctcatcgacgcgcgcaacatgacgcgcgcggatgtggtgcgtgcctccgcggtgaactccacctttgtctaccaggtgtttaacggcgagcgtcacgtggggcgcgacaacgccatcaagctcgcgctgggcatcggttgcaccctgcgcgagacccagcgactcctgcgacatgccggagtgtccgagctgtggtgcaagaatcgccgcgacgccatcatcatcttctgcatcgagcagggctatacgctccccgaatgtgacgacgagctctatcgcctgggtgaggacaccctcgtgccgaaggaaggctaggcatggacgacgaccagacactgcgctccatggtgcgtgacgacgcctatcgcgtcgtgcgcatgctgggcgatggtgcttctggtcgcacggagctggtgaccttcaatggcgacgggctgctcgtgcgcaagcacattcctgcggctttggccaatgcggccgcatgggccgtagccatggaggtcgacgagcccctgctgccacgcatcgaggagctctaccgcatgcccgacgagctggtcgtggtctacgactacgtcgagggagaagccgtcaacgaggtcgtggagcaggagggcaggcttgaggtgtcgcgtgcggtgggaatgctcgtcgatgtgtgccgcgccgtgtccgccctgcatgagcgcgacgtggtgcaccgcgacatcacgccgagtaacgtcatcctggcctcggacggggcgcacctggttgacctggggattgcccgccagaagcgccagggccaacgacgcgacaccaccacgctcggtacctggggttttgctgcgccagagcagtacgggttcatgcagaccgatgctcggtccgacgtgtatgcgcttggacgcctgctggggtatgcgctgacgggggagaagcccgacacggaggcgtacgagacggcactctccgatcggagcatcgtgccagaggcgctctatgatgtggtgcagaaggcaaccgctttcgagccaagcgcgcgctatcagaccgcgggcgagcttgcgcgggcggtgcaggaggcgctgacgggagtaccgctgcccgagcccgttgctgcgcctgcgccagaggcggcgccacagcccgcgcatccgcaagccccgatcagaagggcatcgcgttcctttatggaagcacccttgtacctgcgagctcttgcggctctggcatggattgcgctcgtggtgggcttcttgatcgtgcttgccgcctctgtgacctactggctgacaaatgacccgatctggcatgcagagcaatacaccatggccgttgttgtggatgccggcatcgcatacctgtgcttcgagatctacaaggcggtgtgcctgcgcggggcctatgcgaccgagccccacccgctgagactcttcattgcaagaatttgtatatattgtctaataatattcttggtaatgatggccttaggaatattcgtatcgtatctccgcgaaggctaaacgacagaaaacgccaaggtcgtaagcatggttaaatcaattgggatacatctgtaactttctgactcacatacttatgtattggatatgaatatcagttatttagcacacagctaatgattctccgtggtcaacactccatcatcactcctatccaaggaggttgcattgagcgatagatggcagatagtacagagggctggcgacaccctgcaagacgtgcttgcttcggcagagctcgacgatcgctcgttttccgagtggatcaccgacgagctggctcgccgcggcatgaagaagaacatcgttgtgcgtcggtcgcgcctcaaccagacctttgcctaccagatcatggcgggcatgcgccatccttctcgcgacaagctcatccagcttgcctttggtatgcgcctcaacgagactgaggcctgcgagctgctggagcgaggtggctcggccgcactccttccgcacaatcgccgtgacgtcatcgtcgccttctgcctcaaccacggcatggagatctccgcatgcgatgacctgctgtggaacctcggcgaggagacctttactggcgtggccagcgagcgtcgtctctaggcaaagccactcgcaaaaactcaactgacagctgaggaagctctcgcgttcctcttctagcatcgagccactgttcactagctgtggaaactggctcatctaggaggaacgcatgaagaagatcatcgatttgatcaagaagctcgcactcgccctggtggcgcttgtgctgattggcgcgatcttcggtcgcggcggcaaggaatcgtcaagctccagctcttctgagagcgaggcggccgtggagcagcaggctcaggaggagaccgaggaggaggccgctagcgaggccgagtccgaagccgaggaacccgagccggagcccgaggaagaggagccgattgagtacgtggacgtgaccgtcgacgagctgaccgcagctcttgacagcaacccgctcaaggcgaagcagacctatcaggacgctcacatcaggctgacaggcgtgctcaacaacatcgactcgtccggcaactacttcaatgtcaacaacggagaccagtactcctttgacagtgtgtactgcagcatcctcgacgatgccacgctcgacaaggtcgcctcgtcgtcgattggtgacacgctggtcgtgtgtggcaccgtgaccgacgtgggcgaggtcctcggctactacgtggatgtggactacatcgagtagagccagtgcgagacatgtccgcgacgggaggggccgcagcatgggttgcggcccctctttctataccagcttgacgccgagcagacccaccaggtcaggcgcctggtcgatgccgatacgcgcgtcgcgcagctcaaagaaggtgtcagacacgcgcagcgcctgaacattgcaggtagagaggtctatgccgcgcagccgcgtgccatagacctctgcgcgtgtgaagtcgcacccctcgagcgtcacccgcttgagcttgagttgggcgagggaggcctcgtgaaggtcgcagccgctaaagcgcacctgctcgagcttgctttcggtcaggttgaggtaggcgcaggcgcagtcgcgcagggtgtcgcgcacaaagtagctgtggtgaaggtcgcagcccaccaggcgcgagccgtcaaactggcagtcgcgccagtagctggtggccatgcgcgcgttggagaagtcgcagctcgcaaaggtgcaacggtcaaagctgatgcgcgctgcctgaagctccgcaaacgagcaatcctcgaagctgcagtcctcgaactcaacgtgccccaggctgacggcggagaggtcctccccaaagaaggactgctcgcagatctcgccctcaccctcgtcgatggcctcccaaagcgttgtcatggatccacccgctagccttcgagcaggacgtgcgtgaaggtgccgtcctcatacaggccaaagctgtgcgtcccgtccttggggatgcccacgctgcccggattgaagagccagatgccctgcggtccttcctcgttgaccttgatgtgcgtgtgtccgtacaccagcgcatcgccggcgcgcagtgcaggcagacggtcgacgctgttgtgcttgcccgccccatagacgtgcccgtgcgtgaagaagaggtcgcgaccggtggcaggatcggccatgagggcgtagtcggccatgcaggggaagtcgagcaccatctggtcgacctcggcctcgcagttgccgcgcacggccagcaccttgtccgcgatgccattgagcatggaaatgacctgcttgggggcatagtcctccggcaagtcgttgcgggggccatggtagagctggtctcccagcagcaccacgcgatcgggctggtgtttgtcgatggcctccatcaggcgcgcgcaccaggcggcggcgccatggatgtccgatgcgatgagcagcttcatgggtgactcccttcgttgcgtgcatcttatatataggagtatgacgcttcccgcaaagtgggtacgctaggcctgcggatgcgaccgcacacgccttatatgtgaagaagcaaaaaatctcatgcaaacgcacttagataatgtatacgattcaaacgcatt

SEQ ID NO: 2681 - DNA, 23006 bp, synthetic construct
  misc_feature 1..23006: note = Synthetic
  source 1..23006: mol_type = other DNA
atatgcatgcaagccgctaggccagaagacatggcctctggcctgcaaatctaacggtaggcacaataaggtgtcagcctccgaccccccgcatctgcctggtgctcggctgcgccgacaccccccagcgtcacttacgcaagagccagcgatagagcggcattacctcgatcttggcacctcccacctcgatgattctctcatcatccgaaagcgtgacgatgaccaacctcttcggcgcaagcctctcgtctgacgcaagcgcgacaaggctcgacgtctcccggtcaaaatcgccctcgtcaagcaccagacaaacctgaactgccgcatcctcctggggtatgtagaagtcgacgtcgattctgttcttcgatgacttcaggaaccacagctcgtcgccgtgcctcctcctgaggtcgcaggcgacagcgttctccaaaagcagcgacttcttgtcaatgaggaatagtgccaagaggccattgtccatgaagtagtacttagatgcgccctcgcgctccgagaacttcgccacgtagtttttcgcgttgaacaggaggtatgcctccacggcgtaattgacgtaggagatcaccgcatcggtactgcagttaaccccagtggccgtcaccgccttgcgcagacgaccgaacgtgacgtcgctcgtcaccgtctccgccacctttttcatgagaaccctcagcgcatgcaggttccgtatcgcgtagcgggcagcaatgtccccaagcagcaccttctgatagacactttctgcgtagaccctgcggttctggtagttcacggattccggcaggcctcccgtctccagataagtctccgccgccgcccggaccttcccgtttaaacgggtagcgtagagcgcctcctcgtcgtgacgcacccccttcgcatcaaggtactcctcgaagctgtagggcatcacctcccgcacgaggtagcgtcctccaaggcgttgtgccatctcgccactgagcatcgacgcgttgcttccggtaatgtagacgcactcgtgcgcgtccgccattctgcgggcaaagcgctcccacccagtgatgttttgcacctcgtcaaggaagtaataagcgcggttgtctgtgagctcggctgccgtctggacaatgtcgttgaagtcggagaggtcgaactccgcaagtcgctcatcctcgaagttcaggtagataatctggtcccatccaacccccgaatcgatgagctcgagcgcacgctggtagagcagagtcgactttcccgccctcctcattcccacggagatgtagttagcgccctcctcgaaaaagtagtcgcgctccacgatctggctggtacggatgacttcgcgctggtcgtaaattacctgcttgataatgctgtggtccatggcatcgtcacgttcctcaggcgcctggttggattgtacgtcgattatagtcgatgatatttctgctgtttgtcgattatatccgacagaatgccaaggtcatcctcgatgtggttcacctactgcggccattacggatgagaaaaacagcggatccttctgagacctcgccggataccaccgcgaagatcgccccgtgggacgatcaacgttcttctcgcccccgccttctgctacagtatcgcctacagttcatcggaggccgctggccgcagccagcacgtgccagagaagatgtcgagtgcgctcggaaacccaaaaggtggccgggcgcattttcatgcgctgccacatagtgaacggacggagcatggccgaatcctggctcaaggtcccccagaccaaactccgcacgcctgggcttctcgccctactctcgctcatcgccatcatgatgccgctggcgctcgatatgtacacgcccgcgattccgcacatgtccgagcacctgaacaccaccgagtcgatggtcaacctcacgctcgtgggctacagcctgttcttctcgatcagcgcaatcatgactgcactcgggccctttgcctggacgttcgcgtcacggttcaccacgcccaagcgcttcctcaccacggcacttctcgtctccctcttcgccggagctgccatggtcttcacgggtaccgcaagcccgttcctcttcgcgctcctgttctgcgtgttcgccgtttgcgaggcggcccagcgcccgctcacggtcaacatcctcctcacgcagcaggacgagtgcgtgggcaccgcgtcatcgctcatcaacttcatcctgtcggcggcgggaagcctcggcatgctcgtcgtgcacatgccggcgcccaactacgtggtcgccctcggcgtcaccatcgcgctcagcatggccgtctcacttgcgggttggttcgcgctcctgcgctccccgatttcggttagggggcttaggtggagagggcgatgcccccaggccagccgattcgttttcgtcatcgtacgaatccaccagctcgtccttttcgtgtggcgcaaaaccgtacgattatcgtaatcgtacggtttgattcgtgcgatttgtaggcgcactctacaccacgaggaacaacttcgaacagggcgagaaggacgtggcaccctcgctcgctcctcaccaaacagggtgctccgcgtggaccaagacgtggaccatttgtggaccaaaagaaagcagctcagagacgatgcctctgagctgcgagtttatggtgggcgttagaagatttgaacttctgacctcttccgtgtcagggaagcgctctccccctgagctaaacgcccgaatgttgtgccgctggggttgcagcagttggtaactctacgggaatgcgaagccaagcgcaagcgaaaatgccaagcagacgatttctccgcaaatggcgcctatcgattgccagccagggcaggctgccggcaggaaagccgttcttctcgctcgcgttgggtcgcttgccgtgggttacgcgtccttggagaagtatgccacggcgatggcgccgggacccacgtgcgtgccgatggtcgcgccgacggtggtgatgggcagcgcgtccacgatgccctcccagaggtcgcgcgagtcgcgcacgtacttgcgcagcatcgcctcgccgcccgcggtgcaggcgagcgagaagggcatggcaaagtcgatggggtgctcgtccacgagctggaccaggaggttcctcgcgttcttggagccgcgcgccttgccgagcagctggatgctgccgtcggtcatcgtgacgaccggcttgatggagaggagcatgcccgccgcggccgccgccgacccgatgcgcccgccgcgccgcaggtattcgagggtgtcgagaagcccgagcatgcggacgcgcgaccgcgcggcctcgaggcgtgacgcgacctccgccgcgggcaggccacgctccgccagcatgagcgcgtactccacgagcacgcgctgcccgatgcaggagttgagcgagtcgaccacgtggacgttgggccgcccctcggccgcgatgcacgcgctctgccaggtggccgagaccttggacgacagcgtcacgaccacgacgtcctcccccacggcggtcgcggcgtcgtaggcctccgcgaacgcgccgggcgacacggccccggtgctgggcagcgtgtcggactccaccagcagctcgaagaaccgctcgtgcgtgaggtcgaccccgtcgtggtagacggtgttcccaaacgcgaccgtcagcgggagcacggtgaggcttgggttgggaaagtccacgatgtcggacgcggaatccgtgatgatgcgaactggcatggctgtcccctcccccgggcggcgcccggcggcagtagtggttgcgtaacttatgacatttggtatggcgcggcaggcgcggctactcgatcttctcgagcgacttgagcacctgcttgagccacccgtagcagcggcggcgctcctcgggagtgatgtcggcgctcgcccgttcgaccacatcgtcgatgatccggtccatctcgagcgcggcctcgcgcccgcgggccgtgagcgtgaccggcgcgcggtacctggagccgcgcccggccgatgccgtcgcatcgtccgtgaggtcgcgctccaccaggccgctcttctccaggcgcgacacgatgcgcgtcaccgcggcgcggtcctgccgcatcagccgcgcgatgtccgcctcgtgcaggccctcgggcgagtgcgcgaggtagtacaggaccatggtgtcggtcccgcacaggcccagcgactccatcttctgcgtcttgatgcggccgacctccttgttgagcgcgtacaccaagcccacgaagttctcgaacctgtcgttggccacgttcttctcccccaccttgccgcgcggagcggattcccgccccgtacgggccaggcgacccggcggcatcgcagccgcgtcgggtcgcctgtcacttgttgacgtgtcaacatattagcaccgtggccgggagaggcagccacagccgcgccgtcaacacatcgcacacattgcggcgccgcataacgcacgacgcctgggcgagaattacggctccaacaggtcggacccgtcctcgggccgcgccgcgtcctcgggctcgccctcgccctcgccgtccatgccgtcgcgaacgttcttgacggtcttgccgatggcgctccccagctggggaagcttgttggggccatagatcaggagcagcgcgaagagcgcgaccataagaaggtgatctggattcatggttgcctgcctttctgacgtcgcggcggtcctccgccggtcaagtcaagggtaggcctcgcctatgtatacgtaaaatacaagtgttggcacctatccatatgcagattgaatcggtttacgagacctggggcatggcccttgtcccgcagccctcgtcccatagcgctttcgcaaaacttttacgaccgcctacggaaccaaacttgactgtagtaactttttacatgttgaaaccatatgccacccgccctcgcggcggggcccaccatgccggaaggaagcaccgcatgaagctcctcaggaagcgcgcccagcaaacatccgagtcggtctggctcgccatggtcctcgcctgctcgggaggcctgatggacgcgtattccttcctggggcgcggcaaggtcttcgccaacgcgcagaccggaaacctactgctcctgggcgtcaacatctccgagggcgcgtggcagaacgtgccgcactacctctgccccatcgtctgctttgcgcttggctgcgccatcgcgcacgaaatccgcctgcacaagggccgcggcatgcactggcgccagatcgtcgtggtggcggaggccgtcctcctggcctgcgtatccctcatgccggcaagcgccaacctcctggccaacagcctcacgtcgctcgcgtgcggcatgcaggtccaggccttccgcaagctgcacggacgcccctttgcgaccaccatgtgcatcggcaacctgcgcagcggcacggcggcgctcgtcaactacacccacgagggcaagcgtcgcgacctgcgctccgcgttcctgtactacctcatcatcctcacgttcgtcctgggcgccatcctgggcaacacgctgctgggcgcgttctcgctccacgcgatcgcggcaagctgcgtcttccttctggttgccttcgccctcatgtttgaggaccgcgagcaccacggcgagccctcgccgcagggcaccacggacgagaagaactagccccctcgccccgcaccgtcactcgtgcgcgatgcgtggtcgctcgtgcgcgtcgcttggcaactcgttcctaccttccgcaaaatatccgataactttggcgccccaatgggtagaaggctccccgattggcgtgggcggcacccgtgccgccccgtacggaaggcgaggagcatcatgtataactttacgttccatgtacccaccaccattcactttggcaaggggcagatctcgcacctggccgaccttgccaactacggcagccgcgtgctgctctgctacggcggcggctccatcaagcgcaacggcatctacgacgaggccctgcgcatcctgggcgaggccaaggtccaggtgttcgagctcgcgggcgtggagcccaacccgcgcatccagacggtccgccgcggcgtcgagctctgccgcgacaacgacatccagatggtcctcgccatcggcggcggctccaccatcgactgcgccaaggtcgtcgcggccggcgccaagtacgatggcgacgcgtgggacctcgtgctgcacccggagctcatcaagtcggcactgccgatcttctcggtcctgaccctttccgccactggctcggaaatggatgcgtttgccgttatatcggatatgaccaaaaacgagaagtggggcactgccggcgaggcgctcaagcccacgatgtccattctggatcccacgtacacgttctcggtccccgctcgccagacggccgcgggcacggcggacatgatgagccacaccttcgagaactactttagcatggatgatggcgcctacgtgcagaagcgcctggcagagggcctgctcaagaccatgatccactacggccccatcgcgctcgagcatcccgacgactacgacgcccgcgccaacctcatgtgggcggccagccacgccatcaacggcctggtgggcgacggctgctcccccgcgtggtgcgtccaccccatggagcatgagctctccgcgttttatgacataacgcatggcgagggactcgccatcctcacgccggtctggatggagcacgtgctgtccgacaagaccgtcaagcagttcgcgacctacggccgcaacgtctggggcctcaccggcaccgaggacgcgcccgtcgcccgcgaggccatcgcccgcacgcgcgagttctttaccgacaccatgcacatgcccgcgaacctccgcgccgtcggcatcacggacgagaagaacttcgacgtcatggcgcagaaggccgcagacggctgcaagggatccttcgtgccgctctccaaggaggacatagtcgagatctaccgcgccgctctgtaacgcatcgcgccgcgcaccgcattcgcgcaagacataggcaagacacatgcaagcgcccccggcccaggaacgtcctggtgccgggggcgcttttcgctctctattgcggcatcttgcatttggctttacggagcgagaagaaccgccgtccttctcgcccagctttgccttatctgcagctagcggccgcgtgcatggcgccagccgcctccgcggcgtgcgcgccagccgcgggctgcgtgacgcccgaagagccccctggactccatcgcgtccgacccgtcccccaccaccacgatgaggaagagcagcccgctgatcgcgacgaacacgaggttctcgataaactctggcatgaagtccatggctgccgcctttcttccgggcgccgctcgcgcggtcgccgccctgcttgcaaccatatggtcccatctgggcgtccgcgcagccatcgaccccgcttacgggtggcttactcttttgtaaggttcggacgcggcacggtttcgcttccgttagtgcgagtcattttggcgtgagccgcaatcctagatgactcaggccccagcacggggtaaaataagaacaccagcggtgcccgtcctttggttaaggggaacgcgggcggcgcggggttactttcctaggggtccagtgcctgctgggcccctagaaactcctcgtcatccgttatctcgcttatgatcctgtcgcatttccctcgcctccgcgactatgtcgagtatggcttgggcgatgctcgcgcagagcgcgatggccttcaggactttcagaactagttgcatgttcataggcaaacgccctcctttcgaaaggcgccgcccgcgtacggacaccgctggtgtgagggcgattctatcacacgcacaggctgcatgttgctcatcaaaaaacgctaccttgcaggtaaatgcaagatagcgtttaactttttgttgcaacctcgcttagccgcgcacccgcgcagccagccggcagaacccgctagaaccccaaactgtcgttaatcaaaatcgcgtgcatgcggccgggatgatggctgaagcgcgtgatcagaaagttgcagcagatggtgtcctcggacttacagtccgcgcacgcccccgtcctgcggcacggcgtgttgatgtcaaagcgctgcgcgttgatgggcgccgccacgttgcgggcgcgcttgatggccgcgtccaggtcgccgcagaccttgttcatcccaatcagaaagagcacgtgcctgggcccgtaggcgatggcactcgtgcggttggagttgccgtcgatgttcacgatgacgccgtcgttcgtgatggcgttcgcgcttgccacgtacacgtccacgtcgtaggcggccagcatggcggcgcgacggtcctccgccttgtcacggtcgataaagttgtagtttccgctggtcagggcatcgttcaggccaatctggtgcgcggtggcgcagccgcccatcgtgacgctcgacccctcgccaatgtaggccagcgcctgcgccagggcgtcctcgcggctgaccgcgtactccgcggtgatgttcctgcggccaagccccttgatgacggtctgggccaaaagctcgttgcgcttgctcacgtttgcgtccatggcaacccctcacgtagcacgggcgacgcgcctggcgcgccgcacttctcccctgctacgatactacgcgcgcgagcgtccgcacacgtcgaaactccccaccaatcgccccacaccaacgcgggcgagaagaacgatttatcgtgtctcgataatttattattgcaatgcgatgcgctccactctatgctcatgccaacggcaacgcaaggaggtcgcaatggaactgaggaagctttccgtctggctgagggcgatcgtcgtgtgcgcagcggcatgcgggctcgtgatctgtgcggtgatcgtgccagagctcggtcaggccatcgtgcacgactacccggagttccatggctggtacgccccgtggctcgcgtttgcctggctgtttgccctgccgctcttcgtggcgctgacgctggtgtggaagcttgccgcaagcattgcatcagacaggccgtttaccagcaagaatgcaaggctcctcaagctcatctcgcagctggccgcaggcgacgcggcgttcttcctcgtaggcaacgtggcgctctggctcatgggcatgaaccacccgggcgttgtgctcctctcgctcgtggtggtgtgcgcgggcctcttcctggcgctagccgcggccgcgctgtcgcgcctggtcgggcgcgcggcggagctgcaggagcaaagcgacctcacgatctagggagcgggcatgagcggaaggatcgtcttcaacatcgacgtcatgcttgcccgccgcaagatgaccgtcacggagctggccgagcgcgtcggcatcacggtgcccaacatgtccatcctcaagacgggcaaggcgcgggccatcaaggtgagcacgctcgccaagctgtgcgaggcgctggactgccagccaggcgacatcctggagtacgtagaggacgagaaggacgagggatagcaaggcgagaacttctcccaaacccgagcaactcgccagtcgaatctcgggaaatgccacgctcttgcatatctcaccttactactgacaacctactgacaagtactgtttactactgccaagcccgcttagggtgcatttctcccttggagtcggctttcgcgccgcagccggtttttcgcatcataatcatcgccaaagacctctcaacaactcctcatacctctggtgcgaaagctaccgttcagatggtacgaacgttcacgttgaggccaacaccgccaagatgcctatcattaggagtcatgtagccgccttgtcctctcggacatggcacgtttgacgggagttggccatggcagaaccttaccttgtgcttggacttgatccaggcatctccagctgcggattcgctcttcttgacatgaataaccacaagattctcgagatggggtcgcacctgtttgacgccccgcaggagagcgataaaaaagtcagccttgccgtcaaaaggcgcaatgcccgaagcgctcgtcgaaacaatctcaggaccaagaaccgtcagaagcactgcatggagctactgaaggaagcggaccttgttccccaagacgccaccaagcaatggttccagtccgcaaagggcgatcgccccctgctcgagctgcgttttgcggcgctcgagcgccctctcaccaatcgtgagtttgctcaagtcctctatgcgctctcagcgcgcaggggatatatccctcacggcgagggtcgcatcagcaagatttccgacgtagacacgagcggcacctctgatgccgagacgggcaaggtcctcaaagctatcggcgagaacaacaaactcatggcacagggacacttccgcaccgtaggcgagatgctctacaaccagggcaagtcgcgcaacaagagaggctcctacgaacattgcgtactaaacagccaaattgtggatgaggtccgcgccatcttccagagtcaacgttcgtatcagaacccaattgccacccaagagcttgaggatgcctacatcgaaaaccttacatgggagaagagaacgcttgaccatgacgccaaggtctacgcactcgtgggcaagtgcgtctacttttccaacgatgagaatcgggcggcacgcgcagacctctcgtcggagctttgcaatgcctacgagcgtctcaagcacctgcgcatcgtgaacgccgacggcgacgagactgctcttgcccccgagcaggtcgaggcctacatcgccattctcttctctcccgagcctcttaagggtaagaaggagaaggtcacatacgcgcgtatccgcagggatctcgacctctccgcgcgcctcttcttcaagggaatcgacccagaggacgaaaaggaccacgagccatatgccccgaaggcgtggcgtaccatgcgcaaggtcctctcccccgaactcatggaacgtctccgaagcgaccgcacgcttgccgacgccgttggtgaggcgctcacctatgccagcaccgaggacagcctcctctatcagcttgacaatcttgaccttagcgatgaggagcgcaaccagattctgggtcttcccttctcgggcaagatcttcaagggctatggctcgcgatcgctcaaggcactcgatatgcttatcgacgccttcgaggagccagaggttaccacacttgccgaggcggaagagagctccggcctcctgggcctgcgcatgagcgatagcggtactcgctacccactcctgcctccgtacagcacctatgacaaggagaacaggaaccccgtcgtcctgcgtgccatgggccgcatgcgccgcatcgttaacgcaatcatccgcatctacggtgtcccagacgagattcatgtcgagcttgggcgtgaccttaaacgctcgaagcatgagaaggacctcatcaacaaacgcgaccgcgagaatgaacgcaagaacaagcaatggcgcgcgcagattgcagaggcgcagggaatcgatccagacgaggtgcgcccaaagctcctcaagaagattgccctctgggaggagcaggacaacttcgatatatacaccggtcacaagatcgagttcgaccgcatgatttccgatgacaagtactgtgagatcgaccatgtgctcccctactcgcgcacttgcgacgacagtcggaacaacaaggtgctcgtgctctccaagtccaaccaggacaagcgcgagcgtaccccatacgaatggatgacccaggacgcacagaaaggcgcacccagctgggacgagtatcaagcgcgcgtcatcgcaaaccaccacatctcgcccagaaagcgcagatacctacttaacaacaatctcggtcccgaccaagaacgagacttcctcagtcgcaacctaaacgatgatcgctacatgtcacgtgcggtcaagaattaccttgaggactcgctcatctttcctaaagatggaagggtgaggcacgttattgccgtagctggcggcgccacgggaagccttcgtcacgtgtggggcctaaactttggtgcaaacaataccaaggaccgttctgacgatcgccaccacgccgtagacgcctgcgtcatcgcagcatgctccgaggcaaccgtgcaggctgtcgccaaggcacacaagcttggagtagagacttacaagcacatgcgcgaggaccgactaaagaacacacagccttggcccaccttcgccgacgaagtcatcgctcgcagggagttcatcatcccaacacgcatggtctctcatggcgtcacaggacaagcgtttaaggacaccaactaccgctttgtcggcttgactaatgacaccaagaagctcggtgtcctctattacaaagggaagtttaccaaggagggcaatttcgtcattggcgacgacggcaatgcacgcctagtcgacggcatggctttcctgcgtctttggctcgatcccacagcaaagaaggggaagggtaaatggtacgcagagcccgtctactatgcagacattcccgccatcaagaacggcacctatatacccaaggcgggaaaacgtggagttgcaagaattgtatgggaaccgatatcgcaggtagcacgtaacactaaaccgctcgttctattccgtggtgatgtcattagcatgggtggccatactgtaagatattggtcttttagcatcaatacattaaccttaaggacaagggacttaatcaccggagctgagtacaagggcttccctaccatcaaccaatggagcagagattcgtatccaaagaagatccaagaggactgccttggccattgctataaagggttggtaccaagctcactagaagactaacgtcagctgaggcccaatgtcagggagattcttgtgggatgacgtatccacgagaacctccctgttctcgtactgcttttcggttaactcaataaccgtcacttctcctgcttcgggaaggtttgcacgaagtcgtgataggtgcgtctcggcgctgtcacgggacagaagcacacgcgaatacacgctgtactgatccatgtgatagccatcttgtatcaggaacttcctgaacagcgcgtaggacttccgctcacgcttactaccagtgggaaggtcaaacatcacaagaaggcgcatggtcctcatcaccctactcctgttctacgtaggcaagcggaacgacctccggcaaagaaagcaacgcatagttcgcagatttaaccgcagccctcaaggtgtcgaactcaagctctatagcatgttgaacggacgtgagctgtccatccacgagcacctgcaactcaaacaccgatgctagccgagatttcttctgtggatcgagatccccctcgagccccatttccctcaccatcaagtcaacgacgggacgaaatggctcgatgaggtcatcaatcaggttgaaggcgttcaaattattcgagtgatgaagaccacgagaaacgagccacccaccggaaacgccagcacgaccgatacccgcacgcagaactgcgtaaccatagtcgagtggcggagtcacaggtccgtcgcgacgagttccctcagagacgtaatgtcggaagtataccgaggcggccgcagactccatattcgagctgtcgcctgaaaggacacggcttgcgaacctccgcacgacgcttccatctttgccaataagatcaagaacctttgcttgattcttaatcttttggataacaatacgctgccacaagcgcttttgcagcggctttgagatagccagctgatcctctacgattgccgcgtgacgagaatgggcaccaagaggaagcaggaggccattaggcatgtggtcgtcaccacagagcatcaaaccaatccctgcatcaacaatcgaagagagagctgacgtcgtaatctgagcgcgatgtgtttcgatgataatgacccatatgtcctctagtggtatagagacggtgtcgccattgtgttccaccagaagcgctgagttacgcgttgatacctttgccggattttgaatgcatatcgtccgttttggcattgctaatcccctgctccacggtaagatattgttgtctaagcaagatgtaccaactggggagttgagatcgtgcgtagacaaggggaccacttagtggttacccgcaaggtgagcccgccgatgattcgtcatcggcgggcgatccttttttggtggcaagcgacagcatttttcagattttagagagaaccgggcggatcacggtgcccaaaatcccgtttccaaattatgccttggccccgtttcccctgatagacaaggaaaacggggccaaggcattgtaccaactggggaaatgagatcgcacgaagacattgccatgtgtcgttacccctgttccttgattgtaccaactggggaaatgagatcgcacgaagaccttcacgccgtatgggaagcgacgcttcatattgtaccaactggggaaatgagatcgcacgaagaccctttgcgcgaaggaactcgctgtgggggtattgtaccaactggggaaatgagatcgcacgaagacatacctcatcgagcctatgatgggccacgtattgtaccaactggggaaatgagatcgcacgaagactcaagccagaacgcgacatcgcgccccgcctattgtaccaactggggaaatgagatcgcacgaagaccctctatgattaccaaatcaaggggttcttattgtaccaactggggaaatgagatcgcacgaagaccgtgtacgtgattgtgtacgtgtctaccacattgtaccaactggggaaatgagatcgcacgaagacaatgcagttccatcgctgcacttgccatcgattgtaccaactggggaaatgagatcgcacgaagacagagagcctgatgctctcgatcgtgccgtcattgtaccaactggggaaatgagatcgcacgaagactaaagctcgcgcccgattccgagcatgaagattgtaccaactggggaaatgagatcgcacgaagaccttgattagcgtgtaaccgctagtcgttctattgtaccaactggggaaatgagatcgcacgaagacgaatagacttggtaagttcgtccaccgacaattgtaccaactggggaaatgagatcgcacgaagactcgtcctcgaatgggttgtctatcgtcgggattgtaccaactggggaaatgagatcgcacgaagactcttcgagtacggacgcagcaattcgccatattgtaccaactggggaaatgagatcgcacgaagactagtgacctctggcgagtggcgcggcaggcattgtaccaactggggaaatgagatcgcacgaagactcactggcatgaatgcgtattcgtcaagctattgtaccaactggggaaatgagatcgcacgaagacgatgcggcggtctatcgcgtcgagcctgcgattgtaccaactggggaaatgaggtcgcacgaagacgatgcggcggtctatcgcgtcgagcctgcgattgtaccaactggggaaatgaggtcgcacgaagactctgtgcctgatctccagccgtcatgatgccccagttctccacctgagctatacagaccttgcgccatgaaaaaacgcttcggaacgcgggcgccccgaagcgacaaaagcattaaatgcttttttagtcaaactcaatatacctcaggagtcgagaatccatcaacctgtccagcgtacacatcgaacttcattttgctcgccagtacaaaagcgggcccgcgcgcgtggtgcgggcccgctactgggtcgtgacacttactgagccgtaagggttacttggacttgggaagcacttctcccttggcctttgcctctgccggggtgtcggggtcgctcgagatcgggtcggcgttggcgtcggagccgcccatgccgtacgtggggcgcgcggcctcgtactggatctggcgcgccagcttggtgatgtcctcgggcttcacgttggcgtagcggtggcacgcgcaccagtggttgggcaggacctcgaccaggtccgggtgctccacctcgcaggcgcccaccttggcaaagcaacggctcgcaaagcggcagcccgccggcgggtcgatggggctgggcacgtcgcccttgaggatgatgcgcttgcgcgaaaggtgcgggtccggcgaggggatcgcggacagcagcgcctgcgtgtacgggcagagcgggttgtggtagagctcgtttttgggggcaatctccatcagcttgcccaggtacatgacgcccacgcggtcggatatgtgcttgaccacgttgaggccgtgcgcgatgaacaggtacgtgagccccatgtcgtcacgcaggtcctccagcaggttgagcacctgcgcctggatggacacgtcgagcgcggagaccggctcgtcgcacacgatgagcttggggttcacggcgagggcgcgcgcgatgcccacgcgctggcgctggccgccactgaactcgtgcgggtagcggttcttgagctcggggcgaatgccaacgcggtccagcagctcgtccacgcgggcatccacctggtcggccggcaggatgttgttggtgatgatgggctcgctcacgatctggctcacggtcatgcgcgggttgagcgacgcgtacgggtcctggaagatcagctggatgtcgcggcagtacttgcggcgctccttgggatccaggtccgtcacgtcctgcccctcgaagatgatgcgcccgctcgtgggcttgagcagccccaccagcatcttgccgatggtcgtcttgccgcagccggactcgcccacgaggccaaacgcctcgccgcggtggatctggaacgacacgtcgtcgacggcctggacaaaggacgtgggcttgccaaagaagctcgtggccgccacaaagctcttggagaggtgctgcacgtcgagaaggacctcgcccttggtcttgtcacgctgcggcgccgcgccctgggtctgggtcgcggccgccgtggcctcgttcttctctgcggtatcgctctgcatgggctactccccctctcgcttgtctgcggcctgcgcggtgggcgcggccgtgggctcggccgcggtggcctcgccgtcgtcgtacaggaagcagcgcacgcggcggccaggcacgcccggaacgtccttgagctgcgggcgctccttgcggcagcgctccatgcagcggttgcagcgcgtgctgaaggggcagccgctcggcatgtcgagcgggttgggcacggtgccggggatggtgaacaggcgcttggactcgtcgtcctccacgcgcgggatggactccaaaaggcccagcgtgtacgggtgcaggggcttctcgaagagggccatcttgtcggcctcctcaaccacctggccgcagtacatgacgacaacgcggtcggccacctcggacacgacgcccaggtcgtgcgtgatgaagagcacgcccatgttgagctcgtcgcgcagctggtagatcaggtccagaatctgcgcctggatcgtcacgtccagggccgtggtgggctcgtccgcgatgaggagctcgggcttgcaggccagcgccatggcgatcatgacgcgctggcgcatgccgccggacatctggtgcgggtagtcgcgcgcgcggtcctccgggctggggatgcccaccaggcgcagcatctccacggcgtgggcccacgcgtcgttcttcttcatgtccgtgtgggcctggatggcctccacgatctggtcgcccacgcggtagaccgggttgagcgaggtcatgggctcctggaagatcatcgcgatcttgtggccgcgaacgtcctccatctgcttctcgttgagacccagtaggttctggccgtcaaacgtgatggagccgccggccacgtgacccggcttctggaggagtcccatgatggagagggacgtgacggacttgccggagccggactcgcccacgacggccaggatctcgcccttctcgattgagaaggtcacgccgtcgacggcgcgcacgacgccacggcgcgtggggaactcggtcacgaggtcctttacctctagcatcgccatgctatcgcctcctcgacttggggtcgacggcgtcgcggatgccatcgcccagcaggttgaacgcgagcacggtgagcgtgattgcgaggcccgggtagatcatggcgtgcggcgcctggaagatgtagttgcggccacggcccagcatgtcgccccactcggcctgcggcggctgcacgcccaggcccaggaagcccagggccgcggcgtccaggatggcgctactgatgcccagcgtcgcgcggacgatgatggacggtgccacgttggggagcacgtgacggaagatgatcttggcgtcggagtcgccgatcacgcgcgcagcgctcacgtagtcgttctccttgacggagaggatctggcttcgcacgatgcgcgcgtactcgggtatggagaccaggccaatggccacgaccgccttgtcgattcccttgccgagcgcggccatgaacgtgatggccagcaagatggacgggacggccagcagcacgtccatgcagcgcatgatgacggtatcgaccttgccgcccttgtagccggcgatggcgcccagcgtcacgcccaccacgagcgagatggacacggacagcagtcccacggtgagcgacacctggccgcccacgatgacgcggctaaagatgtcgcggccctgctggtcgcagccaaaccagtgcgcggcgctcggcgcggcaaacgactggctcaggtcctgggcgtacggatcgtacggcaggatctgcggaaagatcgcgctcagtatggcgagaagagcgacgagtgcgatgaagccgaggctcaccatggcggtcacgttgtgcgagagcgagtaccagacgtcgtcccagatggactcgcccttctcggccgtgggctttacggtatctgcagttgcctctgccatgtctatcacccctcttccttcgtgtacttgatgcggggatcgaggaacgcgtagatgatgtccacgatcaggttgatgatgacgaagatcacgccgatgagcatgaccgtgccctggactatggggaagtcggacttgaggatgctgtccacgatgaacttgccgatgccgggccaggcaaagacggtctccgtgagcatggcgccgccgaggagactgcccagctgcaggccgatgaccgtggtcacgggcagcatggcgttcctgagggcgtggtgcttgtgcacgcggtgcggcgtgaggcccttggcgcgggcggtgcggacgtagtcctcgttgagggcgtcgagcatgctcgagcgcgtcatgcgcgtgatgatggccatggagtagagcgagagcgcgagcgccggcaggatgatgtggcgcagcgcgtcgacaaaggcctccatgtcgcccgagaggagcgtgtccacgaggaagaggcccgtgccgcccacgggggcgagcagcgggttgatgcgcccgcccgagggcagccagtgcagcacgcccgagaacaggatgatcatgaggacgccggaccagaagatgggcatcgagattcccacgagcgcgagcagcatgctcacggcgtcgatcggggtgcccttgtgcacggcggagacgacgccgagggcgatgccgatgacggaggcgagcacgatggccacgagggcgagctcgaccgtcgcggggaagcggctcatgatctccttggtgacggacgtgtgcgtgtagtacgagacgcccaggtcaccgtggaggaatccgatgaggaacgagaagtactgctggatcaggggcttgttgaggcccatgctgttgcgccaggcgtgcatctgcgcctgggtggcgtgctcgcccaggacgacgggcgccgggtccggcgagaagacgtgcatgaggaggaagacgacgatgctgagtcccagcagtaccgggatcgcctgcagcagtcgcttcacgacgtagcgaaacacgttcttctcctcctttctttaagaaacataaaaatcggtaggacatgaaaacggggccagagccgcttggcgcggtcgtctggccccaggcagagcgctcgggcgctaggccgacttggtgcagttcttgaggaaggtgaccgccgtcgggtggaagacgtagcccttgacgcccttcttgtggcacaggatgttgatggagtgggagacggggatccagacctgctggtccgcgaccatcttctcgcactcgtggtagacgtcgtcacgggcggagccgttgggggtcttcaggcccttggcgatgagcttcttgtagtcggcgttgtcccagcgcgcgacgttcatgctgtagtcgtcggcggcgagcaggttcatgaagttgtccgggtcgccgttgtcgccgttccagccgtagaagcagacgtcgtagttgcccgcctggaccgtggtcttgtaggaggtccagtcgtactggtcgatggtcatctcgacgccgaccttcctgaggtagccctggaaggcctcggccagcgcggtgccgcccttgccgttgtacggacgcgggttggagtaggtgatgcacttgaccttggtgatgcccagggacgcaagctccttcttggcggcgtcggcgtcgtaggcggtctgcttgatgtccttgtcgtacggggccatccacagcggcatgacggagttggcgtaggtggcgtacttcttgtacaggctcttgacgacctcctccacgtcgatggccttggcgaaggccttgcgggcctcggcggtcttgaaggtgtcggactgggtgttgaacgccatgtagttgatgttcatgccgtcgaacttgtccaccacgtcgccgttcttggtgacctggtcaacgtcggcctcgtccacgccgtcgatgatgtcggcctcgccgttggcaagcgcggtgacgcgggtcgaggactccgcgatgaagcggaagacgatgttcttggccttgccagcgtgctccttgtcccagtagccgtcaaagcgcttgagcttgatgtcggagttcttggtccagctcacaaagctgtaggggccggtgccgacgggatgctcgttggtgttgcccttctcgattgccttgggggagacgatgggcgacgccatgcacatggccaggttggccaggaacgcggagctcacggcgcggagcttcatgaccacggtgtagtcgtccggggtctcgatgctctcgatgccggtgccgtcggccttggagccaaaggtgaacgcggcgtacggcatgtcgtccgtgcggtcgggctcgagctggcggccgatggacttcttgacggcggcggcgttgaagtccgcgccgtcctggaacttgatgcccttacgcagcttgaacgtgtaggtcaggccgtcgtcggacacgtcgtaggacttggccaggccgggctcgacctcgcagttcttggccttgtacttgagcaggttctcgtagatctgcaccatgaccttcgcggactcgccgtcgtcgatgtaggcggggtcgaggccacggggatccgcgccctgcgcgaaggtgatggtgaagtcaccggagccggagccggagccgctcgcgtcgctcgcgcgcttggagccgcagccgaccatggatgcaaaggcgctcgaagccgtgacggtggccatggccttcacgaacatccttcgtgacatttccgctttgcttgacatgggcaatccccttccggtaagcggtcgggcggtgccaacgccgcccctcccgcagggcgagtccttctcgccgcaatcagtacggttacacatgtctgtgacatacctgtttcatgccttaaaattggttatcaaattggcgataagttttcttgtacgaaacatttggaatgtttccgcggtgaaacgactattgatgcccaccgttgcaagttttcagcatcctatgccatgcggacgagaagaacgaccacgtccgggccgcatccccaccaaggcgtcgagtgttatcgaatactccgctcgcccatacacgtgccgcccgcgccatggagcgccgcagtgccgtaaaatggtggttgcttacgtacggcttaagggagggacgttgcccctccttacaggacgataaagggggcgaaccgcgccatggagctgccaagccacacgctgtatgccgacctcaagaacttcggccgcatctccaaccgcgacgcggcgctcgcgctcttcgaccccgaggcccgctacggcgagctcaccatccgcagccgcgccctgaacgaccgctcgttcatctcgcgcgagatcgtgcacgcgcgccccggccagtacggcgtcgagtgcttccaggacttccccacctcggtgcgggcactctggtccgtgctccttgcgcgccacggcggtggtgacgccggatgccacgcgcttctcgcccactacacgggctccgcggcagaaaagatgcgccgcgccgtggccgataccggcggcgacgccaacctgtacgccaacacgatccagaagctgtcggtcgagcccggcctcacggacgagcggcgcggccagctctgcctcatgctctttgtggtgacgggctgcctgggcagccccggccccgccatcggcatcgtggacgacttcgcgacggaggcgttctcgctggggctcggcaccatagagacgagcgtgggcccgggcttcgcgcgcgcggtcaggccttcggagcgcggcgttcagctggggctcctgcgcatcctggacggcgtggcgcagccgccgctactggcgctctcgctcgcgccggagggcaccgtcataggcgcgct

SEQ ID NO: 2682 - DNA, 23003 bp, synthetic construct
  source 1..23003: mol_type = other DNA
  misc_feature 1..23003: note = Synthetic
attgagcttgccagactcatgtatgaaaggcgttacgaagaagaaagccaatcgaacgtcaacactcgctacgcggagaagagagaccgtgagtgcaaggccatagcgcgaaggattagccactttctcaagggggattacttcccgaaatggtccgatttggtcgagctcgctgatttcttcgggaagccaatcggctacctaatcggcgagacggactgtgattcgtacgaacttcaagacgttgccgatatcgtaggcttggagggcgaggcggtcaccgcgcttaagagcattacgcgaaggatgagcgtggagtggctgcctgaaaagtccactccagagggtaagaggccatcagcggatagtgttttcatagcccaggacatggtcgaaaaagtcaacacagagcccgatgcttgcagagctgtcctaaatcgcatgatcacttccaagacgttcaaagacctgctgataagcctctcgaatgtcggcgagagcgaatatgagttattgatgacgcgccttaatgtagaggtgaagaggctacagcaagaagatgacgctgaaagcattgacgaactagtcatgcagcaaatggcgagaaaagcacaggcgagggatgctggactgagtctgaaggaagcggaagacgctctgaaagcatgtcgatacgaggcctatgagttctacgttcggctcgttgacgaaatgttctcggatatgtccaataccgatatcacagccaaggctaagcttattgcaaagaagccgtgatatatccaggtgcactgacagtgtcgatgcggaagtaggtgtacgacgtcttgttgcttgcccaaaccatgccgttgccgcccacgagcgacgtagagcacgagtagaagcactgcgagcccgtgaggccgctcaaaggtagcgctcaggtcgcatcggccaagatggtcgtgagcctgctgcacctcgagaacgtgcagaacaggtccgtcagcgtcgacgggtcgaagccccggaagtcaatactcgtgaacgcgcaggagctgaacgtgcagcgcatcgagcgtacgcccgagaggttgcccagaccgctcacgctggccaggttcgcgcacgagtagaacaggtagttcagatgcgtttcatggtcttgtcggcgtccgtgctggcgccgacactgggaagccccgtcctgccgccctgttgctttgcaggggtgtcggcgaacagccacggctccgcctccttgagcgcgtcgacgtcgccgccgtggtcgcccaggacagcgcgtggccgtaacgttgcgcacgcccgccagctgcagcttgaagtcgatccggtcggactcgctctgggccttcagctcggcaatctcgccacgcaaggcttcggcgacttttgcgttcttctcgacctccgccgcctgcacctctagcgcagcaatcttctcatcgcactcggcaacttgcttctcccagtcagctcccgccaaagcgatcacttcctgctggtctttcgccgcctgctgcttcctgatgtcttcctgggctttcggctcttcctacgtctctgcgccatacgcatcgcctgccatatcggcctgcctttctcttcggcagacagcgagaagcggcctgcacctgattcgttcggatacaggctatcgatgcgtcacaaagtggtcgatcgcctcgccagcatgccgtgcatccgaacgcgtcgccccgagcatcatcaggctatcgatgccctacggtagaatggagaggttgaactacaagtacccaggagcacgaattgcctaagacactgaattccctcatgaagcatctccgcgatagcggtatagatatcaacggctcaggccagaagcgcaggctcaagaacatcggctactatcacggatacaagggctatcgcttcgccagaactgcgtccaacaagcttccattgactgacttttcgcaggtagtcgcgctctatgattttgatacgcagctcaagacactgttctattcgcgcgtgatggccattgagaccgcgcttaagaactacaccctggaagctgtgcttcgtgatgccaggtcagaggctttcgaggacatctggcggactagcctcacggattatcgcagctgctcaggtaggtcctaccgtgaggcgtgggagagacgccagaggcttcgcagcgagatcgatagcatcatcttcgactaccgcaagcgtcccgtgataggccactttcgcgatgcggacaaggacacgcccatctgggccatcttcgaagttatgacgctaggcaacttcggggcgttctacgattgcctcgacaggcgagtgaagaccgctatcgtacgcgacctcggtatgcccaccaacttggagtcagagcttcgtctgaaagacatcatcttcgcactcaaggatttccgcaacgccattgcgcataacggcgtcattgtcgacgttcgtttcaagtcaggttccatcaatacgggcgtggcacagctcctcaagcaggagacgggcgtaggcaagatcgacttcacagacatcactgactacgtcatacttctggtctatctcatgcgccgcatgggcttcactaagacagagtgcaagcaactcgttgcgggctatgaatcgattctcgagaaatatcgcgccgagctacccttcatcatttactcgaaactcatcaagacgagtgcgcatggcaagttaaccgccctccgacagtttgtgagcaacgggtagaagcaagactaaaagcttgacaagcgtggtagaatgtagccaatagcggtggaaggcttcggtcgacacctgggaaagcccgatgcgtcgggcttttcttatgccccgacagcacggtgactaatccgccgtccccttcttgatgtggcattctatgccgttctcctcgcagaatgcgcgcacctgccccgtagcctcgcgatagaaagcgttcaggccctcatagaagggttagcctagcctcgcaggacatcatccatcatcgcatagcgcactgcatctattgaatggtcctgcccgtcgggaatctcgtcagcccatgttccgtcgggattgcgcaggtattccttcagcgtgaactcctcgtaggtctttgggcacctcaccgggtcgatgacaatctccctcagccccgccgatcaagtccaaatcggtgtgtaaattcccgcgcgccgcagcccccggattaccgacggtcggcgattcccacgcgggcagaaagcgcagctgcccggaaggctccacgatttgggacaaaatcccccgtcccttttgtcccaagattgtcccaagcggcctttaaattgtcccaagacaagaaaaaaggccatcgacatagtcaatgacccgtgagtttatggtcgcgggggcaggatttgaacctacgaccttcgggttatgagcccgacgagctaccagactgctccaccccgcaatgcggtgcgcttcgttgcgcaagtagtaactatacgcactgcccctaccttcgtcaacaatgtgaagacaactccacaattgaccttcgcggggacgcatgaacgcccagcacctcgcgcctaggctttcgcctccccagcttctccctcgccctccgccgcatcctcctcggcggccgccggcgtccactcgcccgcgaggacccgcgcccacacggcaaggatctcctcgcgctgtttggcggccgcgtcggcgtcggtctgcgcgacctcaaggtcgtcgtccgcaggcacgtcgtccccacccgcaacctgcacgtcatcggcaaccggccttgccagggcgtcagccaccacctgctgcccgtcatgcccggcgagaaactccacgaaggcctcagcctgccgctcgttgagacagccctcgaccgcgcccgcgcaggcgtcggccacgtccacggcagactcgggccaggccacggtggtctggccggtccttctcgccagctgacgcgcgcactgctcgctaaccagcgcgacgtcgacgctgccgccaagaagcgcctgcaccgcggcgtcctcgtccgcgcagaccacggctccctcggtgagaagctcctgcacaaacgcccaggagacgtcgtctcccaacgtaccgccggcagacgttcccgacgcctcggagagcatggccaccaggtgaagccagccggcctcgcaggacgtggggtcgcacagcgccacgcggcccgccagcgccgtagccagaaggtcggcataggcggccggcgtgcccttcttgccgtcggcaaggccctcggccagcgcaaacgcgccgacctcgcgctggacgggctcgagccccgaagacaccccatccacgcctgcgtaccagagcgcctctccgccccagacgacgtcagccaccggcttgcccggcgcgtccccgtcggcgagctgccccacgagctcggcctcgctgccgcgcaccacggcaaccgtcacgcccgtgccctgcgagaagcgcgccaccatgttgtttaccagctcctccgggcagctggtgtagagcgagagcttgccgccgagcttggcggcgccgtcctcggaggcctcggccccggccgagggctcaaccggcacgtcggccgcgccgcggctgcagtgggtcacgcccacggcaacgcccgcgccggccaccgccagcgcggccccgccggcaacgagcgtccttctggtcagcttgacctcggagagcctgggcagccccgacggcttgggcaggctcacgcgcgctcaccctcaagctccgccaggatctgggccatgacctgttgcgcgccgtgctcccggttgctgggaatgacgcgctgcgcgatctgcttgacgccgtagcgggcgttgtccatgacgtaggggtgccccacgtagcgcagcatggcgtaatcattcattgaatcgccaaaggcaacgacgtcctggcggtcaatgccgtagtacctaagaatgtgctccagtcccgtggccttgctcacgtggcgcggcgtgacgtctatccattgggagccgctgggcaggaaggtgaagcagtcggagagctcgcgctccaggacaaacgccatgtccatgatctgctcgggcttctcgcagcagattccaaccttgatgatgctcacatcgggcgagggcaggtcgtagacgcgcacggcgtccggcaggtccttgtccagctcgcgcacgtaggcggactgatcgtccaacaggtaggtgtgagcctcgtcgtagacggccatgtgcaggcagtcgaacatgctggatacctggtagaggcgctgcagcgcagtcgtggagaagacctcgcggtcaagcagcgctccgtccgcgtagacctgggtgcccatggaggccacgaagtccatctggtccgccaccggctcgaagaaccggcgcagggtcttgtacctgcggccagagctggcggcgaacatcacgccgtgctcgcgcagacgcttgaccaggtcaaacgtctctgacggcacctgggagttctcgtcgagcagggtgccgtccatgtcggtggcaatgagtctgatcacgggctgctactccttcatgaagtccggcgtgccgccagtcacggcggcgacggcaatctcaaacagcgcgtctgccacgccctcctcggcgctggcgcccacgtgccagcgggcggcctcggcaacctcgggaatggcgtttgccacggcaacggagttgggcacggcgccaaagagctccaggtcattggccgcgtctccaaagaccagcacctcgtcgggcgtgatgtccagctcgtccagaaggatgggcaggctcgcggccttggacatacccttgggcatgacgtcaaaccagtccgggatgggggagactatgcgcagctcgggcacggcttcggctacgatctgctggcagcgggccatgcgctccggaccgcccgtgcaggcgatggtggccgccacaaacgggatgtcgggcacctcgtccaccacgccgccgttgaagacggtgcgggcctcaaagacggcaagctcagcgctgctgacgcccacgccgtaggcggggttcatgaggttggtctcttctgggaagcagaccaagaacatgcccttctcgccgcgaatcgcctggtcgatgcggacgagctggtcatgcgggatgagcgtggtagagacgtagcgcccgtccagccgcacgcgcttgccgttggagaagatgcccgtcatgaagcactcctcgtgcatgcggaagaggcggctgagctccacgtagtcacgccccgtggccgggccaaagcgcacgccagcatcaagaactgcatggattgcctcgacggtgcgcggactcacgcgctggccaaggggtatgagcgtgttgtccatgtccgacagaacgagctttatcacgcgtgctcctttcttgatgcggttccggcggccccgacggccgcgctggcgagaagcccgcgccgccgtggcccttctcgcctagaccagcgtgccgtccgcgccgtactcgatggcgtcgaagcggtccaggtgaagcatgatctgctcaatgtccatgaccccgagcagggttgccacgtaggcgccgcccacgcccacgcggaggttgcggtagcccgtgccgtggcgcacgcctccccacgagaggcggtcgacgtcggagtagcgcaccagcacccggcgccccaccagcggggtcaccaccatgtggtcctcaaagagcgccacctggtggcggcagagcgccagccacgccgcaaagaggcagatgacaaaggcgtcaaagaaggccagcacgaagacgtagcgctgccagaagacgcccgtaaggcacagcacgccgagcacgacgcccacaccacccatgacaaccatggccttgaccagcgagtttgtgagctcggggggaacggtgtaggtgtcgtggtggcggtggtggcgctcggcgatgagcaccttggcgccacgctcgacgtaggccgcacccagcggaagcaggatgcccaccatggccagggctaggaacatgggctactccccgtccgcggcgccagccgtcggggtggccacggtgccgtccgcgcgcacggcggcgaacttggccaccagacgctccagcaggtcgaccgtgagctcaaggctgcgcacgggaacgaactcgcgcaccgagtgggcgttgtagccgccggtggcgatgttgggacagggcaggccgcggaaggtcagctgcgcgccgtcggtgccgccgcgggccgggacgagcacgggctcgatgcccacctcgcggttggcctccacggcatagtcaatgagcagctggtcagcggggccgaacttctcggccatgttgcggtactgctggcgcacctcgacggtgaccgtgccctcgccgtagcgggcgttctggaaggcggcgatgcggcgcagcgtggcctcgcgctcgtcgaagtcggtggcgtcaaagtcgcgcaggatgtagcagagcttgacctcgtccggggtgccggagatgtccgtggggtggtagtagccctcgcggccctcggtgtgctccgggcgctcggcggcagggaccatctgctggaactcggaggccagagtgatggcgttgaccataatgttcttggcgctgccggggtggaccaccacgcccttgaaggtgaccgtggcctcgctcgcgctgaagcactcgtagttgaactcgcccagggcctcgccgtccacggtgtagccccacttggcgcccagcgcgtcgaggtccaggagcgcggcgccgtggccgatctcctcgtcggggacaaacgccaccttgatggtggggtgggccagctcggggttggcgaccagacgcgccaggagcgcgcagatctctgccacgccggccttgtcgtcagccgagaggagcgtcgagccgtcggagcacacgatgtcctggccttggaacttggccaggtcgggcacctggtccggcgtggtctggacaggctggccgttgacgatgccggccaccagcgggccgccctcatagtggacgatgtggggcttgacgccggaggccggggcgtccttggcggtgtcgaggtgggcgcagagcatgagcgcgggggcgtcctcggcgcccttggaggcgggcagggcgccggtcacgtaggcatgctcatcaaccttcacatcaatgcagccaatggaacgcagctcttctcccatgacctcggccatcttgtgctgagcgggcgtagagggcgtctgtgcctcgttgtccgggtcggactgggaatctacctgcacgtagcgcatgaagcgctcgacgacgtcactcatggtgcctcctggcgttgcgcgcacgggcgagcggcgcagccgccggcgccgggcgctggtcttgtctgggtgagattctactccaggtgtgcacggccgcggcaaacggcgcgtaaggtgagggccgcaaacggccctcaccacgttttggccgcgtccgaagccgccttgggggcgtcctagagcctggccacgccgctcttgcgggccgcctcggccaccgcggcggcgacggcaggggcgacgcgctggtcaaaggcgccggggatgacgtactcggcgctgcggtgctcgtcgtccaccaggccggcgatggcgtaggcggcggcctccatcatgtcgtcgttgatgtcggaggcccgcacgtccagggcgccacggaagatgcccgggaaggccaggacgttgttgatctggttggggaagtccgagcggcccgtggcggcgacggcagcgccggcggcgagggcctcatcgggcatgatctcaggcacggggttggcgcaggcaaagacgatggcgcccttggccatggagcgcaccatgtcctgcgtgagcgcgccgggggcagagacgcccacaaagacgtcggcatccctgacggcgtcggccagcgtgccggccacgtgctctcggttggtccaggaggcaacctcctccttcaccgggttcaggccctcgcggccctcgtagatggcgcccttgcggtcgcagatgatgatgtcgcggacgcccatgcggcgcatcaggcgcgcgatggagatgcccgccgcgccggcgccgctgaagacggccttgacgctgcccagctcgcggccggtgagcttgcacgcgttgataagcgcggcgcaggtcacgacggcggttccgtgctggtcgtcgtggaagacggggatgtcgcagacctccttgaggcgccgctcgatctcaaagcagcgcggcgcggagatgtcctcgaggttgacgccgccaaagctgccggccaggagctccaccgtgcggacgatctcgtccacgtcgtgcgagcggatgcacagcgggaaggcgtccacgtcggcaaaggtcttgaacagggcgcacttgccctccatgacgggcatgccggcttccgggccaatgtctcccaggcctaggaccgcgctgccgtcggtcaccacggccaccaggttgccgcgacgggtgtaggtgtaggagtcctcgacgtccttctggatctcaaggcagggctgggcgacgccgggcgtgtacgccacggccagctcctccggcgtgctgatggaggcgcggctcacgacctcgatcttgccgtgccactccttgtgcttgtccagggcatactgcttggcgtcatcggccatggcgtctcctatctgccgggccgcccgcaggcggcgagctgctcacatatggtgtcagtgtagcgggcgggccgtccggcggcgcgcacttctcgccagacgcgcaggcagcggcgcaaagtgtcgagaaacgccgacagtgggcccaggcgacgaggggacgggcacagcagtgtccgcatggcttagcggggggggtaatgccgctcgccgtctgctcagcccttctcgcgtggggagcatcaattaatgtctggtcgacccatatactcgactccatagtcgaggaaacggaggaacaaccatggacgtaaccaggccttaccttgtccttggtcttgattcgggaatcgcaagctgcggtttctgtctgttggatatgacaaaccacaagattcttgagatgggctcgcacctcttcaaggctccccaggaagacaagactaagaccagccttgctgttacgcgcagaaaagcgcgcagcattcgccgcaacacggcaagaaccgccgcccgtctcaagcactgccttgagctccttgcgggcgcaggccttgtcccggcggatgcagacaagacgtggctccaaacaaagaaaggcgacaagcccatcctcaagctcagggcgggcggacttgaccgtcttctgaccgatcgcgagtttgcccaggccctctactccctctgcgggcgcaggggctacattccccatggtgaggggcgcctcggagaaactgatgaagacgagagcaggaaggtcctcggggcaatcaaaaagaaccaggacgccatggctgccggcagctatcgcaccgtcggagaaatgctcaacgcacagggacgctctcgcaaccgcggaggagattactccctctgcgtctacaactcccagattcaagatgaggcaaaggcgctctttgcctcgcagcgggcccgcggcaacacaaaggcgactcgggagctggaggacagctatcttgcctgcctaacctgggagaagaagtccctcgaccacgatactcgcgtctatgagctcgttggcccctgctcgtactttcccggagaaaagcgggctgcaagcgccgacgtctcttccgagctatgccgcgcctacgagcgtcttgggcacatcgtcattgtccacgaggacggtagcgagcaggcgctgacagcaagcgagattgacgactatctcaagattctgttctcaaccgcacccattaagggcaacaaggagtgcaaggtcacttacggcaccatccgcaaggacctcgacatcagcggcaaaagcgtgttcaagggcattgcccaagacagggagaaggacgagccctttgttccaaaggcgtggcgctctctgaggcgagtgcttcccaaggggcttcttgcccgcatgctcgaggaccgcaagctcggcgacgctgtctgcgaggccctgacctttgccagcagcgaggcgagcctcatcgaacgactctctgaccttggcctctctgacgacgagcgggatgccattcttgcggtacccttcaccggcaagctgttcaaaggctacggcagcaggagcctcaaggcgctgggcctgctcctgggggctttcgaagagcccgaaattcgcattctcacggacgccgagaaggtcaccggcctcttggatcttcgcctgagcgaccgcggcgtccgcggccagcttctgccaccatacgacagctacgaccccacctgccgcaatccggtagttctgcgtgctatgggccgcatgcgccatatcgtgaacgcgatcatcagaatccacggcgttcccgatgagattcacatcgagctcggccgagatctcaagatgtccaacaaggagaagagcctggtcgacaaacgcaaccgagagaacgccgctagcaacaagaagtgggcgacaaccgccgctggcattttgggctgcacacctgaggaagtccccggacgcatcatcaggaagctcatcctacgcgaggagcagggcgagaaggacctgtacaccggtgactccattgaccttgagcatctggtgcgagacgaccgctattgcgaaattgaccacatcctcccctactcgcgcacctgtgacgacagccgcgccaacaaggtcctcgtgctttccaagagcaaccaggacaagcgcgagcgcactccgtacgagtggatgacctccggcgaggctggtgcacccagctgggatagctaccgtgcccgcatcatggcgcaggtcaagaacccgcgcaagcgcgccaactacctcaacacggaccttgggccagagacacaggcaaagttccttgcgaggaacctcaacgatgaccgctacatgtccgtcgcggtaaagaactaccttgaggactgtttgctcttccccgaagatggccgcaagcgccacgttactgccgttgcaggcggggccacgggcaacctcaggtgggtctggggactcaactttggagagggcaatatcaaggaccgcaccgacgacaggcaccacgccgttgacgccgccatcattgccgcgtgctcagagagcaccgtcaagaaggttgccgaggcaagcgcaaagggccgagaagcgttcaagcaactccgcaagtctagacttgcggacacccagccctggccgaactttgccgctgaggtcgctgctcgccgcgagtttgttgttcccacccgcatggcagaccacggcgtaatgggcagagtgtttgaagataccctctaccacctcgaaggaatcaccgaagacaagggcaagtacccccttgttcgagccggcgagaaaactgtcaagaagggtaacgtgcgcatcaacccggacgggtcggttaagctcatcgacggcatggcgttcctgcgtctttggcttgatccgacggcgcgcccgaatggcaaggtcaagggcaagtggtacgcagagcccgtctattacgccgacattccggcaataaaggcagggacgtatgtgccgagagcatgcacaattcacgtcgcaagggtcaactgggagccagtgcctgaggcggcgatggagatagagcccatcgtgctttacgcgggagatgtcgttgaaatcaacaaccagctcgtacgctatagcggatttgacattcacggagccaccctgcactatcagtccctacttaacggtgcgacgaccacagccattccctccctcggcacttggggcaaagacacccaagtccgcgtcctccaggaagactgcctcggccactgctacgacggcatcgccatcaaccccgaggactctacattccagcagaggtaaccaccgccaggcacaataacggggccgtgtccatctgggcgcggccccgtttgctacatgcctttcggaagcttcttctacactccccgcctacgcccgaaacggacagcgccaatcagaacacaagggtgagctgggggcctgggtcagacgcctggatagcgtttggtctgctgtcaacaagcacttctcgcccctcgtactgcttctcggtcagagtgagcacggtcaccgcaccggcaatcggcagatttgccttgagcctcttgaggtgggcgtccgcgctgtcgcgcgagagcagcacgcgcgagtagacgctgaactgctccatgtgatagccgtctttgatgaggaatttcctaaaatcggcataggacctgcgctccttcttgctaccagtcggcaggtcgaacatcaccagcatcctcatgattctcatcatcgctccctattcccgtcccgccttctgcagcggaataactacgggcagctgaagcaaagacgcgtccgcctcgtttacggcgagcttgagcgtctctaactcgttttctatggcaacctgaagcggaacgtcacccaggggaatcctgaccaggtactcaaatattgcagccagctcccgctttgtctcggaggtcatccctcctcccaagccgccctgaatgacgaggagatcaaccaccggccggaacggctcgatgaggtcatccaccagattgaacgcattgaggttgttgctgtgatgaatgccgcgcgagacaagccatccgccgctgacggccgttctgccaatgccggccctgagcaccgtgtatccatagtcaagagcagcggtaaagggtccgtttctgcgattgccctccggaagaaccgctttgaagtaagcacttgccgcaaccgactcgcggtttgtagcgtctccggaatagacatcctttgccattgctctgatggccgatccgtccagcccaagaaggtccataactgtggcctgattagcgatttttgcccgaacgattctctgccagagacgcttttgaagaggcttagagatagcaagttggtcttcaacaattgcagcgtgccgggagtgcgcccccaggggaagaagcaggccattgggcatgtgatcgtcaccgcaaagcatgacgccaatcccagcatcaacgagctttgagagcgcagcggtggtgatttgggcctgatgtgtctcaattatcagaacccagatatcctcaagggggacaaggcccctgagctcgccccgctggcatatcgcaagtgcgccgttttttattgagagcgaggcggcgttctgaatgcaaatggttcgttttggcatgtcgcggcatcctctcttcgaggtataattcccttgtctagcgtggtttgtatcaactggggagttggaaggaattacggctagacaagggaatcgcttatgcgattacccgcaaggtaagcccgtcagcacctcgcgtgttggcgggcaaaccttttttctgcgaacggttttcagaaaaaggcgcgcggagggccgatttgcctgcctcgaatctcatttttatttcagcccaaaccaaaacaccccctgttcgcagggggtgttttggtttgggcattgtaccaactggggaattggaaggccggcaagaccagaacagcgtttacgcctctagctcgaacaattgtaccaactggggaattggaaggccggcaagacggcgtacctaaaggctccggtcacggtcacattgtaccaactggggaattggaaggccggcaagactccccactcctcggacttcttgcgtatgacattgtaccaactggggaattggaaggccggcaagacttggctccctccgctatctttgtcaccttgaattgtaccaactggggaattggaaggccggcaagaccatcatcgagtcgaacgcactctaggaggaattgtaccaactggggaattggaaggccggcaagacgtggaggcatatgccctcgtcggccgccagattgtaccaactggggaattggaaggccggcaagacatgtgactaactgggctgttttcttccgctattgtaccaactggggaattggaaggccggcaagacgtacagcacgtgccatgcgtcggtctcgccattgtaccaactggggaattggaaggccggcaagactggcttgtgcttctccaaaactgattgagatgtttttatagctagcaagtcgcgttacaagctccagaaaacccagccattgcatcaatcgggaaagggtttctcgcgcaattattgcatccaccggaaggctaaattgcgcgctgcggcagagggccattatatgtcttaaaaatgcgttccaccggaaggcttttttgcgcaaatggggcgccattcccttctcgcacagaaaaggcttccagcagaacgtgtttcagcgcggtgatgaagggccgacggtggcagcgccgtcatccagtgcgaaggcgagcctcgcactggatgacgggctggcgagaaaagcgcaggtcaggcttctcggcgtttatccagtgtgaggtcggaaggccgctgaccatcgcactggatgcgcggcggctctaccgccggccccaccggccgcgccacgccgcgcaaggtcgacacatgcgggacgtatacttacttgatggcttatcgtgcccacagaaaggactttcccatgagcgagaccctcgcccctcaggatacctgcgtgctcgtgaccggcggcgccggcttcattggcagccacacctgcgtcgagctgctccaggacggctacaaggtcgtcatcgtggacgacctctccaacgcctccgccaaggtcgaggaccgcatcaagaccatcgtcggccccgaggccgccgcaaacctcgagctcgtcatcgccgacgtcaacgaccgtgacgcgctagagaagatcttctccacgcacaagatcgaccgcgtcatccactttgccggcttcaaggccgtgggcgagtcggtctccaagcccatcgagtactacaccaacaacctgggcaacaccctcacgctcgtggacgtcatgcgcaaccacggctgcaagtccatcattttcagcagctccgccaccgtctacggagacccggactccctgccgctgaccgaggccagtcccaagaagcccgccaccaacccctatggctggaccaagtggatgatcgagcagatcctgaccgacctgcacaccgccgaccccgagtggaacgtcgtgctgctgcgctacttcaaccccatcggcgcccacccctccggactcatgggcgaggaccccaagggcatccccaacaacctggttccctacgtggctcagaccgccatcggcaagcgcgaggccgtccacgtctttggcaacgactacgacacccccgacggcacgggcgtgcgcgactacatccacgtctgcgacctggcaagcggccacgccgccgccctggcctggatgaacggccgcgagggcgtcgaggtcttcaacctgggcaccggcaagggcacctcggtgctcgagatcatcaccgccttcggccgcgcctgcggcaaggagatcccctatgtcatcgatccgcgccgccccggcgacgtcacgtccaactacgccgactgcaccaaggcccgcgagctcatgggctgggaggccaagttcgacatcgacgacatgtgccgtgactcctggaactggcagtccaagaaccccaacggctacgagggctaggaaccgacttgaccgcaaccgccgactcgggcgctcccggcgccctgtttgccgcataccttggcgagaagcgcccccagattgaggcgtttctcgccacgtgcgcgcccgcctgcgtgcccggcaccgccgaggccacgcgcgcggacctgaaccgctacctctaccagccgctggcccgcttcaccgcatccggcggcaagcgcacgcgccccgcgctggccctcctgggctgcgaggccgtgggcgcagaccccaccgccgcgctctccacggcggcggccatcgagtacttccagagcgccgcgctcatccatgacgacattgcggacaagtccgagctgcgccgcggcgagccctgcacgtacgtgaccgagggcaccggcgtcgccatcaacatcggcgacctgggcctggtcaacgtcctggcgctggtccttcgcgacgagaagctcccggccgacgtccgttctgacgtggcggagcgcctggtgcagatggaggagcgcacgctcgagggccaggccctcgacctaggctgggtccgcgacgggcgctgggacatctcggttgaggactacctctacatggccagccacaagacggcctactactccgccgcggtgcccctggtcacgggcgccctctgcggcggcggcgcgcccgaccagctgcgcgccctcgacgagtttggcatgcgcgccggtctggccttccagctgcaggacgacctcctgaacctcgtcggaaacgccgaggcccagggcaaggacttccgcagcgacatcacggagggcaagcgcaccctgctggtggtgtgggccctggcccacctgggagacctccagagggacgagcttctccacatcctgggccgcgagaccacggacgccaccgagctggcacgcgccgtagagctcatcgacgcctctggcgccgtggactacgtgcgcggctacgcgcgcgagctcgtggccgacgcaaaggcgcaccttgtgagggcccgtctagaggagacccctcgcgacgtgcttctttctatggcagacttctttgtggagcgcgccggctaggcacccgcgccccgctacccgttacctgaggagagacctatggaaccgatcaaggaaggcgcgactggcgccgccgtcgaggacattcaggagcgcctcggctcccttggttacacgattgatgccccggagcgcgacgagacgaccttcgggcgctccacggcgaccgccgtcgcccgcttcaggctggaccacggcctcacgctgggcgacgcagttgacgccgccacctggtccgcgcttgtcgacgagtcctaccagctgggcgaccgcacgctctacctgcgccttcccaacttccatggcagggatgtccgccagctccaggagcgcctgaacatcctgggcttctcctgcggcgaggtcgacggcttctacggcgcccacaccgaggccgccgtcaagctcttccaggagagcgtgggcacgctggccgacggcatggccttccccgacacctttgacgccatcgagcgcctgaagcacgtctggggcggcaagcccgcaaacggcccgcaccccaccggcgacatgggctttgcccgagccgccaacgtgctggagaccttccgcatctccgtcaccgcggacgaccccatctcccgcaacgtggccggccgcgtcttcaacctcgcgcacgccacctccgacgcctgcggcttggagctcattgactccgtcgacgccgccgacgcggacacgcaggccgtcatactgctgagcagcgccgagcacccgcttgaggaggctccctccatgggcgccgtggtgctggacgacaccgacaccctgccgcgccgccttcgcacggccctgcagggcgcccgcgaggtgccgcccgtggtgcgcattgacctgcccgtgggcaaggacgccggcgacggcaccttcaccatcagtgacgcgcagacctttgccgtgctgctcctggacgccatctgcgccgcgtttgacgggctcacgctataaaccatggaagcaaagcttacggtcaacggatttggattcgtggcccgttatggggagaaggacgtggagcgcgttcttctccccttgcttatgcggctgacggagctgcaggcagagcgcgacgggcggcggattgccttccttgcggcgccgcccggggcgggcaagagcacgcttgcggcctttatggagtggctcagccggcgcacgcccgaggcgacgccgctgcaggccgtgggcatggacggcttccactaccccaacgcctacctggacgcgcactcgtttgttgacgaggacgggcgcgaggtgggcatgcgcagccgcaagggcgcgccgcagacgtttgacgtcgaggggctccgcgccgcgctggcggacgcgcggagcaacgcgcccgctccgtggcccacctactctcgcgtcatgcacgacgtcgttgccgcaagcctgccaatacgcaagaagatcctgcttgttgagggcaactacctgctacttgacgagggacgctggacgggcctcgccgagcttgccgactacaccgtctttctgagcgcgcccgaggcgctgctgcgggagcgcctggttgcccgcaaggtggccggcggctccacgcccgaggaagcccgggcctggtacgaggcaagcgacggccgcaacgtggcccgcgtcctggcccaccactcccccgccgaccttgaacttgcgctgggagctgacggcagcctcacggttgcgtgacggttttggccacgagtcagaaagcacttctcgccaatgcgggcgtttgcccagttggcgagaagtgctttcaaacagttgcattttagacgtgacgaaaaccgtcacgcaagaaggaccccggggcgtaagcctcggggtcctgatgacgcgctgcagctactggcgagaaaaccttagatctggccctcggcggcagccttggtgatgctggcggcggccttcttgccggcgcccatggccaggatgaccgtggcggcgcccgtcacgatgtcaccgccggcccagatgcggggatcggtggtctggccggtctcctcgtcggcgacgatgtagccccacttgttgagctccatcttgccgccaatcttcttggcgaacgggttggcgttggtgccgatggcggagatggcgacgtcgcaggggatctcctcgatggcgccctcgatgggcaccgggcggcggcggccggactcgtcgggctcgccaagctccatcttctggaccttgacggcgcagacggtgccgtcctcgccggccacgaactcaagcggggacaccagaggcatgacctcgacgccctcggccttggcgtggtgcagctcggcgcgacgggcgggcatctcgtcctcggtgcggcggtaggcgatgatggcgcgctcggcaccaaggcgcttggccgtgcggacggcgtccatggccacgttgccgccaccaaagaccacgacgttcttgccgtgcttggtgggggtatcgtactccgggaagttgttggccttcatcaggttcacgcgagtgaggtactcgttggcgaagaagacgttgggcaggttctcgccggggacgttgaggaacttgggcaggccggcgccggtggcaacgtagatggcatcaaagcccttctcgaagagctcgtcggccgtggtgatattgcccacgacggagttgtactcaaacttgacgcccagctcctcaaggccgtcaatctcacgcttgacgacggccttgggcagacggaactcggggatgccgtagaccagcacgccgccgccggtgaagaaggcctcgaagacggtgacgtcaaagccgttgcgggcgagctcgccggcgcaggtgatgccggacgggccggagccaacgacggcgaccttcttgccgttcttgggggccatcttgggcttggaggcaagctcgggctggtcgccgacaaagcgctccagctggccgatggccacgggctcggacttcttgccgcggacgcacttgccctcgcactggttctcctgcgggcagacacggccgcagatggccggcagcatggactcctcgcggatgatgtccagggcgccgccaaagtcctcctcgcggatcttctcgatgaacttggggatgttgatgttgaccgggcagccctcgacgcagagcggcttcttgcagtccatgcagcgctcggcctcggccagcgccatctccttggtgaagcccttgtcgacgggacggaagtcgcaggcgcgctcggcggccggctcctcgttgtcagcggtgcgcggggacttcatgtccggaacaaagcgaccgtttacctgtggcatgcgcagttcgcctcctcataggccttgagggactggccctcctcggtgcggtacgcggcctgacgcgcgcgaaggtcgttccagtcgaccttggtggcgtcaaagtcggggccgtcaacgcaggcaaacttggtcttgccgtcgacctcgacgcggcagcagccgcacatgccggtgccgtcaaccatgatggggttgaggctggcagtgatgggcgtgttgtacttctcggccgtcatggcggagaacttcatcatggggacggggccaacgcagaagacctgcgtgacggccttgtcctggagcaggcgctccagcggggcggtgaccacgcccttctcgccgtaggagccgtcgtcggtggtgatgtggatgtggtcgtcgtccagaagctcgcggaactggtcctcgagcaggaggaggtccttggtgcgggcgcccatgatggcgtgcacctcgtggccggtctcgaccaggtgcttggcaaccgggaaggcaatggccaggccgacgccgccgccgatgacagcgcaggggccctcggccatctcggtgggcatgcccagaggaccggtgacgtccttgatggagtctccggcctcgtaggtggacagcatctcggtggtcttgccgatcaccatgaagatgaactcgacccaaccctcctcggggttccagcccgccagggtgaacggcacgcgctcgcccgtctcgttggcgcggaccatgaggaactggccagcgtgagcgtgcttggccatctcaggcgcctcgatgcggaacttgaacaccttctccgagaactgcgtcttttcgaggatcttgtacattaagcgaactcctctcctgcaatctctcttttctttgaaggccgcttaccgagtcccccacagacttacccgacggctgttgccgcacggccttctccaatctgcaattgtaccctcagcgcagcgctgcgatgagcaccgccgttcggggacaccagctaccgctcgccgaaaaggcgcaggtacttaaggcggctacttggcgccttccgtgaggacgcgctccacgaggtcggcggcgcgctccgccgtgatgttgaactcatcgaggaagccgcccttgagctcgcgcaggacatagtccgccacctgcatctttccgggcgggcggccaatgccaaactgcacgcgggcaaagtcgcggctgcccagcttgtcggcaatggagcgcaggccgttgtgggcgttgaggcctccgcccagcttgaggcgcacctcgcccgcggcgagatcgacctcgtcgtggaccaccaggatctgctggggcgccacgcggtgggcgcgggccaactttgagagcgggcccccgctggtgttcatgtagctcatgggcttggcgagaagcacctcccgctgctcgccgtcggccccgcgccaggtcagggacgccacctgggccccggcctcgctcttccagtagcggacgccgtggcgggcggccaggacgtcgacggtggcgaagcccgcgttgtggcgggtgcgctcgtagtctgcgtcggggtttcccaggccgcagacgatggctatggtcgcgggcgcggcaggcgcctttgccatgcgcttctcccctcttgaagaaacggggccgccacaaggacggccccgcggacttgctggtgcgatcgagaaagttgacaaagggactgtccctttgtcaacttttggcgagctacaggttgaggccgccgccgaagatgttggagacgggctcgttcatgtagacgctgtagatggcctcggcgagctcattggcaatgctgatggacttgatcttggagccctcggcgttggcgacctcacaggggat

SEQ ID NO: 2683 - DNA, 23003 bp, synthetic construct
  source 1..23003: mol_type = other DNA
  misc_feature 1..23003: note = Synthetic
  variation 15475..15516: note = n is a, c, g, or t
ccgcgccgcaaggccgtcacgcgccgcgaccgcagagcccgtcgcgggcgagaagaacgcgacccccgcagccgcgacatccgccgcgccgcagcaccttgccggcggaaggcccgcggaccccaggctccatacggccgccgtcgcgctcgcgcttgccgcggccgccgtcggccccgtgagctacagcctctacacagccgcgacggcgcacaccggctccatcgtgacggccggccccagcgtgagcggagactcctccatgggcggcggccccggcgggcgtcagggcggcatgggcaccatgggcggcggcgcgggcaccaacgcgtcctccggcaacacgccatccgcacccagcggcggcagcggtaacggcggaggcatgcagccgccagccgcaaacggcaccggcagcggcaacgcaaacggaatcggcggcggcatgggcgacggcagcgcgcccaacgccgaggggctctcgtccagcggcggcggcagtggcggcaggggcgggatgggcggtcttctcggcgggtcctccggatcggtctcgtccaagctcgtgaagatgttgcagaagaattccgacagctaccgctgggtcgccgcgacaacgggctcgcagaatgcggcaagctaccagcttgcgaccgaatgctcggtcatgcccatcggcggcttcaacggctctgaccccgcgcccacgctcgcgcagttcaagaagtgggtcaagcaggggctcatccactactacatcgcgggcggtcagaccggcggaacgcagataggcggctccagcgcctccagcgagatcgcgtcctgggtgcagcagaacttcgagtccaccacggtcgacggcgtgacggtgtacgacctcacgcagcagatctcgtagcgccagcgggggctccgctcgcacagggtccgcgcgtgtagacccgcgtgcagacaagtgtaagtagccgagaagggcggtcgtccccactgacggccgccctttgcatgcgccccaatggaggcggcagcacgacccgagcgcgcctccttgcagatgtcttgcgcttctcgcccgccgagggcgtgctactcctgcgagaagtacgcgaccgcaatggcaccggggccggcgtgcgtgccgatggtggcgcccacgctgcagatgggcagcgcgtccacgatgccctcccacaggtcgctggagtcgcgcacgtacttcttcagcatggcctcgccaccggcggtgtacgcaaggcagaacggcatcgcgaagtcgatgggatgctcgcccacaagctcgactagcaggtttcttgcgttcttggagccgcgcgccttgcccagcagctccacctcgccgtccgtcatggtcactacgggcttcagcgcaagcagcgcgcccgccgccgcggccgcagacccaatgcgcccgcctcggcgcaggtactccagggtgtccagcagggcgagcatgtgcacccgcgagcgcgcccgctcaagccgtgccgcgatgtccgccgcgggaaggccgcgctccgcaagcatgagcgcgtactccaccagcacgcgctcgccgatgcaggagctgagcgagtcgacaacatgcacgccgtcacggccctccgccgcaatgcgcgcgctctgccacgttgcagatacctttgaggagagcgtgacgaccacgacgtcctcccccgctgcctgcgcctcgtcgtacgcctgcgcgaacacgcccggcgacaccgcgcccgtgctgggaagctcgtcggattccaccagcaggtcgtagaaccgctcgtgcgtgaggtccacgccgtcgtggtacacggtactgccaaacgccaccgtcatgggcagcacggtgaggttgggatttgggaagtccacgatgtccgatgcggagtccgtgatgatacgagtggccatggccgctcctttcgcgccctggttgcttgtctttaggttgtctttcggatgtctttgcgacgccggcgcccgcttggcccgcgtcactcgagccgtcggggtcgccgtccgcaccgcaggctagatgcgctcgagcgactccagcacctgcgtcagccacgtgtacatgcgctcgcgctcctgcgggccaatgtccgcgctcgcctcgaacaccacgtcgtctatgatctggtcaagttcggccgccgccttgcgacccgccgccgtgagtgtcaccggcgcgcggtacctagacccgcgggccttggcgtcctcgctcgcatggccgcgcacgaccatgccctgcgcctccagccgcgacacgatgcgcgtcacggcggcgcggtcctgtcgcatcagccgcgcgacgtccgcctccgcaaggtccccgtccgcgtgagcaaggtagtacaggaccatggtgtcggtcccgcgcaggccaagcgatgccatcttctgcgtcttgatgcggccgatctccttgttgagcgcatagattacgcccacgaagctctcgaacctctcgttagccacgctcttctcccctgctcgacacctcactggcgggacttttcgccttgcacatgagcccgattctaccatgcacgcacgcatgctcttgttgacttgtcaacataatagcaggcacgccagtcattatctcaattgttgcgttgtcaacatcttcaacacaatctaagctttctctaccgcgcactccgcgacagctttcaaatgcccgtgctattgacaatagtttagttttagctaaatctctatcaaggggagctcacttgaatccttcgtgggaaatacgacgactaacgatcgacgaccgcaccggcgcatttctggatgtgcacgcgaaacgcgacaaaccatccttcattgacgattgcctccgaaaggatagagacagagccgcccgaatcattacgacagccaacatcctgtgtttctatttgacttcgatacgcatgcaggcggcagaaacaaattgccagagcatgacagggacagagcattcgaacttgctgccatcgccgaacaatgtgctaaagacttttattaaaactaaggatgatgcatcatggccacaatcgccaacatcgatagcattctcaaccagattcccaatccagaggatctggcatggaatcatgccatggacatttcgggtgcgatacataccaggctcaaagagcttggcatgactcagagagaccttgcggaaaaaacttggcgtcacacctggtcgcatttcgcagattatcaaggggtaccccggcatgtcgctaaagctcctcgcgcgcattgagtccgccctagacttcaggctagactctggattcagatacgaggcatctgtgtctggctcgagcaagagcgtctcagccacaatgaatccgatatatgacaaaccacgggatgacagtcatgagaggagaatgggtaggcgagcataggagcgctcacagatgacaacgcgcccccagcaggaccatcctgctgggggcgcctcaacttgcatttgcctttttcgtcttgacgcgggcgagaaggacgtggcaccttggtcgctgccttatgccacgtaccgctccgccacgtgagcctactgcctatctgcgtccgtagcggagtcctgcgcgatcgcggtctcgtcgtcgccaacgccgtccatgccgtcgcgaacgttcttgaccgtcttgccaagcgcgtttccaagctggggcagcttgttgggaccgtagatcagcagcagcgcaaacagggctgccatgatgaggtggtctggattcatgtcttcctgcctttctgacgaggacctcggacgtcccgtccgtctccaagagcgtaggccccgccccgccataggtaaaatacaagtatttgtgcaatccatatacggtttgtatgggagcttgctctctttgcggctagctgcgcgttggtcgcacacaacggtgacgcacctacccacctcacgcataacgacagctctttgcgactagctacagcgctactttcgcaacaatttcgctaccgtctgccgcatcaatcttgactgtagtatctttctctcttgtctatcagttgtcttgccaagcgtcacggcgcaacgcacaacgccggcgagtggccaccgccaacagaaggaagcaagcatgaacctgctcaggaagcgcgcacctcagacatcggagtccgtctggctcgcaattgtcctcgcctgctccggcggcctcatggacgcgtactcctttctggggcgcgacaaggtcttcgccaacgcgcagaccggaaacctcctgctcctgggcgtgaacatctctaccggcgcgtggcagaacgtgccgcactacctctgccccatcctcggcttcgcggcaggctgcgccatcgcgcacgagattcgcctccacaagggccgcggcatgcactggcgccagatcgtcgtcgcaatcgaggccatcttgcttgtcgcggtctcgctcatgccgggatccgtcaaccttgtcgccaacagcctcacgtcccttgcctgcggcatgcaggtgcaggcgttccgcaagctgcacggccgcccgttcgccacgaccatgtgcatcggcaacctgcgcagcgggacgcaggcgctcgtaagctacgtgcaccagcgccgtcgccgcgacctccgcaccgcatttctgtactacctcgtgatcctcaccttcgtctgcggtgcgatccttggcaacttcctcctaggagcgttctccctacatgcgatcatggcaagcagcctgttgcttcttgttgccttcgccctcatgttcgaggaccgcgagcacgagcgttcctcgacgcagacgcaggcaaggtaacccaagggaccacccgtccgcacccttgcgtttctccttcgcactcccgcgcttcttggccgcgcgcccgcgcttgtcgcgcgcaagccgccgcccgcgcatcttgcagacatctgcttctataacggggtataacgaatctgttcatggcacagcccggccgcgctgccgggcgtcgcggcgcaaccaggcgccgcggccggaccctaaggagcagcatgtacaacttcacgttccacgtccccaccaccatccacttcggcaagggacagatctctcacctggcagagctcgccagctacggcaaccgcgcgctgctgtgctacggcggcggctccgtcaagcgcaacggcatctacgaccaggcgctctccatccttaaggacgccggcgtccaggtgttcgagctcgcgggcgtcgagcccaacccgcgcatccagaccgtgcgccgcggcgtcgagctgtgccaccagaacgacgtccagatggtcctcgccatcggcggcggctccaccatcgactgcgccaaggtggtcgccgccggcgcaaagtacgatggcgacgcgtgggacctcgtgatcaagccggagctcatcaaggacgcgctcccgatcttctcggtcctcaccctttccgccacgggatcggaaatggatgcgtttgccgttatatcggatatgaccaagaacgagaagtggggcaccgccggcgagtgcctcaagcccaccatgtccgtgctcgaccccacgtacacgttctccgtcccggcgcgccagaccgctgccggcaccgcagacatgatgagccacaccttcgagaactacttcagcatggatgagggcgcctacgtgcagaaacgcatggccgagggtctgctcaagaccatgattcactacgggcccatcgcgcttgcccacccggacgactacgacgcacgcgcaaacctcatgtgggcggccagccacgccatcaacggcctggtgggagacggctgctcccccgcgtggtgcgtccaccccatggagcacgagctctctgcgttttatgacataactcacggcgagggcctcgccatcctcacgcccgcgtggatggagcacgtgctgagcgcggacaccgtcgccctcttcgcgacgtacggccgcaacgtctggggcctcaccggcacggaggacgaggccgtcgcgcgcgaggccatcgtccgcacgcgcgagttcttcacgcagaccatgcacatgccggcgacccttcgcgaggtgggcatcacggacgagaagaacttcgaggtcatggcccagaaggctgccaatggctgcaagggttccttcgtcccgctgtcgaaggacgacatcgtagagatctatcgcgccgccctgtagcgccacgggcgatttgctccacgcaaccagcgtcatgcgcggggcagaaacgtgcaaggcaaagcgttagcgccgcgccccggtcatggcaccaaccatggccggggcgctcttctcgcaagcttgcacttgcctttcttgcacttgtcttgcttgcacgcgcctttcgcgcgtgggacgtcagcggctgcgcccgcggccatacctgcgatagcgacggtcgcgacgcccgaagatgttcctggactccatcgcgtccgagccgtcgcccaccactacgatcagaaacagcaggccgctcaccgctacgaacaagaggttctcgacaaactccctggcgaactccatggttgctcctatctttccgcgccgccactgcggcgcattccctttgacgaccatatggtcttacaggagcgacggagctgccataggcgcagcttacggccaccttacgagttcgtaaggttcgcgcaccgcggagggcgggcgtgccaccagggcgctgtcgcggcgcggcactacccgcgatggcgtgcgtcctcgttcacgcgggcgttccagtctggcggaatgcagccgacgcgcgcgccgcacgtcacatccgacacggcgtcatacgccaggctcacgccgccgcggtcgcatacgtactgcgcaacgcgatcctcgcagatgcctatccgccccgcctcctcgattgcgtcgatgtttgcccccaagaacacgaactcccaaccttggcgcttgcatgcgccgaccatgcgtcgcacgcggtcgtacgtgtagctgtggctcgcgttctcgagcccgtccgttatgaccacgaccaccacgtgctccgcgcgccacccgtccggctggcaggactgcaccaacgccgtgtgcttgatggcgccgccaagcgcgtccagaagcgcggtgcatccgcccggctggtagtcgtccggaccaagcggctccacctcgctgatgggacgacggtcgcacgcaacgcgggcctcgtcgctgaagaacaccacggacacgtttgcctcgccgtccaggcgccggttcttctcgagcgtcacattgaacccgcccacggtgtcgtcgcgcaaggcgtacattgagccgctctcgtccaccacgaaaaccagctccgtcaaaccgggccttacgcgcccgcccggctccgggacgtcgtggtcaaccctgccgcttccgtaccgattgcgcgttccatttccatacccatgctgtgacatgatgcgctccctcccgcgggcgtcccgcctctggcctcgtgctggcacaagtctaggcggcgcggagacgccatgggtaaactgagaggctacatcgtagtaccttgcaaatccgcaggccaaggacctgttttccacatcgctgcaaacgcagcgtcacgccacgcccagcagctgctggtcatggcagaagagctcgtagttgatgcggtcaacgtcgtacacacgatgcgatataaagtactcaactatcacgtcaaacttgctgttgtgagcgaacacatagccggcacgggccagaagcgtctgcgtctggtccaggtcgagctccagcgccacggcgagcgctaggaccacgcgtttgctggggtttagcctgccggatcgcaacttgctgaaatactggcgcgtcaggttcgcgcggccgtacacctgcgcgtctgtcagcccgcgcgcgtcgatcatggaaagcagcgtctcgctgaacgacgcgtcgaggttcgccagcaggtcgtccagctcgtccccgaagacggcgccgcccaggcatgccgcgcccatgtagaccggctcctcagccgccaccgtaggctcggccgctgcctcgcgctccgcagtcgccgacgcaggttccccaagcgactcgggcgacagccctccgggcgagaaggactcgtcatccgtggtcgcatccgcatgccagcgacgctcgcgtttgggccggcgcctggggtcgcgacgctcggcctcgtccacgtagcgctggtcgatgtactcctcgagccccgggtcgagcgcccgggcctcgcgcgtggactcgcggtcgaagagcacgaggtagacctctatgtccgcgcggccatccggcgccgcatcaagccacgagcgaattgccgtggtcgcgtcctcgatcgccagttcccttgggtagccgaaggcgccggaagagatcagcgggaacgcgacggaggtcgcaccgagtgaagccgccacgtcaagcgagttttggtagcaccgtgcgagcagcggcctcaggtgcgtctgccacccgacgtcgacggagccttccggccagcgcgggcccaccgtgtgtatgacccaccgtgcaggcaggtcgaatccgggggtcgcgatcgctttgccacattccacacggccggccttgcggtatgccgcctccatgcggcgggcaccggcggcacgaaagatcgcggcagacgcccctccgtctgcagagaggccctcgtcagtgggactgacgagggcatcgacccgcatgcgggttatgtcttggcgaaccagcgtgagcggcatgcttcccccaaagacgcggcattcgagccgcgctcgtgtaatgcccggcctagaagcccaagctgtcgttcaccaggatcacatacatgcggccggggtggtggttgaagcgcgtgatgaggaagttgcagcagatggtgtcctcggacttgcagttggcgcacgcgccggtcttgcagcacggcgtgttcaggttgaagcgctgcgcgttgattggcgcggcgacgttgcgcgcacgcttgatggcgccgtcaaggtcgccgcagaccttgttcatgcccacgatgaagagcacgtgtcgcgggccctgcgcgatggcgctcacgcggttggagttgccgtcgatgttcacgatcacgccgtcgttcgtgatggcgttcgcgctggccacgaacacgtccgcgtcatatgccgcgagcatggcggcgcgcttgtccttcatcttgtcgcggtcgatgaagttgtagttgccggcggccagggcatcggtcaggccaatctcgcgcgcactggtgcagccgcccatggtgacggtcgagccctcgcctatgaacgcgagcgcctgctggagcgcctcctccctggtggccgcgtactccgccttgatgttcctcctgccaaggcccttgatgacggtctgggccaagagctcgttgcgcttggtgaggttctgatccatggttgcctccagtgctcgtgacgcgccgtccgcgcgccgtgccgttgcttgcacacgattctacgcgcacaggtagccacgcacgcagaagtagcgcgagtcaattagatcagttccatgcttaaaccaccacagtataaggagacaccactgtaggtctcatatgaattgatgcaagcgctcctcctgtctggggatgctacggcagcagagcgacctgacaattgccagcccaacagcatacttgtagtacgcgaaggacgagaagggcacggcgtagagggattgcaaggtgtcgcagggcacactcgcaattagtcgtccctagggtccccgccatcaagaaatcgtgagttgcccgaggactacgtacgagaactccgaaggccggccacttgataccgaacagtcgcggccacctcgacggcacctccgcgcctcaggcggaatcggtgtgcacgttggagttcacactgatacgatacgtatcgtctagtcatgtagcagccttgccctcctaggcatggcacgtctttacgggagttggccatggcagaacaatacctcgtgcttggactcgacccaggcatctccagctgcggattcgcgcttctggacatgaacaaccataagattcttgaaatgggatcgcacctgtttgacgccccacaggagagtaaaaccaaggtcagccttgccgttggaagacgcaacgcgagaagtgcccgtcgaaacaacctcaggacaaagaaccgccagaagcactgcatgaaattgctgaaagaggcagggcttgttcccgacgacgcaaccaagcagtggttccaatccgccaagggcgaccgccctctgctcgagctgcgcttcgcagcgctcgaacgaatcctaaccaaccgcgagttcgcccaaatactctatgcgctctcggcgcgcaggggatatatcccccatggcgagggccgcatcagcaagctctccgacatggacacgagcggctcctccgacgccgagactggcaaggtcctcaaggctatcggcgagaacaacaagcttatggtccaagggcagttccgtaccgtaggagagatgctctaccaccaaggcaagtcacgcaacaagggtggctcctacgagcactgcgtgctcaacagccaaatcgtagacgaggtccatgcgattttccaacgtcagcgcgcacagcagaaccccgctgccactcaagaactcgaggacaagtacatcgagaaccttacgtgggagaagagaacgcttgaccatgacgccagggtctacgcacttgtgaaaaagtgcaaatacttcccaagtgagtaccacgccgcacgcgcagacctctcgtcggagctctgtagtgcctacgagcgtctcaagcacctgcgcatcgttaacgcagacggtcatgagaccgcccttgcccccgagcaggtcgaggcctacattgccattctcttctcacccgagcctctctcaggtaggaaggagaaggtcacgtacgcgcgcatccgcaaggacctcgacctctctgcgcatctcttcttcaagggaatcgatcctgaagacgagaaggaccatgagccctatgcccccagggcatggcgcgctatgcgcaaggttctccccaccgagctcatgaatcgcttcaggaatgaccgcgcacttgctgatgcggttggcgaggcgctcacctatgccagcagcgaggacagcctcatctaccagcttgatagcctcgacctcagcgaggcggaacgtgaatatattctggggctccccttctcgggcaagatcttcaagggttatggctcacgatcgctcaaggcgctcggcatgctcatcgacgccttcgaagagccagaggtcaccacactcaccgaggcagaagaaagctccggccttttgggtctacgcatgagcgacaatggcatgcgctacccgcttctgcccccgtacagtacctacgacagcgagaacaggaaccccgttgtcctgcgtgcgatggggcgaatgcgtcgcattgtgaacgcaatcatccgaatctatggcgtcccagacgagatacacatcgagcttgggcgcgatctcaagcgctctaagcatgagaaggacctcatcagcaaacgcaaccgcgagaatgagcgcaagaacaagcaatggcgggcacaggccgcagagattcagggaattgaccctgacgaggtgcgcccaaagctcctcaagaagatggctctctgggaagaacagggtggcctcgatgcctataccggacacaaaattgagtttgaccgcatgatctccgacgacaaatactgtgagattgatcatgtgctcccctattcacgcacctgcgatgacagccgcagcaacaaggtcctcgtgctcgccaagtcaaaccaggataagcgcgagcggacgccgtacgagtggatgactcaggacgcacagaaaggtgctcccagctgggatgagtatcaggcacgcgtcatcgcgaaccgccacatatcacccagaaagcgccggtacctgctgaacaacaacctcggccccgaccaagagagtgactttctcaaccgcaacctgaacgacgaccgctacatgtcacgcgcggtcaagagctatctcgaggacacgctcatcttccctgaggacgggaggaaaaagcatgtgaccgctgtgtccggaggtgcaacgggaagcttgcgccatgtgtggggccttaactttggcgacggcaacacgaaggatcgttccgacaaccgccatcacgccgtggacgcttgtgtcatcgcggcatgttccgaggcaaccgtgcaggccgtcgctaaggcacgcaagctaggcgcggaagcctataagcacatacgcgaggaccgcctaaaggacacacagccttggcccacattcgccgacgaggtcgtcgcccgaagggagtttgtcatccctacgcgcatggtttctcatggcgttacggggcaagcgttcgaagacaccaactatcgcttcgacggcttgacgaacgacacgaagaaactcggcattctctatggcaatgggaagttcaccaagaagggcaacttcgtcattggcggtgatggcaacgcgcacctagtggacggcatggcgttcctgcgcctttggattgaccccacagcaaaaaagggcaagggcaagtggtacgccgagcccgtctactatgcggacattcccgccatcaagaacggtacctatgtaccgagagctggaaaagctacagttgcgagaaatgcttgggaagcgataccagaagcggcacatcgcaccaagccactcgttctgttctgcggcgatgtcatcagcatggatgggcatacggcgaggtattggtcttttagcatcaacacgctgaccttaaaaacaaaggacttgataaccggcgatgactacaaggactttccaaccctcggcaaatggagcaaggattcttatccgaagataatccaagaggactgccttggccactgctacaaaggcttggttccaaaatcgtcagaaggttaacgtcagttgaggaccaatgtcagggaggtcattgtggggagatgtatccacaagaacctccctattttcatactgcttttcggttagctctattaccgtcacctctcccgcctcgggaaggttggcgcggagtcgctgaaggtgcgtctcagcgctgtcgcgagataggagcacacgcgaataaacgctgtactggtccatgtgatagccgtcgtttatcaggaacttcctgaacagggcgtaggactttctctcgcgcttgctgccagtagggagatcgaacataacgagaaggcgcatgattctcatctccctactcctgacctacgtaggaaagcggaatgacctctggtaaagaaagcaaggtatagtcggctaacttcaccgcatctctcaaggtgtcgaattcaagttctatggcatgctgaacggaagtgagttgtccgtttaccatcacctgcaactcgaacacagatgcgagctgtgactttttctgtgggtcgagatcgccctcgagctccatctgtcttaccatcaaatcaacgatggggcgaaatggttcgatgaggtcatcaacaaggttgaaagcattcaaattgtttgaatgatgcagacctcgagaaacgagccatcctccagagacacctgtgcgacctatgcctgcgcgaagaacggcgtagccatagtcgagcggtggagtcacggggccattgcgacgcgttcccctaggaacataatgccggaagtaaactgaggccgctgcggactccatgttcgaactgtcgccagagagaactcgactcgcaaacttgcgtacaagacttccgttctcgccgataaggtctaggacctttgcctggttcctaatcttttgaacaacaatacgctgccacaggcgcttctgcagaggcttagagatggatagctgatcatcgactatcgccgcatgacgcgaatgagcgccaatcggaagcaggaggccattcggcatgtgatcgtcaccacagagcatcaaacctatgcccgagtcgactattgaggagagagctgacgttgtaatttgagcgcgatgtgtctcaacgattacaacccaaatgtcctctaagggtatggatgacttcccgttgttgctctctattagcaacgctgcgttgcgtattgatacctttgccggattttgaatacatattgtccgctttggcattgtcccatcccctagtaaacgataaaatggatatgtctaggcaagatgtaccaactggggagttgagatcatgcgtagacaaggggaccacttagtggttacccgcaaggtgagcccgctgatgattcatcatcggcgggcgatccttttttggtggtaagcgatggtatttttcaaatttcggagagaatttggcgagtcacagtgcccaaaaccccattttcaaaatatgcctcggccccgtttcacctgttaaacaaggaaaacggggccgaggcattgtaccaactggggaattgagaccgcgcgaagactttccagggtgcggagactgcaatcacgtcattgtaccaactggggaattgagaccgcgcgaagaccgatgcgttgccactaacatcggccggaagcggcatcccagcggaaatcaggcaattgtaccaactggggaattgagaccgcgcgaagacacttgttgtttgcggtgtggttggtgctagattgtaccaactggggaattgagaccgcgcgaagactcccattactccatggtgtgaatgctcgaaattgtaccaactggggaattgagaccgcgcgaagaccgaggtgcagcatgatttcagccgcgcgtgattgtaccaactggggaattgagaccgcgcgaagacttctctgggtcatccgtccagtccttcaggattgtaccaactggggaattgagaccgcgcgaagacctctcgctgcttagccaatccacagcaccaattgtaccaactggggaattgagaccgcgcgaagaccttggtgagtgcccagcctgcaaagcgccaattgtaccaactggggaattgagaccgcgcgaagactccatccagcagcagtggtggtggcgccgaattgtaccaactggggaattgagaccgcgcgaagactgtggatgcccgcttgcctgagcgccttggattgtaccaactggggaattgagaccgcgcgaagacagcgaccgccgtcgaattaatcacgttggtattgtaccaactggggaattgagaccgcgcgaagacctttcctgcgccgcccgcgttgttgattgaattgtaccaactggggaattgagaccgcgcgaagactcgagacattgcccttcgcgtcgatgtagaattgtaccaactggggaattgagaccgcgcgaagactcgctggcgttccgtccgtcagtctctcggattgtaccaactggggaattgagaccgcgcgaagactgtggnnnnnnnnnnnnnnnnnnnnnnnnnnnnnnnnnnnnnnnnnnaattgagaccgcgcgaagactgtgtccatgcgtttcctccttcgcgtcgaattgtaccaactggggaattgagaccgcgcgaagactcttgatttcgttctctacggcttcggagtattgtaccaactggggaattgagaccgcgcgaagactcgcggcgctcatcgctggtcatcgtctctattgtaccaactggggaattgagaccgcgcgaagactcgctgccctgcccgccagcaagcagcatgattgtaccaactggggaattgagaccgcgcgaagactcggcgttggtgtacatgctaaaaaacaagattgtaccaactggggaattgagaccgcgcgaagactgggcctcgtcgtacgcctttgccttcttcattgtaccaactggggaattgagaccgcgcgaagacgcaatcctatctgcggatacgacgcggccaattgtaccaactggggaattgagaccgcgcgaagacgatgatgccgtgctcaaggccacatgccatattgtaccaactggggaattgagaccgcgcgaagactgtgcggcgctcagatggtagaggtcagaaattgtaccaactggggaattgagaccgcgcgaagacatttggtcgcttgggtacgaccaaggcaatattgtaccaactggggaattgagaccgcgcgaagactggctgctccgcaagccacctgataagggtattgtaccaactggggaattgagaccgcgcgaagactcttcgagcctctcatccaccacgtcaagaattgtaccaactggggaattgagaccgcgcgaagacccggcacggcgtacgtctgcgtgtcttggcattgtaccaactggggaattgagaccgcgcgaagactcatctcgcgcaccgtgtcgcgcgtctcacattgtaccaactggggaattgagaccgcgcgaaggccgcggaccgtcagacgctcaaaggttgaagaaaaatctcaccggaatacgttggaacaagcccaaggcgtctcttaggcgtctttgacgttttcaagcttgaaactcaatatcacataactacgcgcaaacaatgcccaaccccagcgacatctcagccaccacgttatctgattgcacaatatttcatcaaggaaagcccagccttctacgagacgagcgtggggggtgtttgcgcagatcgacagaaataacttacattcgcaaactcaagtcgctcaagctgtcaagacagtcgtagcaggaaccgacgtaagagcatgcggaggggcatagatatcgaatctccccagatagccttggcgcacacgatagcggacccgtactttctggtacgggtccgcttggatcaggtacgagactacatcacactgatgacaacagcgtaatcgcaacggcaccgcagcggttaccttgctatttagacgaaggtagctcgtctcccttcgccttcgcctcctccggggtgtccgggtcgccggagatcgggtccgcgtttgcgtccgcgccgcccatgccatacgtggggcgcgcggcctcgtactggatctggcgcgccagcttagcaacgtcggcctgcttcacgccggcatagcggtgacacgcgcaccagtggccgggcagaacctcggtcagtggtgccgcctcaacctcacacgcgcctacgcgcgcgaagcaacggctcgcgaagcggcatcccgccggcgggtcaatgggactcggcacgtcgcccttcaggatgatgcgcttgcgcgagaggtgcgggtccggcgagggaatcgcggacagaagcgcctgggtgtacgggcacagcggctcgtggtacagggagttcttcggcgcgatctccatgagcttgcccaggtacatgacgccaacgcggtcgctgatgtgcttcaccacgttcaggccgtgcgcgatgaacaggtacgtcagccccatgtcgtcgcgcaggtcctccagcaggttcagcacctgcgcctggatggacacgtccagcgctgacaccggctcgtcgcacacgatgagcttcgggttcaccgcaagcgcacgcgcgattcccacgcgctggcgctggccaccagagaactcgtgcggatagcggttcttcaggtccctgcggatgcccacgcgctccaacagctcgtccacgcgcgcgtccaccttgtcctccggcagcacgccgttcgtgacgatgggctccgccacgatctggctcacggtcatgcgcgggttgagcgacgcgtacgggtcctggaagatgagctggatgtcgcggcagtaccggcgccgctccttcggcgggaggttcgtgatgtcctttccctcaaacaggatgcgaccgctcgtgggcctcagcagccccacgagcatcttgccgatggtagtcttgccgcagcctgactcgcccaccaggccaaacgcctcgcccctgtgaatctggaacgaaacgtcgtccacggcgcgcacaaaagacgtcggcttcccaaagaagctcgtagccgcaacgaagctcttcgacaggtgttgcacgtcgagaaggacctcgcccttcgtcgcgtccctctcgccggcgggcacgttcgccttcgtggcggcggtctcgttgctctccatgggctactcccccttcccgtccgccgtggtcgtagtctcgtcgcccgcggtcgtcgctgtcgcagcggtcgtcgcgtccgcagtagccgtcgccgcgtccgcagtagccgtcgccgtgtccgccggcgcggcgtcgtcgtacaggaagcagcgcacgcgccggtctggctggccgggcaccgcgcgaagctccggccgctcgcggcggcagcgctccatgcagcgattgcagcgcgtgctgaacgggcagccgctcggcatgtcaagcgggttcggcacggtgccggggatggtgaacagccgcttcgactcgtcgtcctccacgcgcgggatggactccagaagacccagcgtgtacggatgcaggggcttctcgaagagcgcgatcttctcggcctcctcaacaacctggccacagtacatcacgaccacgcggtcggcgacctcggacaccacacccaggtcgtgcgtgatgaagagcacgcccatgtcgaactcgtcacgcaggtggtagatcaggtccagtatctgcgcctggatcgtcacgtccagggcggtcgtcggctcgtccgcgatgagcagctggggctggcacgcaagcgccatggcgatcatcacgcgctggcgcatgccaccggacatctggtgcgggtagtcgcgcgcgcggtcctccgggctggggatgccaaccaggcgcagcatctcgacggcgcgggcccacgcctcgttcttcttcatgtcggtgtgggtctggatggcctccacgatctggtcgcccacgcggtagacggggttgagcgacgtcatgggctcctggaagatcatcgcgatcttgtggccgcgcacgtcctccatctggcactcggaaagccccagcaggtccttaccgtcaaaggtgatcgagccggatgcgacgtggcccggcttctgcagcagccccatgacggaaagcgacgtcacggacttgccagaacccgactcgcccacgacggcgagtatctcgcccttctcgatggagaaggtcacgccgtccactgccctcaccacgcccttgcgcgtggggaactcggtcacgaggtcccttacctcgagcatcgccatcggctaccgcctccttgacttgggatcgaccgcatcgcggatgccgtcgcccagaaggttgaacgcgagcacggtgagcgtgatcgcaagacccgggaagaccatggcgtgcggcgcctggaagatgtagttgcgcccacgacccagcatgtcgccccactcggcctgcgggggctgcacgcccaggcccaagaacccaagcgcagccgcgtccaggatggcgctgctgatgcccagggtcgcgcggacgatgatggagggagccacgttgggcagcacgtgccggaagatgatcttcgcgtcggagtcaccaatcacccgcgcggcgctcacgtagtcgttctccttcacggagaggatctggctgcgcacgatgcgcgcgtactccggaatcgagacgaggccgatcgcgacgaccgccttgtcgatgccgcggccgagcgccgccatgaacgtgatggccagaaggagcgacggcaccgcaagcagcacgtccatgcagcgcatgatgacggcgtccaccttgccgcccttgtagccggcaatggcgccaagcgtcacgccaaccaccagggatatcgcgacggagaggagccccacggaaagcgacacctggccgcccacgacgacgcggctcaggatgtcgcgaccctgctggtcgcagccaaaccagtgcgcggcgctcggcggcgcgaacgactggctcaggtcctgcaggtacgggtcgtacggcaggattgccggcacgatcgcggatacgatcgccaaaagcgcgaccacgcctatgaacacgaggctcgccatggcggtggcgttgtgggaaagcgagtaccagacgtcgttccagagcgactcgcccttctcggccttgggacttgcggaagcaacggcctctgccatgcggatcacccctcttccttcgtgtacttgatgcgcgggtccagaaacgcatagacgatgtccactatcaggttgatgatcacgaagatcacgccgatgagcatgacggtgccctgcactatggggaagtcggacttcaggatgctgtccacgatgaacttgccgatgccgggccacgcgaacacggtctccgtgagcatggcgccacccaagaggcttcccagctgcaggccgatcacggtcgtgaccggcagcatcgcgttcctgagcgcatggtgccggtgcacgcggccaggcgtcaggcccttggcgcgggcggtccgcacgtagtcctcgttcagggcgtccagcatgctggagcgcgtcatgcgcgtgatgatggccatggagtacagggagagcgccagcgcgggcaggatgatgtggcgcaccgcgtcgccaaacgcctcgaagtcacccgagaagagcgtgtctatcaggaagaggccggtgcctccaacgggggcaagcagcgggttgatgcgcccgccagacggcagccagtgcaacatgcccgagaacaggatgatcatgagcacgccggaccagaagatcggcatcgatatccccaccagggcaagcagcatgctcgccgcgtccaccggcgtgcccttgtgcacggccgagaccacgcccagcgcgatgccgatgacggaggcgagcacgatggccaccagggccagctcgacggtggccggaaagcggctcatgatctcctgtgccacgggcgtcttcgtgtagtacgagacccccaggtctccgtgcaggaagcctcccaggaagctgaggtactgcctcggcaggggctcgttcaggcccatgctctcgcgccaggcgtgcatctgggccttcgtggcgtgctcgcccagcacgacgggcgccgggtccggcgagaagacgtgcatgaggagaaagacgaccacggagagtcccagcagcacgggaatcgcctgcagcagccgcttcacgacgtatcggaacacgttcttctcctcctttcgcttgtatgcgctttcgcttgcgtgcaaggggcgggccggcgcccgcgccaaggcggtccgccggccccgcgtacacggtcgctatgcagacttggtgcagttcctcaggaacgtgaccgccgtcgggtggaagacgtagcccttcacgcccttcttgtggcacaggatgttgatggagtgggacaccgggatccacacctggttgtcagccgccatcttctcgcactcgtggtacacgtcgtcgcgcgcggtgccgttcggcgtctcaaggcccttcgcgatgagcttcttgtactcgtcgttgctccagcgtgccacgttcatggtcgggtcgtcggcggcaagcaggttcatgaagttgtccgggtcgccgttgtcgccgttccagccgtagaagcacacgtcgtagttgccggcctggaccgtcgtcttgtacgaggtccagtcgtactggtcgatggtcatcttcacgcccaccttgctcaggtagccctggaacgcctcggccagcgcggtgccgcccttgccgttgtacgggcgcgggttggagtacgtgatgcacttgacctcggtgataccgaggtctacgagctccttcttcgcggcgtcggggtcgtaggcggtctgcttcacgtcatcgtcgtacggggccatccacagcggcatgatggagttcgcatacgtcgcgtacttcttgtacaggctctttacgacctcctcgacgtcgatggccttcgcaaacgccttgcgcgcctccggcgtcttgaacttctcggactgcgtgttgaacgccatgtagttgatgttcatgccgtcaaacttgtccacgacgtcgccgttcttggccacctggtcaacgtcggcctcatccacgccgtcgatgatgtccgcctcgccgttcgcaagcgcggtcacgcgcgtagaggactccgcgatgaagcggaacacgatgttcttggccttgcccgcgtgctccttgtcccagtagccgtcaaagcgcttcagcttgatgtcggagttcttggtccagctcacgaagctgtaggggccggtgcccacggggtgctcgttcgccttgcccttctcgatggccttcgggctcacgatgggtgatgccatgcacatggccaggttggcgagaaaagcgctgctcacggctcgcagctttatgaccacggtgtagtcatcgggcgtctcgatgctctcgatgccggtgccgtcggccttcgagccaaaggtgaaggcggcgtacggcatgtcgtcggtgcaatcgggctccagctggcgaccgatggacttcttgacggccgcggcgttgaagtcggcgccatcctggaacttgatgcccttgcgcagcttgaacgtgtaggtcaggccgtcgtcggaaacgtcgtaggacttggccaggccgggctcgacctcacagttcttgtccttgtacttcaggaggttctcgtacacctgcaccatgaccttcgcggactcgccgtcgtcgatgtaggcggggtcaaggccacgcgggtcggcaccctgcgcaaaggtgatggtgaagtcgccggagccgctgcccgagcccgcctcgctcgcgcgcttcgacccacatccaaccatgctcgcaaacgcgctcgacgcggtggccgcggccatcgccttcacgaacatcctgcgcgacatttctgccttagctgtcatgggtacatccttccccttgcggcgccgggggcgcctcggccacgggcggactcaacccgcccttgaagtccagtcttccacacacatgtgacaaccctgtttccaatctgaatattcaacgccgattgtccgtc

SEQ ID NO: 2684 - DNA, 22988 bp, synthetic construct
  misc_feature 1..22988: note = Synthetic
  source 1..22988: mol_type = other DNA
ttgcggctcgataagatctgccggccgacacgtgatgggcttctcgtcaccgatgatcttttggcgcatggcatctgagatgggcgctggggaggcgccgtagcgcccgcgcacatagtctttgatctctttcgggattatttcatatctctttcctgacaggacgttcataagcgcttgggcgcctaccatctgtgaaagaggcgttaccaaaggcgggtagccaaggtcggcgcgcacctttggcacctcggcaagcacctcctcgtacttatcctcgttgtgctgctcagccagctgggagagaagattggacagcatccctcccggcacttggtagatcagggccttcgggtctgtgtctttgaccttgggattgagccttccttccttgcggaacctctctcgcaccttgttaaagtgagcggcaaccttgctgagcgcatcaaggctgaggccggtttggtagccgagccccgtaagggctatgtgcattgactcggtcgcaggctggctggtcccgcttgagaaggaggagatgcaggtgtctattgtgtcggcgcctgcctcgacggcctttaaataggtcatctcagcgatgccggccgtcgcatgcgtatggacctccagcggcagcgacacggctgatttgatgccgctcaccagctgataggctgcctcaggcgtgaggttgcctgccatatccttgatacacaaggagtccgcccccgcatccgccatcttttttgcgagatcaacgaaatactgcaccgtatgcacgggactagtagtgtaacaaattgcacattgacactcgccacctgcctgcttgcaagccctaatcgatgtttttaggtttcgcacatcattaagcgcgtcaaagactctcacgacgtctatgccgttttccactgacttctttaccaccgcagagacgatatcatctgcatagttgcgatatcccagtaagttctggccgcgcagcagcatctgcaacttggtgtgctttacatgggagcgtatggtgcgcaagcgctcccatgggtcttcgttcaaaaaccttaggcaggcatcaaaggtagccccgccccacatctctatggcccggtagccacagccgtccatcgtgtctaagatgggcaccatatcttctatgggcatgcgcgtcgcgatctggctctgctggccgtcgcgcaacacggtctcggtaaaactaattgctctaaaaggcatactctttcagactcccctcttgaagtagccgtggcccacgagccaccacatgcccgcgctgcccctttgcgacgggatgttcgcggaaaagcatagccccctctttttcacttggggcaaaggcggcgcagccactgggcgcaccaaaggcgtgccctactttttttcgtcttttttcacagggaaaagcttggtaagcacaagcgagctaagatagatcagcgtcagcacaacaaagacgccgccccagccaatcacaaggatctcaaacgctttggctagatcttgcggatcaaacatggcagatccctcctttttaggcgcccataagagcaagtacaaggcctccggcgatgaccgaggctatctgccctgccacgttggctccggcagcttgcatgagcagatagttcgacgggtcctcctccgttgccatcctctggacaacacgggcagacatcgggaaggccgatatgccacaggcaccgatcatgggattgatcttgtcgtgacgaaacaagttgaggagcttggcaaacagcacgccgccgatagagtccatcacaaaggcgacaaggccaagccctattacgagcagcgtgtcaacctgcaaaaactctgaggcttgcagtttcaccgcaaccgtaagacccagcaagattgagatcaagttcaccagctcgttttgcgcggtgcgtgagagggcctcgagcacgccgcactcccttaagaggttcccgaacataagaaagcccaccaaaggaagagatgccggggcgatgaggcccgcaacgaaggttatgactatcgggaacaggatctttgcggtctgagaaacctcgcctgcgcgatacaccatctttatctggcgctcctttttggaggtgaccgccttgatggctggaggctggatgatcggcacgagggccatgtacgaatacgcggcgaccataatcgcccccagatacttggagtgcagcgtattggcgacaaaaatggatgtcgggccgtcagcagcccctatgatgccaatcgacgccgcgtcattgagggaaaagcccaaaagcacggccatgattatggtgaagaagatgccgaattgggccgcagcaccaaaaagaagcaggaacggctgcttgagcaaaggaccgaaatctatcatggcccctatgccgatgaagagcaacaacgggaacagctcggtgtcaatgcctgctttgaacagtatcgtaaggggtcccgagtcgcctagaacaccggtgttcggaaagtttaccaaaatagcgccaagccccatggggacgagaagcgtaggctcatatttcttttttattcccaaatacatgagaaggcaaccgatggccatcatgagaatgcgacctggctcagatcccagctgtaaaaaggactccaataggctttccaagcttctcctcctttacgcgatcgtgaacagggggtcgccaggatttaccatgtcgcccttacttacgtgcagggccaccaacgtgcctgaggactcggctacgatttcgttttccattttcatggcttccagtatcagcacaacatcgttttttgccacctttgagccaactgcaacccttatgtcgctgatcttgccaggcataggcgcgagctgagcccccttccccgcaggttctgcctgaggggcggcagaagccgagggctgtgccgcagcgggggcggctggcacagccgcctttggggaagttgctgccgaggtagaaggtggagtttcgacgccaagctcctcgagttccactttatagagcttgccgtcaatgttgactttgaacttacgaagcatgaggtacctcctgtacggattttctgcaagaaacgctacggagcgaaaacgcgctcgaagggcaattctgcgcagcgcaggcagcgacgatagctatcacacggcaagcctcagggttcgccacctcgacgctgcgcacagaaaagctactgctcggacgatcttgtgccgcaatagctacggtaatcgctgcggggatgccccacttatcgcgggtaaggggaacaaaggcgggaataggggcccactcatcctcctcagcagagatccctttttcatccccggccttctctgcaggcttgtttcggccaaagatcctgctgaaaattcccatagctcctttcttcctccttcagaaatcaaaccccgctatagctatgctggcaaatcataaaatcagtccaataattcattgtgttccctctatatgcaacgcaaaaaaatatggtgaagatatttgttcctagccatctacctacttttctattacattagtcttttatcgcatgactaaacggaacttggcataaaggacttctcaacaaacgagactttcgatccaaacggttgaaaaacaatagtaaacggtaaaagccgccttgaagaaaggcttcagaacttttacagcatgattacctgcgtataccatacagtaggaacactttacgtctttcgcttctacgaactcatccaacgagcacacaagtgatagtcttagttgtccaagagacctctgagcctatatttttgtatgcaaacctttattttattcatatgaaagttaaacctcatgtaaggagatcccatgaaagctcagcagacttgacgctatgccaactaaaaggagctccttcgcagcagcgcagatgtattgttcttcgaacctatcttgctcattactcattaagagcttcttcaatgaggcacgagcaaattgaggagttaaggcacgatatggcatctagctcttattcagctttatttcttgcactttatgcattttagaattttcgccccagaatatccaaactgcagcgttttccatccatggaggcgacgtcaggaaggtgtccccagcactcaaatctgttcttcctaaagaggccttggcttgctgcgttgtgagaaaagacaaacccgacaagcgtgtcaataccaaggcgcggcagctcccctatgacatggctaagcgctgcctgccccagcccctgcctatgaaagccattggctatatagatgctaacttcggcagtgtgaaggtatgctgggcgaccgtaaaactcttcgaggcctatccacccgacaatgcggccatctgcatagagcacccagagaggccggcgctttggattataggagttaaaccaagcctgcttagaagcgacactgacgggcttaagatctgcggtagacagacgggtgggtatcgcctcgttgtaaattgctacgatcgaggctaggtcatcttgggttgcgtatgtaaatcctaccttcatcagcacttctttcaagcactttggagcatgcctgatgactgcttaccccatgtgcgtcgatgcagcccggctgtgcgaatatgcctgtatggctgcattggcaaatttagctgtaccctcaccacctacagcgtcgatatttctagtaaacgctccaccagctgcatacatctgaccgagagaaacaaggatctcctgcgtacatgtataatagttctctgtgatatacgattgcaactgcacgacaagcgactgtacctcatccgaggatgggctccgatggcggattgagccgaacttcctgaagatgtccataagtccgcaagctaggcgcccttcgtctgcctttgtcatccctttgtgtctcttttcgaactcttgatatgcctgtgtgccttgccacatagccttggccttggtggcgtaatcatctattttgctgctgtcaaaagcatggaagtccatttccgacactccttttatgcgcatcgcacaagccatgtcaatcatagcctcgatacgatctttcttgagcttaagaagtgctatctgctggtcaagcacctcgtgttcattgaaacccgggctaatcatcatctgcttaatatcgctcaatgaaaatccgacctcgcgaaaaagcaggatttggcacaggcttttcaaatcttcgtcactatagagtcgatatccagaagttgttcttccggatggatgaagcagcccaatcccgtcatagtactgcagcgtacgaatgctcaccccgcatgcctcgcttgcctctttcaccgttctcatcaatccaacctccccatggcagtaaagctaaaccattacgtaacgttatagtcaagggaagaccaggccttcttcttttttggaagagcactctgatatgagatcgtcagatgaaagcgctagcatcgatgcgtaatgcgttaagaggggctacggaaataatgcaaagcgacgcggaccgtcagacccccaagatcactcccactcgatatagaaaagtgtctccattagatactcccctatctcagcttagtcaacgtcttcacagtccatggagtagccggtttgagctttctggctggtactcatatggtactcagggggtttattactcccctatactcaagcaagctgcaaaacctacgtgcaccagctcacttgaacctgcccttgcgcttcgcatgccatttgtcagcgtcgtctagaagcgccctgaccatatccgattcccacaccacattggcggctccgtcgtgctcatcctcgggaaggcgcctgcccgtcatcttcaacgactacatgaacaccctgatgagcgatcccaccaccgccaaggagctgccgctctgtactgcacggtgacgggtgattatgcagcgcacgagtgcgagcaaggtcagccagagatagatgggcaccgacatcaacgcaaacgtgaatggagacgatgccggggtgttaaagcgagatatatgccacaccacttcggaaagccagggaatgattggctgttgctcgcctggatcctcgatccatgcctcgaaggtgcaggtctccgtctcggcaaatccgaagccctggacgctggtctgttggttatagccatcgtgcgatttccatggctgggatggagatggcctcgatggaaagatcgggacgctcgacattgaggagcaaaaagaccgagccttcccatacggcaaatgccacgcagccaatgcctatccgggtgagtgccgtgcgccatgcatccaacgttctcgtgtcaggaccataggacgatagacttctattttctcatgctggatatggcggctatcggcgtacctatgaaacaaattcatttatttatagtacgcgactaaattactacaggcggcgccatagccaaggcatttcttctcatctacacgaagttgaaaggtagtcaaaaaagcttatggacagatgcctgttcgaatgcagcctatgccgcaggaggtgctgtggattccctgatttcaagagagccggcgacctcaagtgacgtggcggcaccatcgctgacgagcatgctgaaggccgcagcccccgcacgctcaaaacccaagcggaaggtggtgagcggcggttggcatacggcgccaagcggatggccgtccatgccggcgacactcacatcctcgggcacgcgtctacctatgctggcaagtccagcgatgacgcccatggccgtctcatcgttgcccgcaaacacggcggtgcagtcagggtcgttggcgagaagccgccccgcctcgtaggcgtcctgcggatcccagccgacctcgattggatctgctaccttgcagccatgagcatgcaaggcgtccagccagcccctcgtccgtccaggaccggcctcacgcgccggcacggcaacatggtggaccgtggaatgaccaagcgaaagcagaagctccgtgacggtgcgcccagcctcataggtggcaatcgagacctgcctgctggccccatcgatccctcctccgcatatcgctacatgggggatagacgctggcagccgggcgagcgcggagatgctcggatcgtcataggcgatggcgatgaccccggctggacgttgggtttcgagctctccggtaagacggccgaacgcctgttcgttgccggcgatgaggatcctgaccgcatagccggcctttgtggcggcacgctcaatgcccgacagggtgcggacaggaccgtagagctccagccccgaggcgacgacgacgaccgagcgtgaggtgccgcgcgagaaggcctgggcgacggcgctcggccgatagccgagacgctgcatggccgccctgatgcattcagccttttcggcggagacgtacggctggtcgttgagatacctcgagacagtcgtcaccgagacggccgcgagcgttgccacgtcgcgaatggtgggaccgcgtccgccgtttcttctggtgccctcggccatcccgccacttccttcttcctatgacagctcgatcaaaacgcagaacgggtcctcacgcgttgcctctgccttcggcgtcacagtgagccgacgcgaggttgaactccaaatgacagagcaggctgagccgtagatgggccgcacgtaactgtacgctgccatggcgtggcttgccatgtcgagctctgcggcatctctcaggccatgctttgcccacacggccacatatgacttgtcgttgcaggagagtcccaaggagatgatcgtgtcattccattgcggcaggcctagcggccaaaagggcacggcgtgtgcgatgtcatatcgtatggtcttgtgcacatctagggcgcgccgcacctcatcgagttgctccttgcccatttcggtgagcttcccggagaggtagagcctcccgatgatgccgttcagcatgacgaatctcgtctcgggcagcgtcatcgacttgttggggtaggcccagttgccacattgctcgggcagcatcatggcaggggcggatgcggcgatgttggcgtattcgcggaagtcctgctggtcgcttgtggactgcagctgtgccacgttgagcagtgccgggtcgcagcgcatggaccccgaggagcacgtctctatcgtgaggccggggtgctggtcgagtacgccggagagccaaccgagataggcgcgggcggcttcgagctggccctggccgcgggccacgccgcccacgtcggtgcccgcacccgagttgacgttgtagtccagcttgaaatactcgatgccgtagccattgacaagccgatcgaccgtctcgtcaagatgcgcccgggcggctgggtgccgaaagtccagcaggtagcgcaggtgggtctggatgcgcttgccgccccgttgcatgaaggcgtcatcgggcagcttggcggccatagggcttttgatgccgatgacctcgggctccagccagatgcccggccgcatgccgcgtgcgcggatgtgatcgatcacctcggaaagaccatttgggaagcgcgacggtgcctcgtgccattcgcccacggaaggccaccagtcgcttgtgtcgtcataccagccgcaatctatgcagtagcactcggctccggccgccgccgctgcatcgatgagcggcagctccttggcagtagtgggatcgcccatcagggtgttcatgtagtcattgaagatgacgggcatgcgctcgtggtcgccgtgcggccgggtggcgcggcgccgatagcgggtcatctcgtcgatggcgccatcgagctcgccgaccgacacggccaccgtggcgttcaccgaggtgaacgactcgcctggcgccagcgtgacgctccagtggtgctcgatgtcggtcgggccgctgagcacgagatagaagccgtccacacgctcgcctatctgccacagccagggccccatggcctcgacctgccaaaacatcgtctcgccgctcgcacggtcgatgagggcgccggcgggcaggacgctgctggtcgagcgactcgtggtcgacgtccgtgtcatcgtggcgccgtagggggtgagcgtgggcgatatctcgccgctcacagagctcgagtcgacgttgagcaggcgcaccagctcatagtcgcgggcgcgctcgcggcgccagcgaccctcggcgagccaatccgagcgggcagaggcgacgtcccaggtctcagcgtcgtttgcccccaggcgcacgtaggcggaaagcgacgtcactgaggcgagcgacacagaagtctcgccgacgttggtaacgatgacgtgcgcgcggatggccgcagctccctcgaaggcttcgagcaccagcgtggccttcagaccgtaggtcttcgagcgcatctcgatctccagcgtcttgcggccgctgtcctccgagacgcggtgggcaacatggcgcaggtcgttgccgacaagggtctcggaatagcgcgagccaaagttctcctgcatgaggccatcggcggttatctggactgcggcctgtggatgctcgaacgtgggtgcactggagtaggggctgccatgtggtgctatgcgcgtgatcgcaggcggcctgtccggaccgtacgttatctccacgtcgaccttatcgttgccccagacgaagctcgtgatgtcgtccatcgagcgctcctctcgttgtacgtcttcctcatatgaaactagttccatactgaagcaacagagaaagactgtagcatggcacgcgtatgctttcggtaagcggcaggctggatgaataacggctggttgtcagtaagggactaaccccataattaaaggattttttagcggctattcaccatgaaagtagtttctcatacgttcctttggcaaattaaaggcgtttagccttagataaatggctcatactttcgagctaacgtaggcgtcttccgaatgggatgacataaaatgataaatcaagatagcaagcaaccatattatattcttgggcttgatccaggaatagcaagctgtggatttgctctcctggatatggccaatcacacgatccctgagatggggtctcatcttttcgatacgccgcaaacagataaaacgaataccagtctcgccgtggttcggaggaatgcacggagcgctcggcgcaacaacgagcgtacgaaaaatcgtcaaaagcattgcctaaatttgctcaagaaatatgaaatcgtgccagagggcgtagacaagcaatggtttcaaacccgtcatggggactgtcccacgttggagttaagggtgcgcggacttgatcatcttctgaccgaccgcgagcttgcacaggtactttactcgctttctggaagacgcggctacattcctcatggcgttggccgcatcgagaacgcaaccaagtctagcgacgaagagggcaaggttcttaaagcagtgcgagagaacaccgatctcatgaaatccaagggttatcggactgtcggcgagatgctttataaaaggaaaaggtctcggaacaaggcaggaaagtacgagctttgcgttttgaatagtcagttggtcgatgaagcacgaactatttttgagaaacagcaatcctgcgggaatgaaaaaattacctcccaactggtagaggaatatatcaaatgcatgaagtgggagaaagaaacgcttgaccaagatgccaaggtctatgcccatattggcaaatgcacttatttcgatgatgaatatcgggctgccaaggcggatctttcctcagaattgtgccgagcctatgaaagacttgggcatctcgtcattgttgatgagtcaggaaaggaacgaaagcttaattcggagcagcggggggagtatctcaggactctcttttcaccagtttcgcaagtgaataacaaggattgcaaagttacgtatagcaatatacggagggatcttaatctctctgagagatcattgtttaaaggagttggtcgggatgatgagaaaaaggaagtgtttgcaccaaaagcttggcgctgtatgcggaagaatggcttgccgtccagtctgttggaacgtatgtggaaggatcgagagcttgctgatgctattggcgaggccttgacgtatgccagtaccgagaaaagtttacgcaaccaactggaatcacttgatctcagtgtacaagaacttaacgctatttgtggtcttccatttgccagtaaagtatttaagggctatgaagcccgcagtctgaaagctcttcagttgttgcttgattcttttgatgatccacaggttatgactcttactgatgcggaacgtgcttccggacttctggatctccgtctcaatcgcaaatccaagcaggagacttttcttgagccttatctcgtttacgatcctacatgtaataatccagttgtacttaggtcaatgggtcgcatgcggagaattatcaatgcaattattaaactctacggcgttccgaatgaaatccatattgagcttgggcgtgagcttaaatactctgcaaaagagaaagacaaaatccgagacaacaataaggataatcgaaagaacaatgaaatctggagtaagacaattagcgagtcgcttggcattgctccagaagaagtgcgtggcaaacttctgcgtaaatatgctctttggaaagagcagggaggcaaggatgtttatactggcgataaaatagaatttgatcgtatgatcagggaagatcattactgtgaaatagatcatatactcccttattcgcgtacctgtgatgatagtaaggcgaataaagtcctcgttcttgcaaagaataatcaggataaagggccgcgaacaccctacgaatggatgacgcaggatgcatccgctccaaactgggatgaatatcgcgcccgcgtgcttgaactggtgaaaaaccccaaaaagcgtcgttacttgcttaataccgatctagccgaaggaaatcatgaagcaaagtttcttgatagaaatctaaatgatacgagatacatgtcccgtgctgtgaaaacttatctagaggagactcttctctttccggaagatgggcggaaacaacatgtcattgctgttgctgggggtgcaaccgctaatctgaggtgggtttggggccttaacacgggaaaaggcaatactaaagaccggagtgacaaccgtcatcatgctgttgatgcggcagtaattgctgcatgtagcgaatcgacggttcagaaggttgctaaggctcgttcgcttggaagagagatgtttaaggttatgagaagaagtcggcttgctgatacacagccttggccgggatttgctgatgaagtgctagctaagagagaatccgtcattcctaccagaatggtcagccatggtgttaccggccgtgttttcgaggatactttgtacagttttgaaggagaggtagatggcaaagaaggttacggcctcttaaaagcaaaaaacaagcaagttaaaaaaggtaacttctgctttgttactgacaagtcagttcatttggttgacggcttagcattccttaggctttggcttgacccgactgcacgcccaaatggaaaggtaaaaggcaaatattatgcagagcctgtttactatgctgatattccatccataaaaaacgggacctatgtgcctcgagcttgtaagattcatgtagcgagaactaaatgggaacctattccggattccgtgttgaaacaaaatcctattgtgctgtatagaggtgatgttttgtctattgatggaaacattgggcgctactgggcctttgatataaataaatgtggcatgaaagtgcatgatcttaagaccaacaaagaacttgtaagctttccaacaattggaaaacttggagttaaatcaaatgtatttattattcaggaggacatccttggacactgttacgcaaatttggaatgaaattaatataaaaatggcttaatatatttaataagaaatagatactaggatgtgtaattaattccttagctgatatagtgctattgccatccaccgtggccaaatagaagtcttggtggccactcaactccccagttgatacaatgttaagaatatatgtaatagtagcaggatggtcttggtggccactcaactccccagttgatacaatgcgatgaagtccgcatctggcggtgtccgtgtcttggtggccactcaactccccagttgatacaatcaggtatcttctgctggctatgcatcaatagtcttggtggccactcaactccccagttgatacaattggggctgcgatacaccgattatggccacagtcttggtggccactcaactccccagttgatacaatctgttgtcgtcttggcgttcttgcgacccagtcttggtggccactcaactccccagttgatacaataagtatcccgtaggtctgcacaatctccgtgtcttggtggccactcaactccccagttgatacaatttggtacgtatggcttgtatgccccatcgtagtcttggtggccactcaactccccagttgatacaataaggcagcacgattgatgtgaccacaagtggtcttggtggccactcaactccccagttgatacaatgtcatcggcaatgagatcacgcgaaagaccgtcttggtggccactcaactccccagttgatacaatcttaggccggggggctccgtacattattgcgtcttggtggccactcaactccccagttgatacaatgatttcccgtctcatcataaataggctgaagtcttggtggccactcaactccccagttgatacaatcaggtatgttctgttccttgggatcaaggagtcttggtggccactcaactccccagttgatacaatgcctgctatgacagctgtgctgccgttatggtcttggtggccactcaactccccagttgatacaatttgtccgcccggttttccatgcgtacataagtcttggtggccactcaactccccagttgatacaattactgtcagccgcgacaacgtgccctataggtcttggtggccactcaactccccagttgatacaatggtggtggagccgtccttgtaccacttgatgtcttggtggccactcaactccccagttgatacaatagcgctgtctgaataacggatgatataatagtcttggtggccactcaactccccagttgatacaatcataatagctagcaacagcaactagccaactgtcttggtggccactcaactccccagttgatacaattttagtcagtgattaggggcaagcccctaagtcttggtggccactcaactccccagttgatacaatttgagagaccacctcaagagcagagatcgggtcttggtggccactcaactccccagttgatacaatataatagctagcaacagcaactagccaagtgtcttggtggccactcaactccccagttgatacaattacacctaatgccgttgttgacacaataatgtcttggtggccactcaactccccagttgatacaatccctcaaccaaagaagcccctctgagcaggggcttctttggttttgtgcgtgtttaaactagtccttggcatggcttaaaccttctaataaactcgtttttccgaaaaaggttcccaaaaaaggatcgcccgccacatccacagaggacgcaacgggttaaccttacgggtaacttcgacaaatcgaaagttcccttgtctaggtgatttgtccactcaactccccagttgatacaactaacacctaaactatagccattatacctccttttgctgaaggtgtgaagccgatgccaaaacgaaccatttgcattcaatcatctgttaaattatccgcacgtgaatctgcccttctaattattcaggatgatagaaaagttcgaattccattcgaggacatatgggtcgtaattctcgaaacgcatcaggcgcaaatcacgacagctgctctttcccagcttgttgacggcggaattggggtcatgctttgtggcgataaccacatgccgaacggtctccttcttccgataggggcacactctcggcacgcttatatcgtcgagaatcaacttgccatgacaaaaccgcttcaaaagcgcttatggcaacgtattgttcaggcaaagatcaaaaaccaagcgacggtactggagctgtgtggcattgattcacgtcctgttgcccgctatgtctcggcagtaaagtccggggacacggataatcgtgagggtgcggcagcatcggcctattttcaaagacttcttttcgaggggaatcgccgcgctggaccttacactgcaccgcttgattatggatatagcgtccttcgtgctgggatcgcacgtgccgctgagtctggaggctggctcgtatcgcgtgggattcatcaccatagcgagcttaatgcctttaatcttgttgatgaccttattgagccatttaggccactaattgaccttattgttgtgaaaagacaacttttaggcgatctcgaccatcgcaagaagcttaaaatcgcatctgttttcgaaatgcttgtatcaatggatggcaaattaatgacatctcagacagcaatcgagcttatgtttgactcgcttaagattgccgtagataacgctgattgttctgcgttacttctaccaactgttacagaattgcaagcattttctgacgaataggggaggacatgagggcaatgaggttgctggttatgtttgatttgccgacagggaattcctctgaacggaaaagctatgcgcgtttcagaaaattcttgataaacgatggctattacatggaacagttcagtgtttactctcgaattctttcctctcgcgaccgaacgcaatcacatcttgatcggttaagggccaacctaccttctgctggggctgttactgccttgcttttgacagagaagcagtacgagaatcgagtagttcttgtggacacaagatgcacgcggtcttacgaacaagtgggtccgcaactgaccatctctttctagctcatgtttgcgttctctgattttaaatacgattttgatgtagcgatgaaaagactttcccgcttcagtagcaaaagggtttctacgactcttatgcctcgtctgatctccagcttgcgttgttcgtgatgagttcgtccaacgtgaccggcatgtagccattgacctcgacgcttgcgttgagcgcgtgttcgtaggtcttgagcaccggccaatacgaggcgggcttgtcattgtgaatgtggccgtagacgagccagcttttacgcgggaaggtcataagcgggtagtggttcatgatgacgggacggttcctgtcaacgatcatgagttcgttgtcgacactttcaaagaaagcttcgaggtcgaagttccgcatccacgacccgtcatggttgccaatgatgagatgtttgtgcccggcgagcttgtcaagatagtccgagaccggtcgcttgctgcgaaacgagaaatcgccgacaatgtagacgtgatcatcgcggtggacgcgtgcgttccagttgtcgatgagtgcatggtccatctcctcgatcgtgtggaagggccgattgcaaagcttgatgatgttggcatggcccaggtgaaggtcgcttgtgtagtagttcgttatccattcactcccaatggtattccatcaaggtaaatcattctgcaataagctattgctagcactcacagctcatctcactcgactgtgcgcgctgtcccgagctggcaagcgagcggaatagggaggagacggcctccgcagagtcggggtcgatcgagtagtagcaccagcgcccctccttgcggcaacggacgaggccgcaggcgcagagcaccttcatgtgatgggaaagcgtcgattgcttgatgccgagcccatcgagcagttcgcaggcgcagacctccccacgctctcctagggaacgcgcaatggcgagacggttctcatcgcccagcgccttaaacacctcaagcatgcggtcatccaccctcatcacacccctctgcgcccatctctttcttgacatagtttatcgcgaaggtcgtgcaggttgtgctcgatggcatcggcgcaggccttataggctgtggccggtccaccggtggggtccgtgagcccccagtcctctcgatggcggcagggaagcgccgggcagctcacgccgcatcccatcgtgataagccaatcgacgctggacagctcccgcagcgcctttggacgcagaccgtgtgtatcgatgttgcggcgggcaagctccgccagggcgccggagtcaacctgggacgcagggtcggtgcctgccgagcacacctccacctcagccggcatcatcgtccgcgccattgcctccgccatttggctgcggcaggcgttgtgcgtgcagacgaatgcgatgacggtcactcgcttttccttggccatggaagttttcctttcattgcacgggaggcgttcaccagcaagacaagcgacggcacctcgatgagcggacctacgaccgccgcgaacgcctcgccggactggagcccgaacgtggcgacggcgacggcgatggcgagctcgaagttgttgcctgccgcagtaaaggccaccgcggcggtccgccggtagtcgaggccgaccgtgcgggcgatcgcgaagcttacgaagaacatcaccacgaagtagatgacgagcggaatcgcgacgcgcacggcgtcaagcggcagctgcacgatctggtgtcccttgagcgagaacatgagcacgatggtggcaagaagcgcgatggatgaaattggagagatgtgtgggagaaagaccccttcgtaccagtcccggccacggatccgctccaacacgacacggctgagcgccccagctgcaaaggggatgccaaggtaaaaaaggacggtgccggccacatcccccatttcgaggctcacgttcaccgtcggcgctccgacgaatgccgtcagacgcgtggcaaacagccatgacatcggtccgtagaggagcacctgcaggatggcgttcaccgcgacgaacccggcgcagtactcggagtcccctcccgcaaggccgttccacacgatgaccatagcgatgcagggtgcgatcccaatgagaatgagccccgtcatgtaatcgggcatgtcgcgcaggaaggtggtggcgaggaagaacatgagcagcggccctatgaccgcacagaagagcaacatcgtcacaagcgcgcgccagtcgcgaaggacccgcggcagctttgcataatcaaccttcgcaagcggtgggtagagcataagcatcatgcaaatcgcgagggggatattggtggtgcccaccgaaatcccattgagtgtatcggcaaggccgggcgccgcggcgccaagggcaatgcctgccgccatggcgagaaagatccacagcgccatgaaccggtccttgatcccgagacggggagcagcgacaagtgacctatccattgcgtatcatcaactttcctgaggcgtcccaggggatggcaacggccttgtcaccggacagctcccgtacccgtgagatccatctcgtctctgcggcagcgcgtgccgagagaacgaggtctgttgtgttggtcatcgagaagcactggtttatcacccaccatccgtgatggatttcagcgcggtcaaggtcggcgacaagtcgcccggcttcccgcaccggcgtatcctccggcagcgtcacgacaacgacttcgctttgagctgagccgcgcaggcgcggtagcagccggacgacgctttcggggacgtcgcctcccgtgtgcgcaatctgcctgccgtagctttgggcgctttcgagcaaaagcaacgtgtggccggtgggtgccgtatcaacgaccacgacctcgtcatctgcccgctcgatgatcctcgcaaaagcgcggaaggtggctatttcctgcgtgcatggcgagcggaggtcttcctccacgtatgcgacgtcgctggcacccatggtctgtctcgctttcgcgagcacctcttccttgtagtttgcgagctcggtcgcctcgttgatgtgcgatacctccagacccgacacgtcaaaggcggagaggtgatcggcggggtccgtcgtcgtgagcctgacacgatcgcccaaggcggcaagcccttttgcgatggccacggcgacgctggtcttgccgacgcctcccttgcccatcgtgagcacgacgcgcaagtacctctcatggagatcagacacaaggtcggtcagcgaggcgagccccgagacgggcgagcttgcctgggccacctcgctggcatcgttcgctgcatcgcctttggataggagcgctcgcaggttcttcgcccccgtgacgtcaaaagcacgcagcgggacggagcgacgctcgacgccagcaagtcctttcggcatgttatccacggcttctcgttgcgaggccgcaatggtgcgcgcagcctcgtccattggccgctcaaggatgccattcacgacgagcattcgcgccaagatgccaaaatcagacagctccgcggcggtgcgcgcagcttccttgagcgcaaggggctggggacgggagacaagcacgagcgccgtacggcctcgctccttgaggacgctcatggcgcgcctgtacgaatcgcgtttgtcgccaaggcctgcgagctgccccaggcacgaggttccggtcgtgtttttgttgaggtaggaggtccaggcgctcggcaactcgagcatgcgaagcgtatgccccgtgggtgccgtatcaaagatcacgttgtcgtagcgccgtgcgatttcgggatctgagagcagcgtggcgaagcgatcaaacgacgcaatctcgacggtgcatgacccagagagctgctcctcgatgtttgcgatggcgtccttaggaagcactccgcgatacggtcccaccacttgctctcggtaggcagccgcggccttgacggggtcgacctcctctgcccaaagattggtcacccctgctacggcagtgggttcgatgcccaccttctggccgaacacatcccctagattcgaagcgggatcagtggtgacaagcaggatgcgtctgccggcgtccgccaatgcaacggccacggcgcacgacacgctggtcttgcccaccccgcctttgccggtgaagaacaggaatttgtacgaggagagctcggccacctcgagccgcctgcttgtgattgttttggttgtctcagtcgtctgcgaatgcatgctagcagcaatccgacccgcagcagcaagagctggaagaggcatcatcgtcggaagcaggttcgcttgggccgcagcagcaggaattggaagacgaatcggcatcggaagctgatacgcttggactgcagcaagagccagcggaggcatccttatcagaatctgctgcgcctgagctgcagcagcttgatgcctcggcctgcttggggagcgtcacgccgagcgtgttcgagaagacctcatttgacgggtacgagcccttggagaggagctttccgtccacgaatgtgagaggcagcgcctttgcgccttcgttgctgagaatggcagcgacctccttgttgtccacaaactcctggggctcttgggagaggctgtgacggctcactttgagaccggccgtcttcaacgcatcaagtaccccggagattcgcagggcctcggggtcgacgctcgggccgcagacgccagtgggacagcacatggctggatcgaataccgttacctcgtgcatggcaggttgcctcctatatattgactaatatcaatctataggataagtatagacattcatcgatgtatgtcaatatgtgctcaatgagactggctgtacctttggcgaaataaacggagctcttttccagccctcgcgacctatccgatgacggcgacggcattgacacagcgaggcgcgccaaggagaaggtttgcgtcagagggccaatatgtcttattggagtcgacggtcacctgcttgccgttgtaagcgtcccatgaacggtcggagtcagcctggtcgagcaggagaagcgagatcggagatatcggcgacgccacgcccgtggtgatatcatagtcaggcatgacgagcgagtcggtattggaatcgtaggaaaacacgcgagtgatctccctgccgccccaggccttcgagctgccgttgttctctgcgggagaacccgcaggctggctgcccccgcagccggctgcgccgaacgcaagcgtggcagtgagcagcgccgccgcagtgaacctggtgcatttcattaagtgttccttcattgttgcccaaccatgactttgtttcaaaatgacagggcgtaggccaatttgtaggaagtgctggatgcagaaacaggccgatttcctcgaatcctttgctcgggcgatgttgataaacatattccaagaatatccaacttggaatgcccaacggattgcctcgtgccggaaattgtccgttccgcgtgatcgtcatccactgttttggggcttctatgactggtactcctgcgttcttgcacattgggcactcgtgacgtgcgcttcactgatttctgcgcaggtgcatgttgaaattggcgatgccatgttgaggtcactcaatcaaggcgatgccgctgccgaggcaagtgcctcgtattcgcaacacgacgtggagtttttcgagcggccatacggcattgcctggtactgcgaattggaggcggcgctccatcgcttgcaagcaaggacggcgacgtagggctactcaatcaagttgcacacaatctgtatggggatgatgtcgaggcccctgtcgcgtatgagccagactctgatgccttcttctctccaatcctcaacgaggcaatgctcatgtcgcacgttcttgccgaaggacagtttgatcagtggctggagagattcttgccacagcttgccgatccggcatgtcgtctcgctcgcgctctcttccagaggccatggccgcctcggtgaggctcgcgggcggattggcggcaacagtatttgccgaaggcgccaaccagcaagaaagccgctatgaggcttgctatgccggcggcgatcctcacgaaccgggagtgcttctcatgtcttgtcgtagttcacgaacccttgctgtctttggtgcaacgtgggacatttgtatcatagagacatataagtctcgcttatacgtctcagcgttttttacatcccagtaagaggctgcggcaaaggtactcgatggaataaccgacagggttaacgatagggtcggcccggcaaagaaaaaagcccaggcacttttacagcctctgagctgttcttttggtcgcggggataggatttgaacctatgaccttcgggttatgagcccgacgagctaccagactactccaccccgcactaagttaggtgcgcccttgagcgcagaaatatacgcgcaagcccactggcggccaacgggtcagggccatgtgcatgcatcttcacaatttgtacggagccagacattttgtacgaaacaacgttatctccgatgtccagaggtcgtctgtactgaccccgaagtgggtggctccgcatccgcaaggagctctgtgcgctcgggatgcttggcgaaccagtgcacggcgtaggagcatgttggcgtggcgcgaagacctgcggcctcgatggcgttggccgcacgcgcaaggagctggccagcgataccctggccccttagcgactcgtcgacgaaggtgtggtcgatctggaccacgccaggtaccgtctcgggaaacgttacctccgcgagtgtcgcgcccgttttgtcgtcgacatagcggatagcgttgtgttcagcgatgaacctcatggggcctcccttcggccat

SEQ ID NO: 2685 - DNA, 20980 bp, synthetic construct
  misc_feature 1..20980: note = Synthetic
  source 1..20980: mol_type = other DNA
aaatcatgatgcgttcgagtagtcgggcacgagcttctgcctgctcccatcggctgaaatctgaacttttgacgcacacgaagcggtcgtagccgtttttcgtcacgatgatcggcgtggggctcgtcgcaaccatctcatcgaacgcggcggtgtcacggaggtctttaataggcacgcacaatgacatggatgttcctttctgacgcatagtaatgtacattattatgtcatactcttcaattcgtttccaccgttagcccgtaaggtgccagaagatgccgcccttaccttgtgggattaatagatgtcttctgcgtcggcgaaatctcgctggttcgtgtgagtaaatgaggcaggggcaagataaacagcttgtcattaagattgcccggacgaggggttatacgagcgactctttatcaagccctgccatatccctgacatatttgatggcttattcgccatgatggcgccgggagtttctcgacttccaagtgtagagaatcattcctgctgccactgccgatacaatgctcagagagataattagcggcagcatttcgtctcctgtcttgcccagcgtagtgcttgtttcgctggtcgaatcgccaggctcattgggactgtcaggctcattgggattgccgggatcactgggattgtcaggattgtcaggatcatcggggtggggccctggctctggccctggttctggaccaggctctggttctggaccaggttctggacctggatctggacttggagcgggatctttactccattgcgcatagagggttatggttgcgtttggatcggtggtcagattggccacttcttggttgttcgaataagtaaccccgctgccatcgggtgcagtgttccaaccggtgaagtggtagccctcatacgtataggcgcactcgaagagcttttgtggttggtcgtagaccatgtcttgcggatccatagcgcccacgccgccgttaggatcaaagatcacctggtagcgatttgccactggatgggcttcgaagagcaccttgccgttgacggtgacgctctgctcttgaagtgttggaccggggcttcccgtctcaggattgacctgccaatcgggggcaatgcctgttgcagtccagctttcaaatgtatagccctcatcaaccgaagcgccaaggtctagttgagatccaataagcacacgctcgatcttgcttacttgctctggctttgcagccgcaggatctttaacccatgccaaagcgtgatcctcagatgctgtttctaccgtgcaataggtaaggactaacatgccgccgctgttagaatcgatgtctatggttgcacctttagtattccacccatcgatagatacgctataggttcctgccggaattccgttggccttgtaggttccacagtcatgcttctcgaacccgccggagagctcgaccccgctttgcgtatctttcagagtgatatcgcgttttggatcatcaaggtcaacaggagtgttgtcgttggtcatgatgatgtagcttgatccgatttcgcccactttcgcatagaggtttgtgggactgatagctcccttgtcatcgatagagcacaggttgataacatgtgcctggtcagcgtagaaagatccaaaggccagagtttcccagcccaaaagaacctgatcggcaggaagcaggcttggctctatgacaggcaagctaaaagcttcgtcaaaggttgcctccacgcttttgagaagcgttgcctcatcggtatccagatacaggtttaccgtatacgtttgtgcttcccactgagcatagagggtgatagtgtctccgtccttagaggagaggttagatacctcttgaagatcatcgtagctagtcccactgccatctggtgctgtgttccagccggtgaaggtgtagccaggaagaacgtattcgcaccacgaaagccgtgcgctctggtcgaaggacatctcctggtcgtccatggtgccacctatttgggtgctggcagatgctggagcgttggcatcgaagtgcaccgagtagttgacgggtttccattgtgcatagagcgtgatggactcaccgtttttggcaagatcttctgtgagggcggcgttgggctcataagcggtgccgctaccatctgctgaggtattccatccggcaaaggtatagccttcgtgcgtgaactggcacgtatccagccgttcgctcgccccggcgagaatggtttgggagtaggcatccccaacgccaccgttggcatcgtagtcaacggtataggcgtcatgttcccattgagcatagagggtcacgactgattccttttcctcggagaggttttgcgagattgccgcttcatcttcaaaagaaaccccgcttccgtccgccttggtgttccagccgacaaaatgatgattcgctcgcttgtaggtgcaggcgctgagcgttgtgctgctgtcgtacaggtcatagcggaactgctgcaagggcatcagatcgcttgggtcggccccgttcggattgaactgaatgtagtaagcgtagggggtccattgtgcataaagggtcaccatggcgccgtcttcggtggcaagatccatgacttcctgtttgtcagtgaagatctcttcgcctgtccactctttggtggtagtccaacctgcgaagtcatagccgttgcgctcgaacagattggggtagagcgtctgactttctccatacacctggtattggacgggcattgatcccttgctatcgtcacaattcggatcgaacgcgatctggtattcgatagatttggcgtgagccgtgaaagctaccgtgttggtcacggtaacctgctgctctgcttgagtgggcacccagctttcgggttgagttccacctgccgtccattcgtcgaagcagaggccctgggcttgccccgtgctgtcaaccgaagcgccaatggtgacgcgccggtcgccgtgaaggtgctctacttcctgcaccttcttaccgtcgcctgcgtcaatccaggcgcttatggaatcgtctggagctgcggcggaaacccgaaccgagtagtagttcaggtgaaccgagccgttgccttggctgtcgaccacgagggtgtcgccttcggtatcccagccgtcgatggaaagagcatactttccttcggggatgccctgtgcggcatacaggccgttgcccagagccttaaacgtcggggtgaacgtcgtgctttccgatgtcagctcaacggcagtcttaccaagatcaacaccctttccatcttgggtgatggagagatatgccatgccgttttcggaaagcacggcattataggtgttgccggagagcgacccgtcttcgtttatggagcagaggttggttgcggttgacccgtagggataaaacgaacccagtccaagaccttcccaacccgtgatgttttcgctgggaaccttgccttcccagctgagcgttaccggttggtcgaatttcgctgcagtggttttcgtttccgtcgtgccgctggcaggatcttccacctgaagggttacctcataatctagcggctcccattgggcatacagcaccagattggtgttgggcccgtaggtatcgccgttgaactcggctttgtcggcgtagctcgtgccctgcccgtcggcggaggtgttccaacccacaaagcgataacccggcagtgaataggcgcatgcatcgagcgtggccgtcctgccgtgggtcgcatcttcgaatgcatcacgccggagacctgggtgctcgcgtcgctgggaacgttggcgtcgtacccatagcgcaccgaataccagctccagacggtatacagcgttaccgggacatctcccgaatatacccaacgaccctcatcgtcggtgtactgcgtgttgttgtaatacacgttgctcaggaattgaccggccgaattgaccaccatggtggtcagcggttggccactcacaggcttttccagactgtatccagaaacccaatgctcgtcgggtatctcgccatgctttgttcggtccagctcgagcgaggtagatcccttatgcgcgaatgcatctctaaggtcagggtcgttttcgcccagatagttggcaatcttgatgttcgagccctttctcaagaccccctcgccgccatagctgacagcgccgctccagtgctcgcctgaatcgctcgccgccgcttccacgccgtcaacggggaagggctgtggggtagtgggatgggcataccagaggtacagcttgccctcttcgtccgtgtagagatcgtttatgccatagcggtaggagtgattgtcatcatgcgaggagtaatagtcggcgacttccgtgatatgcacgccctcacctgcatcttcaagccccacggttgttctatgcgcggttgaaagctcgctggaaccagccccatagcctttgggttcaacggcgcaatcagctcgcaccgatccgcctgtgatggtgatggaaatgttttcatgcttcgtgcgcccaacatgcgtatcaatgtcggcgttgccttgtaatccttcggcaaataaggtgccgcctgtgatggtgacgtcaagctttctatgggagaagacgggcgcgatcacatacgtgctgccgccgatgccgaattctcctcttgcctttacgcgaccaccagagatagagatcctcgcgacgccatcatcgtcacctatcttgtctccgacttgtccgcctatcccgcatccaaccttaccgtctgtattgcctccgatggcttcgacaacgccgcctgaaatggagatatcggtggcaaagccggtacagttgccaccgatgccacagccatctgcgcttccctgcgccgtgacggtgcctccgcttatgtaaatcccccttacccacgtctcgccgccggctccaatgcccgcgccgccggatcctctaggaatgtcgcccgccgttgctttgacggttccacctgtgatgcggatgttctccacattgaaataatcggtgttatttagcccgccgttgccgattcccgccgcaccagagtaattgctagggcctccttgggcggtaaccgtgcccccgttgataaagatgtcgcgcacattgctgccatagccaccgccgatgccagcgccacagcctccgccggtagcctcgattgtgccgccgttgatggtgatgcctttagaggtggcagcccagccaccgccgataccggccgcatagcttcccccttgggctttgaccgtgccgctatcaatcacaatgtttcccgttttacccaattctccaatcacatagggaaccgagccgatgcccgcgctgaagctaaagtcgttcgcgtgtgcggtaatggtgccaggatgatctgggtcctccgttttcagcacgagcttcgtctgggtgtcgggctttcggatgggtggggcgctcagatagctgccgaaatagatgttggcgcctgcctcggataccagctccaccgtgctgttctcgtgctcgacgatatcgatggcagccgagcgcgcgccgatgttggcaagtatgccgggatcgatgttcagcccgtcggcgagcttgagggtgatggtctggccttcgggagctgaaacctcgacgcgcacatgggtgcttttgcccacaaggcgataggtgcctgcttttgtgatgtgcacggtggtgttggcgctggccttggagacatcgacggtgtcgccagggttggggttccagtcatgccaagacgcgccgaggttgagctcttcttgctgctcctgaatggcgatgctggtcatgaaagacgcatcggttatcgcgcgggatacggcggatgatacggaataggccgagtcttctgataaagagacatcaaccgcagaagaagggtcttgcccttcttctgctagggcggatgatggtaagagactgcacagtaagagcgtggctgcaatgaagatggctgccaagagtgcgattctacctgctgtgattgctgctctgaaacggttcaatgttacctgccttcgtcgtgggccgacatccgggctctccagcgagacatgcttgcctgagaaacagaagagtggttatacgtaatcaactatacgggacgagcagctctcgcttatcatccgtttgcaggcaaaaatgggtatgaactttcagatttcatacccattcaactgtttcatttgtgcatggcgcggtatatcgtgctgtaccgtccatgacatgtacgaaaagcgcgaagaagagcgaacagaatggctctagggttgctccaggatggccagcgccttggaatacttgtcaaggcgctttacatctttctcggtgacgtttggcaagcgtgttaggtccgagttgtggcgcaggtcggctgctttcaccttggcggcgatgggattggtcttgatcttgcgtacgtagtcgaggtaatcgacggaagggtcatgtgtgagcagggaaagcgcttcgataacttcggtcggcattccctcatcagcaagggcctcaagcgtccagtcggtgtcctcaacaacgtcgtggagaagcgctgcacaggtctcggcttcagtatccattgattcggcgacatgcaagggatgctcaatgtatggccttcctgctttgtcggtctgtccggcatgggcgtttcgtgctatagacagggcgtatcttgtaagaggtgtttcaatcatcgcatttgcctctcttctatcgaaagcggcgattcggatccttgtgtttctactgggacaaattgtcccagtagatcgttgtcggtcacaagctctcccttcatcggagaaattataggcgtcataccgatgattctagaccgagccagagggggagacactttcttggtcttcgcttccaagaaggcgttgaaaagtacgttcatgattagaattgttgctcgggataacccgaatcaagggttgatttggaagggcggggaatagttgcagatggcttggaaactgaccgattcttgcaaatcagttgtttatagctatcctcgaatcggcgtttgctgtccctgggcaattgtcacaagcgttttgcagttaacgttccgaaattcagtcaaccaccacttgatcagattcttttcaatcatacttccttgaggatgcccttcctaaattgagaccacgagccgaagaatttctcgttggtggcggtggatgtcttgtcagcgtcgaaatcctggaagtgcgcctgtttgtcgaacaggaagtcgacgaggtgcttgcgcatcgcggtcgtgactccctcgaggtcgaggttgccgtgctcctttgtcttgagcgtggtgcacgtgtagcgcaccggtatgtggcggaataagagcctgaacgacgagagaaggcgcccgtcaaccgattcgagttgcgctcatgctcccgccccctctatatatcgcccagatggggatcacctgcacgttccttgtgacgtaggagaacgcatctcccagggagtttttcaggacagtgatcttgccgacctggtgcgcgcccatagcgaacaccaccttgaactgtttcggcatttcctggattgttgcgacgattttgcggtagatatacacgaacgcctcctaacaacatggaggcgttctcgcacgatgattaaattcgctttagcaattccgccttctatttactcgtggttgccctccgtttgatttgggatttcatttcccttcatagtgtgaatttctcaatttcaacatactgtatactcataaagcaacagttcttcattttgcctattttgtcgagaacaaggctgcgaaaagcagggaacgtctgccaaacgcatgtgctcgacgggaaggtgatccgcgtctacccaagtatcaaaagacctagcgaaggctgacaataaggtaatattcggtaagtttgcacttgtatcacatgcttcacttgcgacaatttctttctcacggaaaggagagcgtcatgagaaaaaagccatacttcgttcttggtcttgatccgggtattgcaagctgcggatttgctctgattgatatagaaaatcacgagattctggaaatgggatcccatctctttgacgctcctcaggaaagcaagagtaaagaaagtcttactgtaggcagacgaaaagctcgcagtgcgcgaagaaacctaagacgcaccaagaatcgtcagaagcattgtcttaacttgctgaaatcaagcggcttggtaccgaaggaagcgacaaaggaatggatgcagtcaagaaaaggagacaagccaattattgaattgcgtgtcgacggtcttgacagggtattgtccgacagggagtttgctcaggttctctactctctttcaggtcgaagaggctattttccaaacggcgaaggcgatggaaaggatgctcgcgacgattcgggtgaggttttggctgctcttgctcgaaacgatgaagacctgaaggcatcaggctgtaggaccatcggggaattcctgtcaacgaaagaaagaagcaggaacagagctggcgcctacgagaattgcgttcgcaacacccaaattatttctgaggtaaagacgatcttcgcgacgcagcgtgccaagggcaaccacaaggcttcagaggaacttgagaaggcatatctgaaaaatattacttggcgcgcatttaactctgagtatgatgaattggtttatggtcgcgtcggtatgtgctcctatttcaaaaacgagaagcgtgcggcgaaagccgatttgtcgttcgagttgtgcagggcttatgaaagatttggtcatatagctatggtcgatgcggatggcgaagagtcttttctgacgaccgaccagattaacgactatatccgcaggctgttctcgacgaaacccaaatcggtaaagtactcgacaatcagaaaagacctcgatcttccagccaccatgtactttaagggtgtcgaaaaagaacaggagaataaaactcatgtttcagagccaaaggtttggaataagctaacaaaacatctcccggaatcactcctgcttagaatgcttactgaccgcagttttgctgacgatattcttgaaagtgtaacctttgctagttccaaagagagcctcgaaaaacgccttgaagacatcgatcttgacgaagatgagctggatgctgtgctttgccttccttataccagcaagttgtttaagggctacggagagagaagtcgtaaggcgctcgacctgttgcttgaggtgtttggcgaacaggatgtacgtacgctgaccgatgcagaaaaagcatcgggactgctggctttccgcttgagcaagaattgtaatgaacgtacaactcttttgcctccctacggtgcttatgatcccatctgtacaaatccagtggtgctgcgggccatgggtagaatgcggcgaatagttaacgccatcatcaaaatctatggtgttcctcatgaaattcatatcgaagtcgggcgcgagcttaaacagtcaaaacatgaaaaggatttgataaataaacgcaatcggcaaaatcagcagaacaatgatgcctgggcaaaaacgattgccagtatacgagaatgcgatgtggatgaagttacagggaaggatcttctaaagtatgcacttcgtgaacagcagaatcaaaaggatgcctataccggagcacccatcaatttagaacgaatgattcttgagagcaactattgtgaaattgaccacattctgccgtattcccgaacatgcgaagacggtagagacaacaaagtgttggttctgggatcaaccaatcaaaataaacgagagcgaacgccctacgaatggatgacgcaagatgcgagtttgggcgcgcccgattgggaggaatacaaagcgagagttgttgccaacgagaagtattctcgtcgaaagcgtgagagtttgctcaatacgtcacttggcgccgatgacgaagcgaaattccttagtcgaaatcttaacgatacacgttatatgtcaatcgccatcaaaaactacttggatgatacgctcgtttttccagataacggcaagaaacttcacgtattcgctgtcagtggaaaggcaacgagcactcttcgctatagctggggattgaatatgggtaagggattaacgaaagacagaaccgacgacaggcatcatgctgtcgacgcgtgcgttatcgccgcatgctcgctaagcactattaaaagaatcgcagaagcacattcacaaggaaagaaatcttttgaacaaacacgcgagagccggcttgccagcacgcaaccgtgggagacctttgctgaagaagtcattgcgcggcgtgagaccgttgtgccgacgcgtttcgtgaatcacggcgtaacgggtcgagcgttcgaagaaaccaactatcgatttgatggctttaccgacgatacgaagaagcttgcattgttatacggaagcggtaaagaaactaaaaaagggaatatctttcttggtaaagaaggcaacgcgcacattgtagatggaatggctttcttacgactttggcttgatcccgacgcgaacaacggcaagggaaagtggtatgcagaccctgtatattacgcagacattccattgttgaggaacgggtcgtatgttccacgcgccttaaaggctcatatcgcgcgcattaattgcaaacctgttcccttggaggctcaaaggcttgctcctctggttcttttcaggggtgatgttattgaagtgaacggagcaagagcaaggttcgaggggatcaatattaacaatgttagccttaaaatgagttcgcttcttcctgatgaccgatggagcaatattccgacctttggaaagtggaacaaaaacacccgcgttcggatcatccaagaagactgtcttggccattgttacagggactggttgcgtacgaaccagtcagaaagctaaggtcatttgagcaccgagatttgcggtctgtttatcaacatgctttttgacgagaatcctgcggttttcgtattgcttctcggtcaattcaaggacaaacacggaaccagcggcgggcaagctggcattgagcctttctaaatgcgtgtttaagctctcccgagagagaagaacacgtgagtagacgctgaactgctccatttggtatccatcatctataagaaatttgcgaaatgcggaatacgatttgcgctcttctttacttcccgtgggcaaatcaaacattatcagaagtctcatcggtctaataataggctcctattcgaaattagcggtagaaagaggtatggttgcagggagtttaagaagagatgcatctttctcgacaaccgctgccctcaaagagttcaactcaagctcaatggaatattgaatagatacttttttgctgtcgacctcgacgagtgtctcgaagatggaagcaagctgaaccttggcttcaggagtaagattgccgacaaggtctttttcaagaacaagcaaatcaaccattggccgaaagggctctatgaggtcatctatgaggttgaaggcgttcagattgttgtcatggtgaatgcctcgggatacaagccacccatgagctactgcttctcttccgattccggctcgtagaacggcatagccgtagtcgagcgcagcagaaaaggggccatcgcggcgcgttccttgttcaatcagatgcctgaaatacacagatgccgctacgctttctcgatttgttttgtctcctgattgcaccgcttgcgcaaagcgctgaagagctgagctgtctttgcctcgcagctctaggactttggcttggtttttgattttctgtataactatgcgctgccagagcctcttttttaaaggaaggctcatggcaagctgttggtcaacgatggctgcatgtcgagagtgggcacccagggggaggagaagaccgttaggcaagtggttggatccgcaagtcatcgtgccgatacctgcagttgcgaggtgggagagtgctgctgacgtgatacggacttgaggagtttccagtataaggacccagatatcttcgaggggaatctctgcaatggtttcgttatcctgctcgacgcagagcgcagaatgtcgcactgataacttggacggagattgaatgcagatggtgcgtcttgccacagaatgcctcctttcagccagggcaaatgtgataaaatgaatagagtctacccaaagtataccaactggggaaatggttgccgacgaagacattgttaagtgcgtcaacatacgctttattattataccaactggggaaatggttgccgacgaagacctaggctggatatttgcgccgctattttcgattataccaactggggaaatggttgccgacgcagagcataaggcacttgttctttacctcatttgtaatttgtagttaattgctagctggacgaattcgattttgggatgctctttcagcatccgttcaagcagactgggactgctgttgaacgagatgtcgacgtgcttagccttgccaaattcctttcatctcctgagatggtcgaatagataggacttctgcacgccgccgccctttccatccaagccgtcgtagagaactgtctgaacgttgtggagcaggtaatagtcaacgtattccacacccagctttgcaagctgctcggcgaagattgcctcgaccttgtcctcctcaggcaccatgaaggtggagtactttgtggcaagcaggaacttatctcttgggtgatgctccacaaccgctttcctcacagcgttttcgctttcgcccttgtggtagacgtagttggtgtcgaaatagttgtatccggcgtccatgaaagcgtcgaccatagagttgagcgccttgtgcttctcagcgattactatggattgatgctagacgagctcgtctatgatcttgatgtgttgaggggctgtcattgagtcagcccctcaacacatcctccatcaaggcgtaccttgcagcgttgatatagtggtgaaaagacttaaacgtctctttcttcgtaggcgtattccacggtatttgcaagaaaccgagttgctccttcgcttgccgctgagtcgtagtacttaacgaatcggggatcttgtagatatcccttcaccagtccaaggtatgcttcaagcagataaccctctccccagtggatcgttatccatttcttgtgcatccgagccagctctttggcttcgtcactctttggatttccagttgccatggcgatgcgcagctgcaccttgatggcctcttccaaaagctctttggcgtcccactcttccttggtgaagtttgccatacgctcattcgccgcatctatcgcaggagatcccctggcgcgcaattcaacacatcgcaaattgccgcaagcatagaaaggcgaacggaagagactttgccgctcgcgattgaggtcatcgtcctcgcttggcgcaagcggatcgtaggagaaatcagccacgtatcagtcgtggaatccctctgcgcggtcgtgcagcttcgccacgtcatccgagttgttgagagcaatccaatccgaagtcatttcataccttcaaagttactgggtcaaattgtgccagttggtctgaactggtaattctttctaaatcgtgtttttaaaacaagcaatcctcgatgacttccttcccccgaagctgtccgatccactcttcggggattgcgtcatatccgtatgccgctcctgctagtgccccagcgacgcaacctgtcgtgtctgagtcatcgcctaggtttacagcagccagtacgcagtccttaaagttatcagtatgcagaaggcaccacagtgaggcagcaagggtgtccaaaacgaagccaccggagcgaatctcatgtcgaggcatgctctcaagctcactcaagaaggcgaacttcttgcttcgcggcgtgttcgcgtttatggcatccatagggtcttccccgaaggcgagatcgtccaatatcctgactagcgcgacgcatgactccgtggatatccaatgcgcatgtgttatggcggagacggcgcgaacgtcatcgtcagatgttgccatgaaggccagtggggcgatcctcatgagcgatccgttaccgttagaatgttcgccatcgcagccacgcctttgctccagcgcggttgccgtggcatttcccacatcgaagactacgccatcggccgtgtacacgcccgagtagagccagtcgcgaaagcggctgcgcatgtcctctacgtcaatcttgcccttatccttgatgcttgcgcaggtagctagaagaagtgatgtgtcgtccgagaacgtgcctgccgggcgtttgtgcgcgccgcctccgaccattcccgtgcactcgaaagagtcgcgacccatgaactcgtatgggactccgagagcgtcgcctacagcagcaccgtagaccacgcccttcagcgatccttctctattcaggaaatgatcagtctgaatggcaatattctcgccgaacctgcacccgcagtccctgcattcccaatccctggagtcttcagagatgcagcatccgccgagcacgatgcgcccctcttccagatcgcgctctagctcttctgtaaaagctggcatgccccaaagaatccttgcgatccttttgcttccacattttggacattcaaggtcatttttcattcacagcctccatttcataggctcgatagccctattcgttccagtgcggcagcctctgcttgaagtgctctggaacatcgattatcgggagcgtgtcccagtccctatcatcgccatcaaccatggcgcccttgagctccttgacgctgactcgtcaaggagctctacgaaaagttcttcagccaggctttcaaggcgacatcggagaagatgggcatcgtctacacaccaaacgaagtcgtgaactgcattctttatgccacaaatcgtttgtttcaaaaggcattcggacagcaattacgtgatcccggagtatacattctcgacccctttacaggaacgggcaccttcatcgttaatccgctccaagacgaggagttaatgccgacagataagttgcccgtgaagtataagagtgaaatatggtgtaacgagatcctactgcttgcatactacattgtaaccatcaatatcgagtattcttaccacgctctctttcacgagaaagcacacatgggaaaacatcagcgcgaacgaagaatgatggcggcccagagcttaacaaagaggatattttctattgcatatatggtattctgcactcgccagaataccgctagagattcaaagccaatctgaaagaagaattaccacgaatttctttagcggaaaacttccgcgccttgtaaccgttgctatggaggcacaaagcatagtcaaccttttaccacctctgaatgaaatcaagcaacccacggacttgacgtttacctggagaccagacgattaaataccgagactaagcagagtccaccaactaagatcggaataaaagaatgataaagaatgttagtgacccatcgattgcgaatatcctttcaactgacgcatcgaagatatataacatccctaggtatcaaagagagtacacatggggtcaacgggattgggctaacctcttcgacgatgtttttgataacgaccccggctactttctgggttcgattatcgttattcaaggggaaattgaccctaagaccaatgtgattgaatttgaggtaatcgacggacagcagcgactgacaaccgtcagccttcttctttgtgctctatatgcaaggattaacgagcaccccgacgctatagacgaagacataagctctgatgatgtaaggccgcttcgaaataggatgattctcaaggccaataaggacacaagccgtgttgtgcctcaagtacagaaccataaccttgaggactatagatggactttgaaggaacgagtcggccttgaggtcgtcatgcagaagccaaaatactatggcgtgagaaagattgcgaaggcatttgactatttctacgataggctgggcgaagaagtcgaaggaatgaatgatgagcagtctgtgcagaagctcttggagatgagccgactcctctgctcagcggtactagttcagatcagcgtagacagtcatgcagatgcctacacgctattcgcatccctcaacaatcgaggtgtgccgctatcggcagtagatcttatcaagaacacactgctcgctaaagtagcggacgctgatgaaaacgaactcgattattacttcgatcaatggcaggagatgcttcgtaatctgggcgacgattacacgactcaggaaaggttcttccgtcaaaactacgatgccttcagaagggcagtcaacaagcctttcattcaagagggtggtgcacaactgccgctcggatctgtagcaactcgttccaacctgctcaagatctacgagcaccgcattggacaagaggatggtgcattgagcgtactggatgagcttattgaaaactctaccatctattctcaaataattggcgttaatcgtgaaggcatggacaaggaactcgaagcgaagctcaccgagcttgccagagcgcaaggcgttccgtcatacctgcttttgctgcatcttatgaaaagaagctcagaactggaaatagatgatcacatgctcgcacgaatcgtagagctgcttacgctcttcttcgtgcgaagaaacataacggacacaccgccgactcgcgatcttgagcgcctattcataagcatttgcgaagggattgaagatgacgcgctgaaaggtatcgaagccgctaggtacatcagggagcgcttggtagacatttctgctagtgatgaagcgttcagagaacggctcgctggtccgatctacgatgtcaatccagatatgactcgattcatccttactgttcttgcagagcctagcgtaactaaagaaatgaaaggactctgggaacgctacccctcaggcaattatgtttggacaatagaacatgtattccctcaaggtgaaaacatacctgcagattgggtagagatgatcggaggaggagaccgtaccgaggcgcagaatatccaagcggaactcgtgcatacattagggaacctcacaatctccggctacaactccaaactaagcaatatgtctttcatagagaagcgagacagaaaagattccaacggattcaacgtgggctatcgaaatggcctgaacctcaatgatgacctggtttccgtgaataaatggactcgcaagcagataaaagaccgcacaatcaagctgatcaatcaagctttggatgttttcaccttcaataatgtcgaattctaagagcttccatccgttcaaccaagtaattcactagaaatggaaaaagggtgtcctcgcatgggacacccacagaatcgttagctcgcgtttcatgctatagccagggcgtatcttgtaagaggtgtttcaatcatcgtatttgcctctcttctatcgaaagcggcgattaggatccttgtgtttctaccgggacaaattgtcccagtagatcgttggtggtcacaagctctccctttatcggagcaattataggcgtcgtaccgatgattctagatcgaatcagacggctcacgaacttgggtaaccgttcgaaacggaacgattcagaacggcggcagcaacaatccgccgcgcgactgggatgacagtacaggtctcggaaacaatccttttaaggaggggtaggaatgagagtaacttcatacgcagcgttcgttgcgatgtatcaagcgctcgaagctgccaacgatgaaatgaaggacgagagtttgaggaggtacctctcagatgcaaatccgtttttgttcaaagacaaaggctcggcagatccagcgatctatattgagttcgagcagatgttcaataaaaggtttgcggacggtaccgacccgaaaggtgcgctgtctgtcgtaaaggactatttgagagagcagaatggcggcgtgcttgccgtcgcgttcgactccgtagtcaattccgccaactgggaaaagcattgagttcctaagaaagccgctgtggattggcaatccctatatgtacacttccgtcagagcctcagcccgtgcgcagactggtttcccacgaaagcggtgcacaggttgaacagctcctgtttgcccagtgcatctgtcgcgtccttgtcagcctcgcttacggctccccatacattggtctcttcgccttccggctcggactcaagcacggaaaggcctttatcggcgagcttgacgatatgctctggaatctcgcggttgcccgactccctggcgattattccctatgccatgagtagggatagtggctcaaatagcactgatggcggaaagtcatctcgtttacgttcagtccgggaataacgtgcttttcaaactggaccattcctggatagtgcgtttcgccgccacttcctctcaagcaatcaacatgcgcgctctcgccttacccccacagccccatgttcggcatcgcgtatagcgggacgttcctcatccagtcctgctcgcgatagccggaaaggctgaagcgcacggacttgatctccggatgggattccttgaacgatcggaggctcttggcgcgcaggttctcctccgccttcacctcgatggcgtagacgttgttcgacttctgcaccaaaaagtcgatctcgcccgaggagttctctgccgaccagtagtacggcacaagcccgcaatcggatacgagctgctggcagacgtacggctcggtgagggagcccttgaactcctcgaagatctcattgccgccgacaaccgtctccttgtcgagccccgccatcgcgcccagcaggccgacatccaacaggaagagcttgaacgccgtgtcgtcggcgtagggcgccagcgggatgccgggcttggagatcctgcggacgagcgtcgtggcccccgcctgcgtgagccacgtgatgcccgtctggtagttcctcgcccgagcgccctgcgcgatgtggctgaagacgaacttcttgttctcgtgacccagatgagtcgggatcgacctccatgctgccagcgcgtactcggtcttggtcctgccgagatgcttggagatgtcacgctcgtagccgcgcaggatctagagttgaatctcccgcgcgtcctcaaggagacctcgctcgagaaaggcgctcaccgcctctggcatcccacctacgtaatagtactgacgaagaagcgatccggccgcagccaccgcgtatccgggcgcgttctcgcagaagtacttgagggaggtgagcgccttcgggcacgcctggatctcgtcgaggacgatgagggtagtgttctcggacacaacctggcccgtctcgaatcggatggtcgagacgatgcgcgggatgtcgtagcccagctcgaattgctcgcgcatcctggggttgtcgtcgaggttcacgtacgcgacgttctcgaactgcgtcctgccgaactccttgagcagccagtcttgcccacctggcgcgcgccgttgaggatgagcggcttgcgacggggcctgtccttccaggcgacgagatcatccatgaggaatcgttccatgcaagctcctccccaaaaatggttacggccttatttgcgcacaaagtggcaaaaataaggccgtaataaagccaagtttggagaaaatcaggtggaatttattcccactctatagttaaatccagtctctggttctctccagtttgccggaatgacacccattatcaaaaaagcagtgaaatcactaggtcaaacttgggtcacggcttttcgggttactcgggtcattttactgggtcacgttgggtcatgcactgatcgctgtgggaaattcgctactcgatggcacgagaacgtccggcggcgctagtacttaagctcgtcgaactccttccgagttatgggcttcaggaacgcgcgaaccgcttcgttggcgcagttcgccttcaggccctccaggatcccgacgtagacgacgtttatcgcgtacttgtctcccgtaaggtagaggttctcgatgaatgcgcccgcccttgcgagaaatccctcatcgccgtcttcgatcgcgcgctcgatgcgagggaggaagagatcctcgtacgtcaggaaagccccggtgtccatgccgtcctgccatgacacgtatttctcgaactcctgcttgagttcggggaatacggcaagcagcgattcgttcatctgcttctcgtcaatcttaagtacctccaagtgcatctttaaggtcttctctcagtctctgcagcaatgccctatcgggatggtctgggttcctagcgaggattctctcaatctggtgaatgcgttcgcaccccttctgtgtgtggtcttttccgccaaccatctcgccggtacgcagctgttcgcggatcgcatcggccgccccgccatcacttgtttcggcattcggtctgtaaagttgccccacgattctccgtgcttcatcggtgacggcctcgcccagtaaccgttcgcgtacgcttcggtctcccggcatcgatgacgcattcgtcttttcgagtattctaccgccacctatgcccgtttttgggttgccaccaacagctcctaatgttcccgggaacagcccgccgctgctatggccgctcactacgcaccactttcgttgcggtgggagagcttcccgcggcccttgcctgggtagaccttgatgaggatgcccttggagatcgggtatgtccagtgagccggcgtatctcgcgccttccaacatccaggcgtggaacacgtctcgggcgtgatggggaggttttgcgcgacgacttgccggttatgacgaagcgggaggcggcggatgcgaagatg

SEQ ID NO: 2686 - DNA, 20735 bp, synthetic construct
  misc_feature 1..20735: note = Synthetic
  source 1..20735: mol_type = other DNA
tccaggagcttcgagtcgtgttcggggtcggccgcctcgaccattcggcggatggcgtccagcccgtcgaggtccctcctcatgtcctcgcgccagcgcacccagtccatgtccgcgagctcgatccgggcgtccccgcccgtcgtgaaggcgtctgagccctcgtcatccaagtccaggtccagcgtggcgctagtggccactcgggccgtcgacggcgacttctcgtactcgtcgaccagtaagaccttgtcctggacggcggagcggaccttctcgagcgtcttgcggaaggagttgaccgagctctccagtcgcttgaggaggtttgtggccatgagccgccggatgccccactcgcgaccggcggaggtcaggccgacttcctcgtatttcgcttgcttcgagggctggatgtaggcggacggcacgtaggacgccagcacgagcctgtccagggcctccgcgatctcgtggaacggggcgacctcgggcgagtccgagagctgcgggcgcagcgagagcggctccatgcggctcgggaaggggccgatcgccgacatgtcgtagtagcgctggatctgcttacggctgcgcgcgaccgtcacctggtcgagcagcttgaagaagtccgggtcgagcatgtccatgagcgcttctgtggtgcgcgattccggctccagcttggaccaggagccgtagaccgcctgcgcgttgcggaagacggtcttgacgtcgttcttgagcccgagggcgtccttccagtccacgtcgctgcggcggtaggccagctcgagctggttctggaggtcgcggaagcggttgttgacgggcgtcgcggagagcatgagcacgcgggtctgcgggcccttgccgatgaccttgttgagcagcctttggtagcgattctcgcggtcgtcgttctttgccgcgttgtcgccgccgtttcggaagttgtggctctcgtcgatgacgacgaggtcgtagttctcccagttgagcttggagaggtcgatgcccgtctcggttatcccacgctcgcgcgagaggtccgtgtggtagaggacgtcgtatcgcaggtagtcgtcggcgacgggattgttcacggtattgctgcggtaggtcatccagttgtcgcgaagcttcttggggcacaggacgaggacgcggttgcgtcggcactcgtagtatttgatcacggagagcgccgtgaacgtctttcccaggccgaccgagtcggcgagaatgcagccgttgtacttctcgagcttgctgatgatggcgagcgccgcgtcgcgctggaagtcgtagagcagcccccatatcttggagtccttgaagccagcggcctcgcgcggcaggcagtcctcgtccacattgtcgaggaactcgcgaaagatctggttgagggcgctgtagtagacgagctccggggggttctcggagtacatgtcctcgacggactcgacgactcgctcggtcacgtcctccacggcgccttggtcattccaggcctggtcgaagagccgcagcagctccgcggagacggcggcctcgctgcgaacgatgaaggtgaactgcgacgagccgggcgtggcgccgatggcgggtgccgtgaggccgtcgaacggggcgtaggcgtaggagccttcgccgttcctgaccgccatgaaggactgcatcgggccctgattggggccaagggagcggaactcggctttcccgcgaatccagtcggcgcactcgcgcgcgacggccctctgcgtcatctcgttgcggagctttatctccaggtcggttccgtagacgccccgctccctgcccaggcgggggatgtagaactctcgggccgccttgtcctggccctccttgaggaaggtgggctcggtgtagaggaagcggagggactcgcacccctcgagctggtccttgagctcgcgatagccgtagatcgagaagcaggctgcggcaatggatatcctgtcgccggagcggagccgcgcgaccaggtcgtccttgagaatcctcgccttgttgtcgaagaagttgggctccattgcctttctggcctccgtcgcatgcatggtctacgtagccacatttgatgatacgacggagagcgtcgacctcgtggcccgaggcccggcctcgtcggtcgacgaaacgctgcgttagtcaagcgggtgcgggaccccggggcaccatagagactcctccacagaatctcccgccgggaaattcctcccatttctccacccaaaaggtcgagacaaaaaataagcaggtcaaccaaattccttggctggcctgcgaaagtttatggtcgcgggggcaggatttgaacctacgaccttcgggttatgagcccgacgagctaccagactgctccaccccgcaatgcggtgcgcttcgttgcgcaagtagtgactatacacactgcccctacctccgtcaacaatgtgaagacaactccacaattgacccagagaggtccgcacgcagggcccagcgccacgctaaaagcgggcgaagagcttatctgagccagcaacttgctcaaagccgaagccttgatagaagcccctagcttcatcaagagggtcaaccacgagagcccgtgcgccaatcgtctccgccgacaatctggcacgatgatacgcatcaagaagcaactgctttccgagcccttctcgcctgtggtcgacgcttacccccaacatcccaagcagaatcgttggaacttgctcgggagaattgcgggcaagccagcccgagattgaccccctgtcaatcgagtgagcagagagcgtgtagaagccggcaagacggccaacctcatcaaaagagacgtatacgacggcggtgccacgcttgaacgaacttctcgcatgcttggaaagccacccgtcaatggccggaaccccacaggtaaacccttccatgcaatccgagtcggccagccttcggggcacggagaagctcattgctcctcccaaatggtcttctggctgacaaaatccctgagcgtcgggttcatgggcgcatcgagcgcatcaacaaaggcgtcaaagtcctctggcgcaagaaccgtgtggttattacgggcaatcgtgtctcgcgcgcacgagagcagattctctatgacccactgggacacgctaatcccgctgatggaggccgcaagctcgacctcctccttttgggcactcgtcattctcaggtcaatgcgcgcattcttcttttgcgctgcggcaagggttgccatgatgcgctccaatcatatttgtacggcaattttccgtacattttagcagagcaatggcattcggccgggcaaggacctggggtcaggccttcgcctccccggcttccccctcgtcctccaccgcatcctcctcggcggccgccggtgcccactcgcccgccagcacctgggcccacgcggcaaggatctcctcgcgctgcttgacggccaccgcggcatcggtctgcgcgacctcaaggtcgtcgtccgcaggcacgtcatctccgcccgcgacctgcacgtcatcggcaaccggccttgccagcgcgtcagccacaacctgctgcccgtcatgcccggcgagaaactccacgaaggcctcagcctgccgctcgttgaggcaaccctcgaccgcgcccgcgcaggcgtcggccacgcccacggcagactcgggccaggccacagtggtctggccggtccttctcgccagctgacgcgcgcgctgctcgctgaccagcgcgacgtcggcgttcccgtcaagaagcgcccgcaccgcggcgtcctcgtccgcgcagaccacggctccctcggcaagaagctcctgcacaaacgcccaggagacgtcgtctcccaacgtaccgccggcagacgttcccgacgcctcggagagcatggcaaccagatgcagccagccagcctcgcaggacgtggggtcgcacagcgccacgcggcccgcaagcgtcgtagccagaaggtcggcataggcggccggcgtgcccttcttgccgtcggcaaggccctcggccagcgcaaacgcgccgacctcgcgctggacggactcgagccccgaagacgccccatctacgcccgcgtaccagagcgcctctccgccccaaatgacgtccgccgcaggcttgcccgccacgtccccgtcaagcagctgccccacgagctcggcctcgctgccgcgcaccacggcaaccgtcacgcccgcgtcctgcgagaagcgcgccaccacgtcgtttaccagctcctccgggcagctggtgtagagcgagagcttgccgccgagcttggcggcgccgttctcggaggcctcggccccggccgtgggctcaaccggcacgtcggccgcgccgcggctgcagcgggtcacgcccacgacaacgcccgcgccggccaccaccagcgcggccccaccggcaacgagcgtccttctggtcagcttgacctcggagagcctgggcagccccgacggcttgggcaggctcacgcgcactcaccctcaagctcggccagaatctgggccatgacctgctgcgcgccgtgcttccggttgctgggaatgacgcgctgcgcgatctgcttgacgccgtagcgggcgttgtccatgacgtaggggtgccccacgtagcgcagcatggcgtaatcattcattgaatcgccaaaggcaacgacgtcctggtggtcaatgccgtagtacctaagaatatgctccaggcccgtggccttgctcacgtgacgcggggtgacgtcgatccactgggagccgctgggcaggaaggtgaagcagtcggagagctcgcgctccaggacaaaggccatgtccatgatctgctcgggcttctcgcagcagattccaaccttgatgatgctcacgtcgggcgagggcaggtcgtagacgcgcacggcgtccgggagatccttgtccagctcgcgcacgtaggcggactggtcgtccagcaggtaggtgtgggcctcgtcgtagacggccatgtgcaggcagtcgaacatgctggagacctggtagagccgctgcagcgccgtcgtggagaagacctcgcggtcaagcagcacgccgtccgcgtagacctgcgtgcccatggaggccacgaagtccatctggtccgccaccggctcgaaaaagcggcgcagggtcttgtacctgcggccggagctggcggcgaacaccacgccgtgctcacgcaggcgcttgaccaggtcaaacgtctctggtggcacctgggagttctcgtcgagcagggtgccgtccatgtcggtggcaatgagtctgatcacgggctgctactccttcatgaagtccggcgtgccgcccgtcacggcggcgacggcaatctcaaacagcgcgtcggccacgccctcctcggcgctggcacccacgtgccagcgggcggcctcggcaacctcgggaatggcgtttgccacggcaacggagttgggcacggcgccaaagagctccaggtcattggccgcgtctccaaagaccagcacctcgtcgggcgtaatgtccagctcgtccaggaggatgggcaggctcgcggccttggacatgcccttgggcatgacgtcaaaccagtccgggatgggagagactatgcgcagctccggcacggcctcggctacaatctgctggcagcgggccatgcgctccgggccgcccgtgcaggcgatggtggccgccacaaacgggatgtcgggcacctcgtccaccacgccaccgttgaagacggtgcgggcctcaaagacggcaagctcggcgctgctgacacccacgccgtaggcggggttcatgaggttggtctcttctgggaagcagaccaagaacatgcccttctcgccgcgaattgcctggtcaatgcggacgagctggtcatgcgggatgagcgtggtagagacgtagcgcccgtccagccgcacgcgcttgccgttggagaagatgcctgtcatgaagcactcctcgtgcatgcggaagaggcggctgagctccacgtagtcacgccccgtggccgggccaaagcgcacgccagcatcaagaactgcatggattgcctcgacggtgcgtgggctcacgcgctggccaaggggtatgagcgtgttgtccatatccgacagaacgagctttatcacgcgtgctcctttcttgatgcggttccggcggccccaacggccgcgctggcgagaagcccgcgccgccgtggcccttctcgcctagaccagcgtgccgtccgggccgtactcgatggcgtcgaagcggtccaggtgaagcatgatctgctcaatgtccatgaccccgagcagggttgccacgtaggcgccgcccacgcccacgcggaggttgcggtagcccgtgccgtggcgcacgcccgtccacgagaggcggtcgacgtcggagtagcggaccaggacctcgctgccaagcggcggggtcaccaccatgtggtcctcaaagagcgccacctggtgacggcagagcgccagccacgccataaagaggctgatgacaaaggcgtcgaagaaggccagcacgaagacgtagcgctgccagaagacgcccgtaaggcacagcacgccgagcacgacgcccacaccacccatgacaaccatggccttgaccagcgagtttgtgagctcggggggaacggtgtaggtgtcgtggtggcggtggtggcgctcggcgatgagcaccttggcgccgcgctcgacgtaggccgcgcccagcggaagcaggatgcccaccatggccagcgctaggaacatgggctactccccgtctgcggcgccagccgtcggggtggccacggtgccgtccgcgcgcacggcggcgaacttggccaccagacgctccagcaggtcgaccgtgagctcaaggctgcgcacgggaacgaactcacgcaccgagtgggcgttgtagccgccggtggcgatgttggggcagggcaggccgcggaaggtcagctgcgcgccgtcggtgccgccgcgggccgggacgagcacgggctcgatgcccacctcgcggttggcctccacggcatagtcaatgagcagctggtcagcggggccgaacttctcggccatgttgcggtactgctggcgcacctcgacggcgaccgtgccctcgccgtagcgggcgttctggaaggcggcgatgcggcgcagcgtggcctcgcgctcgtcgaagtcggcggcgtcaaagtcgcgcaagatgtagcagagcttgacctcgtccggggtaccggagatgtccgtggggtggtagtagccctcgcggccctcggtgtgctccgggcgctcggcggcggggaccatctgctggaactcggaggccagcgtgatggcgttgaccataatgttcttggcgctgccggggtggaccaccacgcccttgaaggtgaccgtggcctcgctcgcgctgaagcactcgtagttgaactcgcccagggcctcgccgtccacggtgtagccccacttggcacccagcgcgtcgaggtccaggagctccgcgccgtggccaatctcctcgtcggggacaaacgccaccttgatggtggggtgggccagctcgggattggcgaccagacgcgccaggagcgcgcaaatctctgccacgccggccttgtcgtcagccgagaggagcgtcgagccgtcggagcacacgatgtcctggccttggaacttggccaggtcgggcacctggtccggcgtggtctggacgggctggccgtcgacgatgccggccaccagtgggccgccctcgtagtgaacgatgtggggcttgacgccggaggccggggcgtccttggcggtgtcgatgtgggcgcagagcatgagcgcaggggcgtcctcggcgcccttggaggcgggcagggtgccggtcacgtaggcatgctcatcaaccttcacatcaatgcagccaatggagcgcagctcttctcccatgacctcggccatcttgtgctgagtgggcgtagagggcgtctgtgcctcgttgtccgggtcggactgggaatctacctgcacgtagcgcatgaagcgctcgacgacgtcactcatggtgcctcctggcgttgcgcgcacgggcgagcggcgcggccgccggcgccgggcgctggtcttgtctgggtgagattctactccaggtgtgcacggccgcggcaaacggcgcgtaaggtgagggccgcaaacggccctcaccacgttttgggttcgcggatttggcggcgagacaagcagcacttgatgagtggctcttctacctgtgcttttgctacgccattctgggaagccaccgcaatcgcccggtagaccgaacccagatcggatattgatttgggttcgccgctcggccggtcccgaggcggcaaaaagacccgcaggcctccgacctgcgggtcttgtttctcgtctctgcgacggcgcccgaaccgcgaacccaaaacgtgttttggccgcgtccgaagccgccttgggggcgtcctagagcctggccacgccgctcttgcgggccgcctcggccaccgcggcggcgacggcgggggcgacgcgctggtcaaaggcgccggggatgacgtactcggcgctgcggtgctcgtcgtccaccaggccggcgatggcgtaggcggcggcctccatcatgtcgtcgttgatgtcggaggcgcgcacgtccagggcgccgcggaagatacccgggaaggccaggacgttgttgatctggttggggaagtccgagcggcccgtggcggcgacggcagcgccggcggcgagggcctcgtcgggcatgatctcaggcacggggttggcgcaggcaaagacgatggcgtccttggccatggagcgcaccatgtcctgcgtgagcgcgccgggggcagaaacgcccacaaagacgtcggcatccctgacggcgtcggccagcgtgccggccacgtgctctcggttggtccaggaggcaacctcctccttcaccgggttcaggccctcgcggccctcgtagatggcgcccttgcggtcgcagatgacgatgtcgcggacgcccatgcgacgcatcaggcgcgcgatggagatgcccgccgcgccggcgccgctgaagacggccttgacgctgcccagctcgcgaccggtgagcttgcaggcgttgataagcgcggcgcaggtcacgacggcggttccgtgctggtcgtcgtggaagacggggatgtcgcagacctccttgaggcgacgctcgatctcaaagcagcgcggcgcggagatgtcctcgaggttgacgccgccaaagctgccggccaggagctccaccgtgcggacgatctcgtccacgtcgtgcgagcggatgcacagcgggaaggcgtccacgtcggcaaaggtcttgaacagggcgcacttgccctccatgacgggcatgccggcttccgggccaatgtctcccaggcccaggaccgcgctgccgtcggtcaccacggccaccagattgccacgacgggtgtaggtgtaggagtcctcgacgtccttctggatctcaaggcagggccgagcgacaccgggcgtgtacgccacggccagctcctccggcgtgctaatggaagcgcggctcacgacctcaatcttgccgtgccactccttgtgcttgtccagggcatactgcttggcgtcatcggccatggcgtctcctatctgccgggccgcccgcgggcggcgagctgctcacatatggtgtcagtgtagcgggcgggccgtccggcggcgcgcacttctcgccagacgcgcaggcagcggcgcaaagtgtcgagaaacgccgacagtgggcccaggcgacgaggagaggggcacagcagtgtccgcatggcttggcggaggggtaatgccattcgccgtctgctcagcccttctcgcgtggggagtatcaattaatgtctggtcgacccatatactcgactccatagtcgaggaaacggaggaacaaccatggacgtaaccaggccttaccttgtccttggtcttgatccgggaatcgcaagctgcggtttctgcctgctggatatgacaaaccataagattcttgagatgggctcgcacctcttcaaggctccccaggaagacaagactaagaccagccttgctgttacgcgcagaaaagcgcgcagcattcgccgcaacacggcaagaaccgccgcccgtctcaagcgctgccttgagctccttgcgggcgcaggccttgtcccggcggatgcagacaagacgtggctccaaacaaagaaaggcgacaagcccatcctcaagctcagggcgggtggacttgaccgccttctgaccgatcgtgagtttgcccaggtcctctactccctctgcgggcgcaggggctacattccccatggcgaggggcgcctcggagaaactgatgaagacgagagcaagaaggtcctcggggcaatcaaaaagaaccaggacgccatggctgccggcagctatcgcaccgtcggagaaatgctcaacgcgcaggggcgctctcgcaaccgcggaggagattactccctctgcgtctacaactcccagattcaagatgaggcaaaggtgctctttgcctcgcagcgggcccacggcaacacaaaggcgactcgggagctggaggacagctatcttgcctgcctaacctgggagaagaagtccctcgaccacgatgctcgcgtctatgagctcgttggcccctgctcgtacttccccggagagaagcgtgccgcaagcgccgacatctcttccgagctatgccgcgcctacgagcgtcttgggcacatcgtcattgtccacgaggacggtagcgagcaggcgctgacagcaagtgagattgacgaccatctcaagatcctgttctcaaccgcacccattaagggcaacaaggagtgcaaggtcacttacggcaccatccgcaaggacctcgacatcagcggcaaaagcgtgttcaagggcattgcccaagacagggagaaggacgagccctttgctccaaaggcgtggcgctctctgaggcgcgtgcttcccgaggggcttcttgcccgcatgttcgcggaccgcaagctcggcgacgctgtctgcgaggccctgacctttgccagcagcgaggcgagcctcatcgaacgactctctgaccttggcctctctgacgacgagcgggatgccattctcgccgtgcccttcaccggcaagctgttcaaaggctacggcagcaggagcctcaaggcactgggcctgctcctgggggctttcgaagagcccgaaattcgcattctcacggacgctgagaaggtcaccggcctcttggatcttcgcctgagcgaccgcggcgtccgcggccagcttctgccaccatacgacagctacgaccccacctgccgcaatccggtagttctgcgtgctatgggccgcatgcgccatatcgtgaacgcaatcatcagaattcacggcgtccccgatgagattcacatcgagctcggccgagatctcaagatgtccaacaaggagaagagtctggtcgataaacgcaaccgagagaacgccgctagcaacaagaagtgggcgacaaccgccgctggcattttgggctgcacgcctgaggaagtccccggacgcatcatcaggaagctcatcctacgcgaggagcagggcgagaaggacctgtacaccggtgactccattgaccttgagcatctggtacgagacgaccgctattgcgagattgaccacatcctcccctactcgcgcacctgcgacgacagccgcgccaacaaggtcctcgtgctttccaagagcaaccaggacaagcgcgagcgcactccgtacgagtggatgacctccggcgaggccggcgcacccagctgggatagctaccgtgcccgcgtcatggcgcaggtcaagaacccgcgcaagcgcgccaaccacctcaacacggaccttgggccagagacgcaggccaagttccttgcgaggaacctcaacgatgaccgctacatgtccgtcgcggtaaagaactaccttgaggactgtttgctcttccccgaagatggccgcaagcgccacgttactgccgttgcgggcggggccacgggcaacctcagatgggtctgggggctcaactttggagagggcaatgtcaaggaccgcgccgacgacagacaccacgccgttgacgccgccatcattgccgcgtgctcagagagcaccgtcaagaaggttgccgaggcaagcgcaaagggccgagaagcgttcaaacagctccgcaagtctaggcttgcggacacgcagccctggccgacctttgccgctgaggtcgctgctcgccgcgagtttgttgtgcccacccgcatggcagaccacggcgtgacaggaagggccttccaagacttctcatatcgtttggagggactccgagagacaggttacgcagaaatatcgagacagacagaccctgcgacacgagagcgtagaagcgatgcggcaggcaattacgccttaagcagcaacgggaccgtcaagctccttgacgctattgcctttgttcgcttctggcacgatccagacgcaggtaaaaatggaaaatggtacgccgaacctgtttattgcgctgacattccagcgattcaaaacggcagctacgtcccaaagtatcaaaagcagaaggtcgcgcgaaatagctggctcccagtgccagattcggcaatgcataatgaaccgctcgtcctcttccaaggcgacgttctaatcatcgacagccacatcggtcgtttctggacttacgcaattggcggaggaactctaaacatcctgagtctccttgacaagaatgaaaaggcggaatgcttcccacccatatcaaagtgggtcaacagcgttgaagtccgcgtgctccaggaagactgcctcggccactgctatgacgacatctcgattaaccccgaagactccacgttccggcaacggtagttttcatcccgcacgccagcggggccgcatccgtccagatgcggccccgctttttacatgcccatgcgagccttcgcggcaagcctcaagctcaccgcgcctctatagccattcgcattacttcgtcggtggtatagcgcacgccatcatcctcagcaatggcatcctcataagcacggcaatcagcggtcagttcaaagccaccttcgtgcacgttacccgctcgctcttgaattcgaagcccatcttctgccccaggccgagcatcagcattcttctcgaccacgttcacccctttcggcgcgatcggtggtaatgcaattgtgccccacgtcaggctggaagagtcaaaacgcaagcgtaagttggggccccggatcgacagttttcccgccgccggccctgctgtcgacaagcacctctcgcccctcgtattgcttctcggtcagggtgagcacggtcaccgcaccagctatgggcaggttggccttgagccgcttgaggtgagcgtcggcgctgtcgcgcgagagcagcacgcgcgagtagacgctgaactgctccatgtgatagccgtccttgatgaggaacttcctgaagtcggcataggatctgcgctccttcttgttacccgtcggaaggtcaaacatcaccagcatcctcatgattctcatcatcgctccctattccagtcccgccttttgcagcgggataaccacaggcagctcaagcttggtcacatcggcggccattacggcggctttgagagtctccagctcgttctcaatagcgacctggaccggaacgtcccccaaagggattcgaaccagacattcaaaaatagcagcaagctctcgcttggtctcagaagtcaggtctccgcccaaaccgctttggatgacgagaagatcaacaaccggtcggaacggctcaatgaggtcatctaccaggttgaacgcgttgaggttattactgtggtgaataccgcgagagacaagccacccaccgctaacggccgttcgacctattccggcgcgcagcacggtatagccatagtcaagagcggcggtaaagggtccgttcctacggttgccctcggggagaaccttcttgaagtacgcactcgcagccacggactcacggtttgatgtatctccagaaagaacgtccttgaccattgctttaagacccgagccatcgaggtcaagcaagtccatgacgactgcttggtttgcaatctttgcctgaacgattctctgccaaagacgcttttgcaggggcttggaaatagcaagctggtcatcaacaattgcggcatgtcgggaatgcgctcccaggggaagaagcaggccattgggcatgtgatcatcaccgcagagcatgacaccgattccggcatcgacaagctttgaaagtgctgccgtggtgatttgggcctgatgcgtctcgattatcaggacccagatgtcctcaaggggaacaagacctcttagctcaccctgctggcatatcgcaagcgcgtcattttttattgagagcgaggcggcattctgaatgcaaatggttcgttttggcatggcgctgcgtcctctccgcgaggtataatttctttgtctagcgtggtttgtatcaactggggagttggaaggaattacggctagacaagggaatcgcttatgcgattacccgcaaggtaagcccgtcagcgcctcacgtgctggcgggcaaaccttttttctgcgaacggttttcagaaaaaggcgcgtggaggaccgatttgcccgtctcaaatcccatttttatttcaacccaaaccaaaacaccccctgttcacagggggtgttttggtttgggcattgtaccaactggggaattggaaggccggcaagactttaagaagggtcgcgcttctgcctagttcattgtaccaactggggaattggaaggccggcaagactttaaacctcctcgattgagagctggtatgattgtaccaactggggaattggaaggccggcaagaccgctcggtgtcaagcttctcctgaagctccattgtaccaactggggaattggaaggccggcaagacggcccgcagaacggcgggacctggaccgagattgtaccaactggggaattggaaggccggcaagactccgccacgtagccgttgacgggcgcaccgattgtaccaactggggaattggaaggccggcaagaccgtgggcttgccagtcctcgggtcacgctcattgtaccaactggggaattggaaggccggcaagacttgttgccgaggcgcaccagggagtccgagattgtaccaactggggaattggaaggccggcaagaccaatgcacctccgagccgcacagcgggcagattgtaccaactggggaattggaaggccggcaagaccatgcttgggagaacggcaacgcaacgatgattgtaccaactggggaattggaaggccggcaagacttgtcgtgcgtgcgttcgaccctcgacggcattgtaccaactggggaattggaaggccggcaagacagaaacaggcgcggccatcccagtaaccagattgtaccaactggggaattggaaggccggcaagaccggtgtctatggcgttcgtgatggaattgcattgtaccaactggggaattggaaggccggcaagaccatgccacgtgcgccttggcgttgtcgagcattgtaccaactggggaattggaaggccggcaagactcggcaccatcaccagcgttgtccaggctcattgtaccaactggggaattggaaggccggcaagactcctcctaggggcagaaaatgtcgtcgcaaattgtaccaactggggaattggaaggccggcaagacgaaataccttgaacgctcgcagaagctccaattgtaccaactggggaattggaaggccggcaagaccactacggcgtgctttacattcgatttcatattgtaccaactggggaattggaaggccggcaagactggcttgtgcttctcaaaaactgattgagatgtttttatagctagcaagtcgcgttacaagctccagaaaacccagccattgcatcaatcgggaaagggtttctcgcgcaattattgcatccaccggaaggctaaattgcgcgctgcggcagagggccattacatgtcttagaaatgcgttccaccggaaggcttttttgcgcaaatggggcgccattcccttctcgcacagaaaaggcttccagcagaacgtgtttcagcgcggtgatgaagggccgacggtggcagcgccgtcatccagtgcgaaggcgagcctcgcactggatgacgggctggcgagaaaagcgcaggtcgggcttctcggcgtttatccagtgtgaggccggaaggccgctgaccatcgcactggatgcgcggcggctctaccgccggccgcggcggccgcgccacgccgcgcaaggtcgacacatgcgggacgtatacttacttgatggcttatcgtgcccacagaaaggactttcccatgagcgagaccctcgcccctcaggatacctgcgtgctcgtgaccggcggcgccggcttcattggcagccacacctgcgtcgagctgctccaggacggctacaaggtcgtcatcgtggacgacctctccaacgcctccgccaaggtcgaggaccgcatcaagaccatcgtcggccccgaggccgccgcaaacctcgagctggtcatcgccgacgtcaacgaccgtgacgcgctggagaagatcttctccacgcacaagatcgaccgcgtcatccactttgccggcttcaaggccgtgggcgagtcggtctccaagcccatcgagtactacaccaacaacctgggcaacaccctcacgctcgtggacgtcatgcgcaaccacggctgcaagtccatcatcttcagcagttccgccaccgtctacggagacccggactccctgccgctgaccgaggccagccccaagaagcccgccaccaacccctatggctggaccaagtggatgatcgagcagatcctgaccgacctgcacaccgccgaccccgagtggaacgtcgtgctgctgcgctacttcaaccccatcggcgcccacccctccggactcatgggcgaggaccccaagggcatccccaacaacctggttccctacgtggctcagaccgccatcggcaagcgcgaggccgtccacgtctttggcaacgactacgacacccccgacggcacgggcgtgcgcgactacatccacgtctgcgacctggcgagcggccacgccgccgccctggcctggatgaacggccgcgagggcgtcgaggtcttcaacctgggcaccggcaagggcacctcggtgctcgagatcatcaccgccttcggccacgcctgcggcaaggagatcccctacgtcatcgacccgcgccgccccggcgacgtcacgtccaactacgccgactgcaccaaggcccgcgagctcatgggctgggaggccaagttcgacatcgacgacatgtgccgcgactcctggaactggcagtccaagaaccccaacggctacgagggctaggaaccgacttgaccgcaaccgccgacttgggcgcccccggcgccctgtttgccgcataccttggcgagaagcgcccccagattgaggcgtttctcgccacgtgcgcgcccgcctgcgtgcccggcaccgccgaggccacgcgcgcggacctggaccgctacctctaccggccgcttgcgcgcttcaccgcctcgggcggaaagcgcacgcgccccgcgctggccctcctgggctgcgaggccgtgggcgcagcccccgaggccgcgctctccacggcggcggccatcgagtacttccagagcgccgcgctcatccacgacgacattgcggacaagtccgagctgcgccgcggcgagccctgcacgtacgtgaccgagggcatcggcgttgccatcaacatcggagacctcggcctggtcaacgtgctcgccctggtcctgcgtgaccagaagctcccggccgccacccgcgcggacgttgcggagcgcctgatgcagatggaggagcgcaccctcgagggccaggcccttgacctgggctgggtccgcgacgggcgctgggacatctccgtggaggactacctctacatggccagccacaagacggcctactactccgccgcagtgcccctggtcacgggcgccctctgcggcggcggcgcgcccgaccagctgcgcgccctcgacgagtttggcatgcgcgccggcctggccttccagctgcaggacgacctcctgaatctcgtcggagacgccgaggcccagggcaaggacttccgcagcgacatcacggagggcaagcgcaccctgctggtggtgtgggccctggcccacctgggagacctccagagggacgagcttctccacatcctgggccgtaagaccacggacgccgccgagctggcacgcgccgtcgagctcattgacgcctctggcgccgtggactacgtgcgcggctacgcgcgcgagctcgtggccgacgcaaaggcgcaccttgtaagggcccgtctagaggagacccctcgcgacgtgcttctttctatggcagacttctttgtggagcgcgccggctaggcacccgcaccccgctacccgttacctgaggagagacctatggaaccgatcaaggaaggcgcgactggcgccgccgtcgaggacattcaggagcgcctcggctcccttggttacacgattgatgctgcggagcgcgacgagaagaccttcgggcgctccacggcaaccgccgtcgcccgcttcaggctggaccacggcctcacgctgggcgacgcagttgacgccgccacctggtccgcgcttgtcgacgagtcctaccagctgggagaccgcacgctctacctgcgccttcccaacttccatggcagggacgtccgccagctccaggagcgcctgaacatcctgggcttctcctgcggcgaggtcgacggcttctacggcgcccacaccgaggccgccgtcaagctcttccaggagagcgtgggcacgctggccgacggcatggccttccccgacacctttgacgccatcgagcgcctgaagcacgtctggggcggcaagcccgcaaacggcccgcaccccaccggcgacatgggctttgcccgagctgccaacgtgctggagaccttccgcatctccgtcaccgcggacgaccccatctcccgcaacgtggccggccgcgtcttcaacctggcgcacgccacctccgagagctgcggcttggagctcatcgactccgtcgacgccgccggcgcggacacgcaggccgtcattctgctgagcagcgccgagcacccgcttgaggaggctccctccatgggcgccgtggtgctggacgacaccgacaccctgccgcgccgccttcgcacggccctgcagggcgcgcgcgaggtgccgcccgtagtgcgcattgacctgcccgtgggcaaggatgccggcgacggcaccttcaccatcagcgacgcgcagacctttgccgtgctgctcctggacgccatctgcgccgcgtttgacgggctcacgctataagctatggaagcaaagcttacggtcaacggatttgagttcgtggcccgttatggggagaaggacgtggagcacgttcttctccccttgcttatgcggctgacggagctgcagaaagagcgaggtgagcgccttgtggtgatgctggccgcccctcccggcgccggcaagagcacgcttgcggcctttatggagtggctcagccggcgcacgcccgaggcgacgccgctgcaggccgtgggcatggatggcttccactaccccaacgcgtacctgagcgcgcactcgtttgttgacgaggacggacgtgaggtttgcatgcgcagccgcaagggcgcgccgcagacgtttgacgtcgaggggctccgcgccgcgctgacggacgcgcggagcgacgcgcccgctccgtggcccacctactctcgcgtcctgcacgacgtcgttgccgcaagcctgccaatacgtaagaagatcctgcttgttgagggcaactacctgctgcttgacgagggacgctggacgggccttgccgagcttgccgactacgccgtctttctgagcgcgcccgaggcgctgctgcgggagcgcctggttgcccgcaaggtggctggcgcctccacgctcgaggaggcccgggcctggtacgaggcaagcgacggtcgcaacgtggcccgcgtcctggcccaccactcccccgccgaccttgagcttgcgctgggagctgacggcagcctcacggttgcgtgacggttttggtcacgagccagaaagcgcttctcgccagagcgggcgtttgcccagttggcgagaagtgctttttaatagttgcattttagacgtgacgaaaaccgtcacgcaaaaggaccccggggcgtgggcctcggggtcctgatgacgtgctgcagctactgacgagaagatcttagatctggccctcctgggcggccttggtgatgctggcggcggccttcttgccggcgcccatggccaggatgaccgtggcggcgcccgtcacgatgtcaccgccggcccagatgcgagggtcggtggtctggccggtctcctcgtcggcgacgatgtagccccacttgttgagct

SEQ ID NO: 2687 - DNA, 14526 bp, synthetic construct
  source 1..14526: mol_type = other DNA
  misc_feature 1..14526: note = Synthetic
ccttgccgaagtagtcgttggcgtcaccggagatgttgatcgtcacgccagcaggcaggaaggcgccgaagctctggccgccagagccctcgcagtcgatggtgacggagccctcgggcaggccctcggggtgcgcggtggtgatggctgagcccagcatggtgcccacgcagcggttgacgttggcgatgtcggcgcggaagcgaatcggctccaggtggcgacgggcgtgcttggtgtagggcacgaacagcgtggcgtcgagcgtggagccaagctgcgcgtcgaatgccatgctcggcaggtagtgcctgcagtcagcgccctcgatgctggtgccgaagacggtcttgggctggacgagaagggcgctcaggtcgcacttgttggccttctcgtttccggggacctcgacctgcttgaggcactcggggtggccgaccatgtcttccacggtgcggaagcccagctgggccatgatctcgcgcagctcctgcgcgacgaagcgcataaagttgacgacgtgctcgggcttgccggcaaagtggccgcgcaggcgggcgttctgcgtgcagatgcccacggggcaggtgtcctgctggcagtcgcgctgcatcaagcagcccatggccagaagcggggcggttgcgaagccgaactcctcggcacccatgagcgccgcgacggcgacgtcgcggccgtccataagcttgccgtcggcctcgaggacgatgcgcgagcgcaggccgttggcgaccagcgtctgctgggcctcggccagaccgagctccaggggcaggccggcgtggtagacggagtcgcgcggagccgcgcccgtgccgccgttggcaccagagatcgtgatcttgcccgcgccgcccttggcgacgcccgtggcgatggtgccgacgccggcctcggagaccagcttgaccgagatgcgcgcctgcgggttggcgttctgcaggtcgaagatgagctcggccaggtcctcgatcgagtagatgtcgtggtggggcggaggcgagatcaggccgacgcccggggtggagcggcgcacgcgggcgacccacggccacaccttgcggccgggaaggtgaccgccctcgccgggcttggcgccctgggccatcttgatctgaatctcgttcgcgctcgacaggtagcggctcgtgacgccaaagcggccggaggcgacctgcttgatggcggagttcatagagtcaccgttgggaagcggggtctcgcgacgcgggtcctcgccgccctcgccggtgttggagcgaccgcccaggcggttcatggcgatggccaggcactcgtgcgcctcctgcgagatggcgccgaagctcatggcacccgcgttgaagcgacgcacgatggagtcgacggactcgacctcgtccagggggacgggaccggactccagcggtacgagctcgagcaggtcgcgcaggacgatggcgcggccggcgcggtgcaggcgctcgctgtaggagcggaacaggtcgaagtcacccttgcggaccgactgttgcaggtagtagatggtctcggggtcgatcatgtgctcttctccgccaagcgggcgccacttggtgaggccggagctggagagctggtcgggagccggggtctggaggagcgacagggcctcgtcatagcggcgctcggcctcgcgctggacgtcgtcgacgtccaggccgccgatgcggctggccgtgccggcgaagttcttgcgcacgaaggagtcggcgaatccgacgatctcgaagatctgcgcgccgtggtagccctggagcgtcgagatgcccatcttggacatgatcgagacgatgccagcggtcagggccttgtcgtagttggcgacggcgccgtccacgctctgcttgagggcgccgatctcgaccagatgggcgatgcactcgtgcgccgcgtaggggtagatgcccgacgcggagtagccgaccagggtcgcgaagtcatgcggggtgatggcgtcgccgcactccaggatgatgtcggcattcatgcgcacgccggcgcgaatcagatggttgtgcacgcagcccagggccaaaagcgaggggatgggcacttctccgtcggccgcgcggtcgctgatggcgacgatgttgcagcccgccttgacggcagcctcgacgtcgtttgccagcttgtcgagggcgcgctcgagcgcgccggcaccctcgtcgcggacgtaggtggccgagaagcgcgcggcatggaagctcgtgcggttgacgtgagcgatgcgctcatactgctcgcgggagaggatggggccgccgaggcggatcaggcggcagctgtcacgggcgtcctccaggatgttgccgtggttgcccaggtagagcacgttggaggtgacgaccttctcgcgcagggcgtcgatgggcgggttggtgacctgggcgaagagctggttgaagtagttgaagaaggactgcgggcgcttggagagcacgggcaggggcacgtcggcgcccatggaggtgaggggcgccttgcccgtctgggccatggggcgcacggactcgtccacgtcgtcgtagtggtagcccagcttggcgaggcgcaccgtcaggtcgaggccggcgtcgcgcggcgcctcgacgtcggtcggggcggccaggtcggacacgtcaagcgtctcggcggccagccagtcgcggtagggcttctgggcggcgaggccgtcgcggatctcgtcgttccacaggacgcgaccctggctcgggtcgaccaggagcatctcgccgggaccgaggcagccggtctgcaggatgttgccgggctcgatgtcgagcgggccgacctcggaggcgaggatcatgcggtcgtcgcgcgtgaggtagaagcgggcggggcgcaggccgttgcggtcgagcacggcgcccagcttgcggccatcggtgaaggcgacggcggcgggaccgtcccagggctccatcagcatggactggtaggcgtcgaaggcgcggcgcttgtcggagagctgcgggttgtggtcccacggctcggggatcatcagcgagacggcgcgctcgaggctcctgccgttcatcgtgaggaactcgagcacgttgtcgaggatcgcagagtcggagccctcgcggttgatgatggggacgaccttgctgaggtcgcggccgagctggggcgagtacaggttcggctcgcgcgagcggatccagttgacgttgccgcgcagggtgttgatctcgccgttgtggatgatcatgcggttggggtgcgcgcgctcccagctgggcgtggtgttggtggagtagcgcgagtgcaccagggcgatggctgactcgaccgcggcgtcgttgaggtcgaggaagaagcggcgcatctgcgtggcgacaagcatgcccttatagacaatggtgcggctggacatcgagcacacgtagaagatcttgccctcgagggcgtgctcggcgtccgcacgtctctcgatggtgcgacggcacacgtagagcctgcgctcgaagtcgtcgccaggctcgacgtcgtcggggcgcgcgatgaaggcctgaacaatggtcggcatgcaggcacgagcggtctcgcccaggtcgtgcgcgtcggtgggaacgtcacgccagaacaggagcttgaggccctcggccatacagccgtcctcgaacacgcgcttggcggcctggatgccgtcctcgtcgcgcggcaggaacagcatggccacggcgtagtcgccctcgtcgggcaggatctgaccatagcgctgcgagaccttgcggaagaagcggtgcggcagctggaagaggatgccggcgccatcgccggtgttgctctcgaggcccttgccaccacggtgctcaaggttgaccaggatggacagggcgtcgtcgaccgtctggtgcgagcgaatgccatgaaggtgggcgatggctccgatgccgcaggcatcgtggtcgaacgacgggtcgtacagaccgttgctccacctgcccagattgtctgtgttctcgtgttccataattatgtgcttccccttcccctctcgcccgcgagcgcggcggcttgcgtttctcgctgccccatgccgcgcaattctcttcgcgcgaatggcttccgtgagtcacgttgcgtgtagcgaatctttctaagaatcgtccgtgcgcactctaatgcaaccggacgaaattcagacgttgcagctagttaacaaacttgtgcgtgttgttggcgtggttgttgagaaatgcccagttggatgacgtatcatggcccaggtaattcatttcatcgctattttgtgtatcaacagaatcgctcaaaatgcgtcacatgcgcgaaacgctacgcgagtaggctcagtcgcgtattgaattggacctgtgcgccccacggcacaggacatcaccgatcccccaaggagggacgttcatggcaagtgataaggtctcagaggagtacggcagtcttgtcttcaccgacgctgacatgcgccagcgcctacccaagccgacgtacaaggaactccgacgcgttatcgacgagggcaaggacatcaacctcaacatcgccaacgaggttgcccacgcaatgaaggagtgggctctcgagaagggtgccacgcacttcacgcactggttccagcccctcaccggcatcacctcggagaagcacgacagcttcataaatcccaatggcgacggcacggtcctgatggcgttctccggcaaggaactcgtccagggcgagccggacgcctcgtccttccccagcggcggcctgcgcgcgaccttcgaggcccgcggctacaccgtgtgggaccccatgagccccgtcttcatcaaggacgaggtcctctgtatccccaccgccttcatcagctacaccggcgaggccctcgacaagaagaccccgctccttcgctccgaggcggctgtcgagcgcgaggccaagcgcgtcctcgccctcttcggcaagcagcccaagcgcgtcttcaccacctgtggtcccgagcaggagtacttcctgatccaggaggacgactacaaggcccgcccggacctcatcctcaccggccgtaccctctttggctgcgagcccgccaagggccaggagctcgaggagcactactttggcgccatccgtccctccgtcaacgccttcatgaaggaggttgacgacgagctctggaagctgggcatccccgctcgcaccaagcacaacgaggtcgccccctgccagcacgagctcgcccccatcttcgagcagggctccgttgccatcgacaacaacctgctgaccatggagaagctcaagctcatggccacccactacggcctcgcctgcctcgagcacgagaagcccttcgagtacgtgaacggctccggcaagcacgacaactggtcgctctccgctgactccgagaacctcctcgagcctggcgacaaccccgaggacaacctgcagttcctggtcttcctcgcctgcctggtcgcagccgtcgacgagcacgccgacctgctgcgcgcagccgtcgcctccgccggcaacgatcaccgtctgggcgccaacgaggctcctcccgcgattgtctccatcttcctgggcgacgccctcaccccggtcgtcgacgccctcatcaagaaggagcacgccgagtcccacggccgcgagcgcgttgacctgggcgtccccgctctgcccaacatcctgcgcgacaataccgaccgcaaccgcaccagcccgttcgccttcacgggcaacaagttcgagttccgcatgtgcggcagccagcagaacctctccgactgcaacgtcgcgctcaacgccgccgtcgccgagcagtgcgagcgcttctgcgactacatcgcagcccacgaggacctggacttcatggccgcggccatgcgcttcgtccgccacaccttccgtgaccaccagcgcatcctgttcgacggcaacggctactccgaggactgggagaaggaggccgagaagcgcggcctgctgaacaacaagaccacgcccgacgccctcccctgcctggtcgagcagaagaacatcgagttcttcgagaagttcaacgtcctctccgaggccgagtctcgcgcccgctacgtcgccgcggccgagcagtacagcaagctgctcaacatcgaggccaacaccatggtcaccatggcccgcaacctctacacgcccgcaatctcgcagtactccggcgacctggcctccagcgtcgcgacgaaggccgagatcggcgtcgcaagcaagaccgagaaggacctcgtcgcgacgctgacccagggcctcgaggacatccgcgtcgcagccgacgagctcgaggagaagaacgtcgccgcccgctccgcagaggacgtccagaagcaggacgacgcctaccgcgacgacgtcgttcccgcgatggccaagctccgcgcggccgtcgacggcatggagaagatctgcgccaaggactactggccggttccctcctacaatgacatgctgttctacgtctaaggacggggcacggagtcacacataggctcaggtcaagggacctccggcacgcgtcggaggtccctttttgttcctatgcgcaccatcccgtgcccacgggctatcatgtgagccaagaaggcgtcagcacgccacgccatcgaacgggaggacacatgagcgagatcgcgaccaagcccctcagaatattcgacctgcactgcgacacgctcgatgcgctctgcatgaacgacgcgagtgcgttcgtctcgctcccatcgatcccagctggctcagacatggtcggcaatcccctgcagctggcagccgagcgtatggccaccgcgggacagtggtgccagtgctacgccatctgggtccccgacgacctcgcgggcacgggactgacggcgcacgagttctacgacagggtggccgcctactatcatggccagctggccgcacacccctcagagctccatggcatccgcgacggccgcaccatcgaaggggcgctcgcacagggcggagtcggctgcatgctcaccgtcgagaacggatctcccctggaagacggcatggaggttctggaccagatgcacgccgacggcgtcaagatgatgaccctggtctggaacggtcaaaaccgcattgcctcgggcaacgacacccaggacggcatgtccgccttcgggcgctcggttgtgcgccgcatggagaggctcaagatggtcgtcgacgtttcgcacctgaacgatgccggcttcaaggacctcctggcctgctccgagcgtcccttcgtggcaacccactccaacagcagggccatctgcgcacacccgcgcaacctgaccgactaccagttcagggcgattgcggaccgcggtggcctggtgggaatcaactactaccgcgccttcgtgagcgagcgcttcggcctcgaccacggcgagcccggacccggccggccggaggtgagcttcgacgacctgtcataccacatcgaccatatgctcgaactcgacggtcagggcaccatcgcactgggcagcgacttcgacggcagcgagacgccctcgtggctctcgggcgcacaggacctgccccgtttctacgagctgatcgcagggcgctttggcgcagacgtggccgacgacatgttcttcaacaacgcggcgcgcttcttcgcacgcaacgaggagctgtagcccaataggctacgcttgctcgtgaccgcggccgaagccctcggatatcttggtaatgccaccaaacaccagggcgcctccagcgagcactacggcaaagtcggcaaccatgaagggcgccgccgcgacgataagccccaacagaatgacgatgctgctggcgatcacgcgcggcgtgaagatgggcatgccggttcccgcgcgcagcagggacgcgacctgaagcgacgtgatgcccgaaagcacgatgccgaagcccagaatcacaaagagccacaccacaaacatgccgggcatgctgatgagcagaaggccaaacaggaactcaatcacgccgacgtagaagtccgcctgcgcgaagagcgcgctaaatcgccggaatgagctcagcaacgtcaggacgcccatgatcaccacgacccagccgatgacgccgattgcgaaagtcgtgacgccggcgggattcatgagcatatagagtcccaggataaccgccgcgaagccctcgataagcatgccggccctggagcgctcgtacgtgttcatgttgacctccccacagaagcgcccggcctggcaccccggagcgcgttgcatttgtcatcacaaaaccatcataaaactacggcacgccccgagaggtatgaatatctctcgagtgcctctttttctggccaaacgcgcaccacacgcgcgtagactatgcaacttgcaaagccccgcatccaatggagcaacccccgaaccaagaagtggagaagagcgtggcaaaggcagcttcaaggtctctcgacgtcacccagggtgtcatctggaagcagctgctcaagctgtgtctgcccgtgttcttctcgtccttcttccagcaggcatactcgctgatcaacgtgttcgtggtggggcactcctccggcagcaccaccgccgtcgccgcggtccaggcaacctcggctctcaccgacctcgtggtgggattctcggtgggaatgggcgtaggcttcagcatcgtcgtcgcgcagtacttcggcgcccacgagcagcacaagctctcggtgggcatgcacacggccatgggcatcgcgcttgcgttcggggccctttgctcggtcgcgggcgtgctgctgtgcggcagcatcctctcgtggatggggacgccccaggacatctttgccgaagcccaggacttcgcccgcgtctacctgggcgccatgatcttctcggtcaccttcaacacgggctctgccctgcagcgcgccgtaggagacacccgcacgccggccatcatcgtcgcctcgtcgtgcgtggtgaacgtgctgatggacctgctgttcgtcctctacctggacctgggcgcacgcggatgcggcatcgcgaccgcctgctcgctggcctttggctccctggcgaccctctggcagctcacgcacgtcgaaggcgcctggcgcatccgcctgcgcgaccttcgcatcgaccccaagatggcccgtgtcatggtcaagaccggactgccccttgccctgcagtcgtcggcctacaccgtctcgaacatcatcgtgcagtccgccatcaacagcttcggaaccagccacatcgcggcttggggcctctccggcaggctcgactcgcccgtctggaccgtgtctgaggcgctgggctcctcggtcaccacgttctcggcgcagaacttcggcgcccgcaaccacgagcgcatgcgcaaggggctgcatacctcactgctcatgaccgtcgtcgtcatcggtagtctggcaagcaccgtcatggcgctcgcgcacccgctttcgattttcttcctgcaggacgagcgggtcgccaacctaacgacgcaagtcatcatgaccctggggccgttctacctgtgctactccgtgatggcgaacttcgctggcaccatccgcggctcgggcgagagcctgcgtcccatgctgctgacgctcttcggcacctgcctgctgcgcgtcgtctggctgctggtgttcatcccacggcaccacgacttcacactggtgctcatgagctaccccgcaacctggatcatcaccgcggtcctgttcgcgctgtactaccgctacgggcactggatgcgccacgcagccgaccacgaggccgagcgcatggcgctctagggaagcaagaagcccaacgtgcttgtttggtcacgctcacgtatacgcggccaattaaagtccaatcgtagccctaaactcttactcacgtgaacgtctttccctttcgggaatgacacaaagtgattggagaaggacatggcagaaccctatctggtgcttggcctggaccccggcatcgccagctgcggcttcgcactcctcgacctgagcaaccatcaaatcctagagatgggctcccacctctttgatgtcccgcaggaagacaagaccaaggtaagcctcgccaccggcagacgcatggcacgcagcgcccggcgcaacaacgccaggaccaagaaccgccagaagcattgcatgcagctcctaaaagaggctggcatggtccccgaagatgccacgaagcagtggttccaatcggcaaagggtgatcgccccctgctcgagcttcgttttgccggcctcgagcgccttctgacgaacagggagttcgcccagatcctctattcgctctccgcgcgcaggggctacatcccccatggcgaaggccgcatcagcaagctgagcgacgtggacgcctccggagcggcggacgaggaatccggaaaggtcctcaaagccatcggacagaacaacaagctgatggcatcgggcgagtaccgcaccgtaggagagatgttccatgctcagggcaaatctcgcaacaagggcggctcgtacgagctctgcgtcctcaacagccagatcatcgacgaggttcacgtgctcttcgacacgcaacgaaagcaccggaaccccgttgctaccgaagagcttgagcagaggtacatcgacaacctcacctgggaaaagaagtcccttgaccacgatgccaaggtctactcactcgtcgggaagtgctcctacttcccgacggagatgcgcgcagctcgcgcagacctcacttccgagctatgcaacgcctatgagcgccttggccacctgcgcatggtcaacgcagacggtcaggaatcatcgctcagccccgagcagatagacatctacctttccattctgttctcgacggaacaactcaagggggcaaaggcgaaggtcacctacgcacgcattcgcaaggatctcaacctgtctgcccacatcttctttaagggaattgactccgacgacgagaaaaaacgcgaggtctatgtccccaaagtctggcataacatgcgcaatcacctttcaaccgaactcatgcaaaagttgtgggacaaccgtggtctggcggatagcgtgaccgaggctctcacgtacgcgagcagcgaagagagcctcttgttccagctcgacggccttgaccttacggacgaccaaaaggatgagattctcggccttcccttctcgggaaagctatacaagggctatgggtccagaagccttaaggccctcgagatgcttgtagattcgtttgaggacccaagcgtagtcacgctcaaggacgcggaagaggcatctgggctcctgggaatgagactcagcaaggacggacagaggtcaacgctccttccgtcctacagcagctatgacaaagagtgcaggaaccccgtcgtccttagggccatgggacgcatgcgtcacatcgtgaacgcaatcattcgaatctacggagttcctgacgagattcacattgaactcggtcgagacctcaaaaggtcaaagcgcgagaaagacctcatcgccaaaagaaaccgagcgaatgagaagaacaatagtcgttgggcggaacaggcggccgacatcctcaagatagatcccgaggaagttcgtcccaaggtgctgcgcaagatggctctttgggaggagcaagacggatttgacgcctacacgggcgcgaaaatcgaactcgaaaagatgattctggacgacaagtattgcgagatcgaccacgtccttccctactcacgcacttgcgacgacagccgcagcaacaaggtcctcgtgcttgcgaagtcaaaccaggacaagcgcgagagaaccccatacgagtggatgacacaagacgctggaaaaggtgcgcccaggtgggaagagtaccaggcacgcgtcgtcaacaatcatcacatttccccgcgcaagcgtcgctacctgctcaacaacaacctaggtgaagaccagcaaaaggagttcctggcacgcaacctcaacgacgacaggtacatgtcgcgtgccgtcaaggcctacctcgaagacacgctgctttacccggaagatggcaggaagcagcatgtcgtcgcggttgccggtggcgccacaggtaaccttcgccatgtctggggactgaacttcggttcatttggcacaaaggatcgctcggacaaccgtcaccatgcagttgatgcctgcgtgattgcggcctgctcgcaaggaacggtgcagagggttgcaaaggcaagctccctcggtcgtaacacgctcaaacaagtaagaaaggagcgctttgcggagacccagccctggctgacattcgcagacgaggtaaaggcgcgcagggagtttgtcatccccacgcgcatggtctcacacggggtgacgggacgagctttcgaagatacgaattaccgcttcgatggcctgacggacgaaaaaaagaagctgtccctcctgtatgggaacaagaagttcacgaaaaagggaaatgtcgtcatcgggaaggacggcaacgcacatctggttgacggcatggcgttcctgcgtctttggctcgatccaaccggaaggaaaggcaagggcaagtggtacgccgatcccgtctattacgccgatatccccgccatacaaaatggcacctatcaaccacgagccgcaaaagcgcatgtagctcgtaccgcatgggagtccattcctgaaagcgcgcttgcctcaaaaccagtcgtcgtctttaggggtgacgttattaccgttggagatgtagccgctcgcttctgccgtttcgacatcaacggtttatcgctcacaatgaaatccctctctaccgaagacgaatgcaaatctttccccccgatgagcagatgggacaacaaacatcgccccgtcgtattacaagaagactgtcttggccactgctacgacggattgacgcccagctcattagaaaactagcgttagctgcggtccaacatcaggaaggtccttgcgaaccagcgtgttcacaaggaccttcctgctctcaaattgcttctcggtcaattcgataacggtaacttctcccgcagcgggaagattagccctaagccgttcgacatgagtcactgcgctatccctcgaaagcaaaatgcgagagtacacgctatattgctccatatggtatccgtcattgataagaaactttcgaaactgagcgtacgatttgcgttcagccttacttccagttggaagatcaaacaacacgagaagtctcataattctcatttctactcacatccagcgtttctaaacgttgtaattgctggtagtagaagcacgcccggatccctgtctttaacagcttgcttcaacgagctcaattcaagctcaatagcattttgaacggtcgtttctttatcatcgacacgcactattagggagaaaactgaagctagcatcgccttcttttcgggagttaattcgccctccaatctctcctttgcgacaagcaaatcaacaatagggcgaaagggctctatgagatcgtcgaccagattaaatgcgttgaggctgcttgagtgatggatgccacgagagacaagccatccccccgcgacggccgcacgaccaacacccgccctcaacactgcatatccgtaatcgagaggagccgtacttggcccctctcgcctttttccttcaaaaatataccgacgaaaataaacggacgcggctgcagattccctatttgacgtatcgccagacaagacctcggaagcaaacttccttacagacaagccctcctgaccgataagatcaagaacattggcctgattctctattttttgccggacgatcctttgccacagctgctttttcaagggttttgaaatagcaagctggtcttccacaatagccgcatgcctagagtgcgcccctaggggaaggaacagaccgttgggcatgtgatcatttccgcaaagcattacgccgacgccgcaatcagctaggcaagacagggccgtagttgatatctgcgcgtaatgcgtttcaagtattacgacccaaatgtcttcaaggggaacagaagctcttcctctatcgctctcaacaagaagagcagaatgccgaacagatacctttgccggattctgaatgcaaattgtccttttgggcatagcaacccccatgattctgaggtagaatgcattcgtctaagcaagatgtaccaactggggagttgcaatcgtgcgtagacaaggggatcacttaggtgattacccgcaaggttagcccatcggtgtgaatgcaccggtgggcgatccttttttatcggcaggtaatctctattttcagatttttgggtttcgtccagtcataatgaccaagtttttgacattttcttacaataccccggcggcctctcccctgtttactaggggagaggccgccggggtattgtaccaactggggaattggaaccacgcgaagacgttgtg

SEQ ID NO: 2688 - DNA, 13283 bp, synthetic construct
  source 1..13283: mol_type = other DNA
  misc_feature 1..13283: note = Synthetic
accccacgtgatcctctgcgtgcgggcctgtgtgcgtctcgctgcaggcagctgctactatggggacatggaccagcgtgacgagacatacatggcgcttgcgctcgaggaggcgcgcctggctgccgccgagggcgaggtgcccatcggtgcggtcgtggtgtacgacgaccgggtaatcgcgcgggcgcataaccgccgtgagaccgaccgcgacccctcggcccatgccgagtttgcggcgatgctcgaggcggctcgcgtgctggatcgttggcgtctgacgggctgcaccgtgtacgtaacgctcgagccctgcctgatgtgcgccggcctgatggtcaacgcgcgcgtggaccgctgcgtgtacggcgcacccgaccccaagggcggggcgctggggaccctgtacgacgtgagccacgatgcgcgtctcaaccacgaatacctggtgactcccggcgtctgctcggcccagagcgcagaggtgctgcgcgcgttcttcaaggagcgccgtgccgcgcgcaagcgcgagcgcgccgaggctgcgtcctcggatgcgactggcgacgcatagagggttgcgtgggaaaacgtccgttacccttttgatacgagtgccccgtttggcaccgtttttttggtctcgtcggttaagctagcttaaagtaagccagcgctgcctgacagggggtatcatgccgcgtcactttacgggcgacgacgtccgcgaggcctacgagcgcatcaaggatcgagtgcgtcggacgccactcgacgactccctgtacctcagctccgacgactgccgttaccgcttcaagctcgagagccagcaggtgggacgcagcttcaagatccgcggtgtgctcaatgccctgcttcagctgaccccggcccagcttggtcacggcgtgggcaccgtctcgacgggcaaccacgccatcgcgctggcctacgccgccaagcagctcggtgtggagtgcgtggtcatcgtgcccgtcggcacgtcaaagaccaagctcgaccgcatgcgcctgtatggtgcgcgcatcatgaccatgggcggcaactacgacgaggccctggtccttggtcgcaactacatcgactgcaacgagttgtactacgtggatccaggcaagaacgatcccgtgacgtgcgccggccatggaacggttggatacgagctcgccctgttgcaccccacggtcgatacgatcgtgatgcctgtgggcggcggcggacttatcactggtgtggcggtaggcgcacgagccatcaagcccgacatgcgcatcgtgggcgtgcagacggctgcctgcccctcggtataccagtcgatcaaggatgggttctgctattccaagtacccggtagccagcggcaccatctgcgattctgtgaccggtggtgcaggtacgctgacctgcgagatgcttcccgggctggtcgacgagtgggtcatcgtcgacgaggacgaggtgcgcagtgccctgcgtttcatggtgatggaggagcgcatcctgctggagggtgccagcgccatggccgtggcagccgtacgcgactaccccgatgtggtgggtggcagcaacgtggccatcgtcatcagcggaggcaacgtggacggcaaacgcctggccgaggtcctcaacgaggaagacgacagcctggagctctaggcacttgggcgggctgttttgcccccaactgtggactacacgacctgaaagacaaagaagtccaggtaatggctgggcgggaatccccaaaggatggggtggtccggtgcctgctggcgttcctctacctgcttgagctgcacgcccgcattgtgagccgcctcggcgatggctttggccaaaagatcgcgcgtcatgtgctgtgagcagctgcaggttgccagatatccgccgcgtggcagcaggtgcagggctgcctggttaatctcgcggtagccgcgcgcggcgttgcgcacggtggagctgctcttggtaaaggcgggcgggtcgagcacgatcaggtcgaagggtccgccctcctggcgcgcaaaggagcggtcagagcgcaaccggggtaggtattcgagcacgtttgcgcaggtaaaggccatgcggtcgtcgaggttgttgaggtgggcgttggaggcggccagatcgatggcggtctggctcacgtcgacgcagcgcacgaacgcagcgccgcctgccgccgcgttgaggccaaagggccccacgtggcagaagcagtccagcacacgtctgccgcgtgccagctcgcgcacagcgcggcggttgtacttctgatcgaggaagaagccggtcttctgcgagttctcgaggtcgaggtcaaaggagaggccgttctcctgcaccacgatgcgggtgtcgagtgccggggtgttggcccaccagcctttgcgcagctcaagcccctcgcgctcgcgcatgggcgagtcacagcgctcgtagatggcgcgcacgtcttgcccatcggcctgcagcacgtcgagtagcagcgggtacaggcgctcgcgcagcagctccatgcccacggttcccacctgcgttaccagcaccttgccatagcggtcaacggtgaggcccggcaggccgtctgcctcggaaaacacgacacggcaggcatcggtgtcgggcgggcagccaggcagggcgcgcgagcccatggtggtcatgcgatgctgccaggcccactcgatgcgccgacgccaaaaggcgtcgtcaaagcggtcgttggcgttgcgcgacaccatgcggacgcggattttgctctgttgcgagagcagaccagtgccctgccaggtgccgttttcttcgcggatgtccacgaggcagccgttggcagcctcgcggccgtcaagcggtgcgggctcgacgcgcagcacctcgccctcgaagacccacggatggcccgaggcaagcgccttggcgcccttgcgggtgatgatgacctgcgggtaggggcgaagctgcttcatgatgctccttggtgcgaggtgcctgggcacccgcgggctctagtagtgccggccgaagcgaccgctgttggggccgccgaagccgcggcgcgacttgctgccactgaacatggtgcgcgtgggcttgctcgtggagcgtgacgggttgggcacgatgcgggcgtcgtcgtacgcgaagcccggcagatcccaaacgggcacgagcttcttggtaaagtactcgatctcgcgcagcgggctgatctcgtcgggcgccacgaaggtgtaggcatgcccggtcgcgccggcgcgtccggtgcgaccgatgcggtgcacgtagtcctcggggtccatgggcacgtcgaagttgaccacggcgtcgatgccgctcacgtcgatgccacggctcatgacgtcggtggccaccagcagttgcacctgtccctcgcggaagcgctcgagcgccttgtcgcgggctttctgcgggcggtcggcgtgcatgacctccaccttgaggcctgcgcctttgagcgtcttggagacatcgtccacacgatgcttggtgcggcagaacaccagcacgcgctcgggcgtggtgccgggctcggcgccgccggtctgcaccagcgcctgcaagagctgcgtcttctggccctgcgtgacggggcagaggtgctcctcgacggtgtcggccgtctcgcccacgcgtgcgatctcgacggtcgcggggtcggtgagcatggcgtcgatggtgcccttgatgctgggcgggatggtagccgagaacagcaggttctggcgttttttgggaagggcctgcacgatacggcgcacgctgggccagaagcccatgtcgagcatgcggtcggcctcgtcgagcaccaggatgcgcacctggccgaggtcgacgtggcggtgttccatgaggtcgatgagacggccgggagtggctacgagcaggtcgcagccccgtgcgagggctttgagctggcggtcgaacttggcaccgcccatcacgatgacggagcgctggcccgtgtgttggcacacggtggtcaccacgcgctcgatctgctgggcaagctcgcgcgtgggggtgacgaccagggcgagcggacgcgcgggctcgccagacgcgacgggagcggaggcctccgcgccgcccttgcccttgcgacgacgcctgcgacgcctgggcttaggcgcctcctcggcctgcgcggcctccgtctgcgcctcagctactggctcctgcggctgtgcgggtggctcgtcgagggtgatgcccatgatgcgctgcagcgtgggcagggcgaaggccgccgtcttgcccgtgccggtctgggcggacgcaacgagatcgcgcccctcaagcaccaagggaatggcctgctcctgaacgggtgtcggttgggtgaagccgagggactcaaccccggcaagtatctgctcgtttagcccgagctcggcaaatgcattatccataggaccagtatggtgcaatgatgccgcaagcgttatccacttttatccgttatgggcaacctgtgaggatggggcgggacagaaagaggcacgatggcggtgagaggcgggggttggtccttgcgcactcgaagtgatggacttacgcacccctacaacacacgaagtgcaagcacgagcttgcagagaccgcgttgtaggggtgtgctcgggagtggggacaccctcacaacggcctttatgccagctagaccttgcgataatcgcgttgtgggggcgtgaggtcactgctacgggccgctagtcaaagacggacgccgagggaagcaccaggttgccgacagacttgaagcgcgtggagtcaaacagaacctgttggaagttcattgcaagccgcttctcgtcatcggacctttgtggcaggtcaacgcgaagcagtcgtgccaactggcgcatcttgtgctcaaacatctcaaagtctctcgtgtggtccgtggtgagacgaagatacccgtttccagcggcttcgatggcgtcacgtcgctccgcctgatctttaagatgctggtcggtcaggcctgcgctggcggtatgaaactcgtcgctgtcgtactctagcgtgacgcaccgacgtctgcgcccattgcgtagggtcttgctggcccacatgtagtctgaaaagcgaatggtcgcgcagtcctcatccgactcgcttgattgacccttgagcaaaatgggctcatttgtcgagggagtctcgaagccatagccgaggggccaaggcgcggtcattacaaggaatatggccgtttcgcgtggtgaggcagacagtggaggcgccgtggcaagcgctctgcgtgagagcttcaagccctttgctcgtaccatctctgacaagtacctctgtatttcatgcttagtggtgaaaggtcggtgtcggcctattgaccccgtgccatccggtgcgaggctgtagtagccacagagttcaccgcagagttcggcaagcgctaccaacatgccaaatttgccaaagctttcgaagaggttgcttgcccagggcatggccgagtcgaagcttgtgaggctggactgacacatttgtaataagacgagcgcaggtgacgatacgagtacatgagacccaagcgaccgaaaagaacctgtgggtaatctgcctgtggccttgtgaatcgtgcagcctttaatcgagtgggccgagttctgagacagggcaagcaggtggaggggcctgcattctagaagaccgctgatgttgccgctgtcaaggaagtcggttacgcggcatgtgtgttgcccgacaggaatgccctcttggcatgagaggggttcgagcattcttgcaccgactgcgcgatgtaccaagagggcactctggtggctaatgatcaggctgttgttcatatgtccccacctcctccagctgatgtcaaatcaaacatatcgatgtaccaagtgcggtgatgtaagaaacgctaagatgcttaaaaaagtagtgcgacctgaagcgttgtttcgtgcgacttagatttgttcatattcacaaacgcctatgatgagctgcgcttatccaattctcgtaaaagcgagaaaacgaaccgtcatggaccgtttgattgttgataagtcggttatcagccgcaagcgaggacgaggaggacatctgtctcgccccatcaagagatgcggagctgaacgcgcccccataagtgcatgttttgtaggcttaagcttgcagagattgcgttgtgggggtgtactaggagacggagacacccccataacggccttcatgccagctggacctttcgaaaaccacgttgtgggtgcgtgtggcttgccagagacccttgtgctcatagcagatgaggctttggagtctgattcgctggctctcgcgctacgccggatgcccatacgtttcagcttgtgatacaaacccaaagcagccgccacaagctgctatgctagagcggctacagtaacggccagcttggagcatgcatgagaaggacgccagagacgctcgcggggcgaatgcgcaggtgcggataaccgcacgtcctcactgcccctcgtttgacacgtccctaggagctccaccatgcccatcaacgtccccgacggcctacctgcaaagaccatcctccagcaggagcgcatcttcgcgctcgaggaagaggtagcaagccaccagcgcatccgcccgctgcggatggtcatcctcaacctcatgcccaccaagatcgagaccgagacacagatcctgcgcctcatctccaagtcgcccctgcaggtgagctgcgactttatgcgtgtgagcagccacgagtcaaagaacacctcggccgaccacctggtcaagttctacgacacctttgacgcctaccgcgaccagaactatgacggccttattgtgacgggcgcgccggtcgagcatctggcctttgacgaggtcgactactgggacgagctctgccagatcatggattggagccgcgagcacgtgttctctaccatgtttttgtgctggggcgccatggccggcctctaccactactacgggattcccaagcgccagctgccggcaaagctgtttggcgtgttcccgcagcgcctgtgcgacgagtacagcttcctgaccaacggattcgacgagatgcacaacatgccgcacagccgtcacgccatgctcgacgcctccgagctcgccaagcaccccgagctcaaggtgctctcggagggcttctccagcggtccggcgctcatcgccacgcaggacttccacgagatctatgtgaccggtcattttgagtacggccgtgacacgctggccgacgagtactggcgcgacttccacaaggggttgcccatccgcctgcccgagaactacttccccgacgacaaccccgagaaccagcccatctttacctggcgcagccacgccaacctgctgtatcgcaactggctcaactgggtgtaccagatgacgccatacgagctcgaggagattccggaggccattcgcgccctgcgcgaacactcgtatgtcatggcggagaagttcgactaggcccagccgtcctcccttccgcctgccaccattcgggcatcaccagacaagaagaaagagactgccatgatcgttcccgacatgctgcgactgaacgctgccaagtaccccaacgagatcgccctggtggagattaacccggccatgccggaagaccgccacatcacctggcgcgagtacgacctggtggagaccaccgacgacgagccctaccgccgcgagatcacgtggtcggtctttgacgagcgctccaaccgcctggccaacctgctcattagccgcggcgtgggcaagggcgacaaggtggcaatcctgctgtacaactgcatcgagtggctgcccatctactttggcatcctcaagacgggcgccacggccgtgccgctcaacttccgctacgacgccgaggagatgctgtactgcatcgagaagtccgactccgacgtggtgctctttgggcccgagttcattggccgcatggagtctatcgtgggcaagctgcagaaggggcgtctactgttctacgtgggcgatgactgccccacctgggccgagagcttccgcgagctagaggccctgtgctccagccacgacccgcagattccgctctttgagtacgacgacgcggccatctacttctccagcggcaccacgggcttccccaaggccatcctgcacaaccacgagagcctgacgcaggcggccgagatggaggcctaccaccactccatccagcatgacgacaacttcctgtgcattccgccgctgtaccacaccggcgccaagttccactggatgggctgcctgacctgcggtgccaaggcagtgcttttgcgcggcgtgagcccgcagtacatctttgacacggtgagccgcgagcactgtaccgtggtgtggctgctcgtgccctgggtgcaggacatcctggccgccatcgagcgcggcgacctcaagctcgaggactacgagctcgaccagtggcgcctgatgcacgtgggtgcccagcccgtgcccaagagcctcatcaagcgctggaagcaggtcttcccgcaccacgactacgacaccaactacggcctctccgagtccacgggccccggctgcgtgcacctgggcgtcgagaacatcgaccatgtgggcgccatcggcgtgccgggctaccgctggcgcgccaagatcgtgggcgaggacggccaccgcgtggagcagggcgaggtcggcgagctgtgcgtcaagggcccgggcctcatgacctgctactacaacgaccccgaggccacgcaggagaccctcatcaacggctggctgcacaccggcgacatggcgcgccaggacgacgagggcttcatctggctggtggaccgcaagaaggacgtcatcatcaccggtggcgagaacctctacccggtgcagatcgaggacttcatgagcgcctgcccggccatccaggacgtggccgtcatcggcctgcccgacgagcgcctgggcgagatcgccgcggccatcgtgcagctcaagcccgaccacatcgacaccaccgaggacgacatcaaccggttctgcctcgacctgccgcgctacaagcgcccgcgcaggatcatctttgccgacgtgccgcgcaacgccaccggcaagatcgagaagccgctgctgcgcgagcgctacggtgccgccaacctggtcgaccaggagaaccaggggtaagcaaggtttcatagaccaagagagagcgccttccctgccgtcaggggaggcgctctttcgttcgtgctttggcgtgggtgacgaggtcaaggtgaccgagaacaacggcagggctcacaccctcaaggttgccggcgtgttcgagtactacctgctgctttcggccctcatggctatcgtggtgctgctcagcctcgacatcatgttcgtggacgagaagaagcgcgagctcatcgtgctcatgatcaacggcttctcggtcaaggacgccaaggcctacatctaccgcgactcgctggcgcgttaccggtggccgtgctgctctacgcgctgcgcaagattccgcgccttgacctcacggatatcaaccgcttctagggcggcgcatacgtgtttgggcgggcggcctcgtggttcacacggggccgttctcgttgccgctctaacgcaaggttactggcgttagcgtgtcgttgcgcgctctaacgcaactttaaggccctaaagttgcgttagagctttgagattggcgctaacgcaacttaggttgcgttagcgggcggtgtaacgagaggctcttggcgacaatgcgagaggctggttttaccactcgtcaccttccgccaacttcaccggaaatcttcaatactgtcttagtaaagttatacagtcgtattcaggtgtgacggtgacgactttcgcaatttgcggaggcatctcatttggaggggacattcatgcagcagccctatctagtgcttgggattgatccgggaattgccagctgcggcttttgcttgttggataccgcgaacaacagaattctcgaaatgggcgcgcatctctttgacgcaccacaagaagacaaaacgcgcgtgagcttggctactaccagaagaaacgctaggagcacccgcagaaatattaagaggcgttcggatcgtcagaagcattgtctcggactccttgccgagtacgggctggtgccacaagatgcgccaaagggatggctgcagtcgcggaaaggcgacgctccggtccttagcctgcgggccaaggcgcttgatgagctaataactgatcgcgagctcgcacagatactgtactctctgtcagcgcatcggggctacatacctcacggcgaggggtctctgaccggcgaaggagatgtggacgcagagactggaaaagtgcttcgagccattggtgcaaacacgaaggcgctgagcgaaggtgggtggcgtacgattggcgagatgctgaatgatcagaagcgctcgcgcaacaagagaggcgcgtatgacctatgcgtcctcaattcgcaaattgttgacgaagttcaccaggtgatgcacgcccaacggacatatggcaatactcgtgcttcctcagagctagaagaacgctatctcaaagtgcttacttgggagaagccttcgctaggccatgacgagaaggtatacaaccttgttggaagctgttcttacttcccagaagagcgacgcgcggcaaatgcaacgttgtcctctgagctttgtcgtgcttacgagaggcttgggcatctcgtgatagtcaatcctgacggcagtgagcgggtattgagcgatcacgagagggaagagctgctatccatattgtttgcggtaaaagcaatcaaaggaaacaaagagtgcaaggtaacgtacgccaacattcgaaagatgctcgaccttggcgcggaatgcttcttcaaaggcgttgatcaggatgacgaaaagaagcgcgagccctatgagccgcgcgcttggcgcaatatgcggtcacatggcgtacctagcacccttctcgaacgaatgctttccgacagagactttgctgacaagattggtgaggcgctgacctttgcaagtacggaggaaagccttcagatgcgcttggaaagtctggatttgaccgacgaagaatacgaatcaatagccgcacttcccttcaacagcaaggtttataagggctatgggagtcgcagcctaaaagcgctcagcttgttgctagatgcctttcaggaagaagggattcagacactcacggatgcagaggaggcttcgggattgcttagccggagactcgcaaagggtgaggagcgaacgacccaattacccacgtacgatgtatttgaccccacttgcaacaacccggttgtgctgcgtacgcttagcagaatgcgccgcatcgttaatgcaatcattcgaatacatggtgtgccaaacgagatacacgtggagcttggtcgtgagctaaagcagtcgaacaaggagaaggcggccattcagaagaacaacgccgctaacgagcgtgacaggaagcgctgggctggcacccttgctgaggttatgagcattagtcctgacgaggtgccgaacaagctaatcagaaaatgtatcatgcgagaagagcagggtgagagagacccctatacgggtgaccccatcgaacttcagtgtctgatagatgacgatcgctattgcgagatcgatcacatcttgccctattcgcggacttgtgatgacagcagaaggaacaaggtgctcgttctttccaagagcaatcaagacaagcgagaaagaacaccctacgagtggatgacaagcggcgaggtgaacgcaccatcgtgggatgagttccagaaaagagtccttaatagcaaggctctcttgcgaaagaggggttatctacttaaccagtcgctaggtgtggatgaagagaccaagttcctccagcgaaacctcaacgatatgaggtacatgtcgcgtgccgttaagaactggcttgagaaatcgcttgcccttcccgagggtggacgagttgtcgcggttgctggcggcgcaacggcgaacttgcgtcatgtctgggggcttaatactggcccaaacaacaaaaaggaccggtcggacgatcgccatcatgctatcgacgctgcggttattgcggcatgctcccagggaacgctcatgaaggttgcgaaggcaagggcccttggcgcgaaagcgttcagacgtatgcgagaaagccgcctttccgacacgcagccgtggccgacgtttgccagtgaggttctcgcgcaggcagagtttatcatcccaacgcgcatggttaatcacggacttactggcagagcgttcgaagatacggcatataggtatgttggagaatccgacgatgcgaatcgcagaggtgttctctatgcaaaaggtaaagaggtcaagaagggcaacttccagataggggctgacggtaacgcgcgaatcgttgatggaatggcgttcctacgtctttggcttgatgtggaaggaaacgcaggtaaaggcaagtggtatgcagagcctgtgtactatgccgacataccacacatcatgaacggcgactacgtcgctcgcgtcgctccgaaagcccatgttggtagaactctcggatggatcgagttgccagaatcagcgcggactacagcaccgatcaccgtctttaggaacgacgctctggtagtggaaagccaaatagtgcgttatacgggttttcatgtcggtagcgttgcaatcgaatacgaaatgattggcccagctgttgcgcaggtaacaataccatcactcggcaagtgggacagcaacaccagggtaagagtgctcgaggaggattgtctcgggcattgctaccgggagtttggttacaacatgccacagaacagcttagatgacgagtgttagctgtgctccagggtccgtaaggtccttatgcgacctagtgtccataaggaccttacgcccctcatactgcttctccgtcaaagtgattacggtaactgcgccagttgatggtaggtgggctttgagtcttctcagatgggactcggcgctatcgcgggagagcgtaattctcgaatagacgctaaaccgctccatgtgatagccatcctcaacgagatatttccgaaactgggcgtaagaccttctttcagttttgttgcccgtgggaaggtcaaatagcacg

SEQ ID NO: 2689 - DNA, 12011 bp, synthetic construct
  source 1..12011: mol_type = other DNA
  misc_feature 1..12011: note = Synthetic
cgggcgacatcgagttctgcgacatcacggccaccaagatcatcaccatgaagatcatggactcgaccgacgtggatatcgtgaatgcccagaatgctgcggatgcctccacgcagacgagccccaccgatgccaccgcatccacgaacggcaccgagagcggcagcgcctctgcgaatggcacgacatcgcagagcgcctctggctcgaccacgacgagcacggagggcacgagctcaactgattccagcgcatcgaagagctccagcagcacatccgatgaggccaccccggtcaccgtcgaagaggcagtcgctgctgtcatccagcacgcgaaggcatacgacgtgaccgacgacaacatcgtgcaggaggcagcgacgctcgccaaccgcgacgcgacgaagctcacgatcacctacggcgatggcaccgaggtcatctgctggatcctcaccgatgattccggcaatgtccgctatgtggcagccgaggcaccggccgattctgtcgccgaagtcgcttcaattgtcgagaacacctactcattctaattttcaattgcgcggacgccccggctcacgtatactattctccgcgcttcggggcgtagcgcagcttggtagcgcatctgctttgggagcagagggtcgctggttcgaatccagtcgccccgaccagactgcggcggtagttcaattggtagagcgtcagccttccaagctgattgttgcgggttcgagtcccgtccgccgctccagagaattcaaggccacgggcattgcctgtggccttttttaatgtgaagacagccccgccatcagacagccagctggcacatccttccgcgtctcctcaaatattcatctgagctgtgcgcatccacacgtcacatctctgtcagttgcacaaaaatgctgcactctcggataaatattcaccacttgccgatttcgcccaccataagggaaattgctatcttgacttaacagtctgtcagtcaagtatggagatagcaccaggcaaaggaggcagacagggatggacaagcagattcgctggggcatcatcggctgtgggcggatagccaagcgttttgccgcaagcctcgctggttcgccagaaggaagcctctatgcagtggctggccgcagcaaggagaaggcagacgcgttcgtgcaagagcatcctgctgatgtcgcctatggctcctatgaggagctggtggatgaccctgcaatcgatgcagtctatatcgcgctcccccatgccctccatgccgcttggtccatcaaggcactgcgtgctggcaaggcagtactctgcgagaagcctgcggtcctctctgctgatgagatgcacggcgtcattgctgcagcaaaggattcaggcaagctctatatggaggccatgaagacgaggttcctgcctgcgcacgacaagatcatggatctcttgggaactggtgcactggggcagatcacctttgtcgaggcagcacagtgctatgagttcccgaaagatatcagcggctatttcatcgatcccatccagggcggctgcctctacgacgaagggatctactgcatcgcctggctcgatgagctgctccccggaactgtccatatcgaccgcaccaatacggtcttcgagcgtggcgtggactggtacgacaatgtgcagatgagcatcggctcggtgccagtgcagcttgaggtggcagcagaccgtggccccaagagcaacctccatatcgagtgcgagcagggctcgatcgatgtgccgctcctcaatcgtccccagtctctcgttatccaccgcttcggctcgcctgacgagacgctgactgcaccctacatccacgatgatttctatgggcagatcgagcacttccagaagctactcttggaaggcaagcaggagagtcctgtcatgccgtgggaggcgtcgcttcgctgcgcacagatgatcgacctcatccgcgactcctggaatgcatgattagctcgatgcaggctcgtccgctgggacataccctccttctggccaaccctgtctcgagaagcggcatgggaaaagaaggtgcagagcgcatctcgcagatgctctcatcgctcccctcctccacctgcacccttgaggcaaagctcaccacaggtccaggcgatgccacgaagatcgctgccgcagcaggcgatttcgataccctgcttgtgctcggaggcgacggcgtcatccacgaagcggtgaacggcctcatgtccctcgagaaagggcagcgccccgtcctaggcgtcattcccatgggttctggcaatgactatgcccgcaccctccacatcatcaagaaccgtcccgagaaggccatggagcagcttctggcagcccatacgcaagatctcgatgtcggccaggtcaatggggttaatttcatggagacgctctcctttggtctcgatgccgcaatcgcgctcgacacgatgaaccatcggacaactggacgtggcgcccatctctttgctgactctggctggcgaatcttctccacagcaaaggatggctatgccttccaaggcacgatagatggcgctcctgtctcagggaatgaggcagtctttgccgtgcagctgggacctacctatggaggaggcttccggatctgccctgccgccaagcccgacgataggctgctcgatatctgctactcaaaggagctcccgagcgtgcctatcacgcttgccgtctttgcccttgcccgctttggcctccatacgcgctcgaagcatctcttcttcgtccaggcacaccatatcgagctcgatttcgaggcagcccctccctgccaggtggatggagagcggctcgtagccacccatttcgagatcgattcggtcccctgtgccatcaaggtccttgttccagcgcattgatgaaatggagcctgcaggccatacatcgagctgttttgccgcaatctgatccaaaagaaaggggacgccatcgctggcgtcccctcattgctgcatatgcaggaaagactacttgacggcagcctggagcatggcgcggacctcgttcgaggtctcgagcttcatgaccttctcggtcagggcatctgcctcttccttcgtccactcggagataatcttgcgggtgcgcaggacagagccagcggagacggagaactcgttcaggccgaaggagagcaggaccggaaccatcagaggatcggctgcgacctcgccgcacatgccgaccatgatgccagccttgttgccctcttcgatgatgcgcttgagggagcgcagcaccgacggctgatagacgttgtagagataggcgacacggtcgttgccgcggtctgcgcacatcgtgtagccgatgaggtcgttcgtgccgatggagaagaagtcgcactcagcagcgagaaggtctgcgatcagggatgcagacggcgtctcaatcatggtgccgacctggatgtccttgttgtaggcgatgccctcggcgtcgagctcctcctcgcaggtcttgatcagggccttggcctgacggacctcgtcaagcgtggtcacgagcggcagcatgatcttgatgtcgccgaacgcggaggcacggagcagtgcgcggagctggaccttgtactggtccgggttgttcaggcagtagcggacagcgcggaagcccatgaaggggttgtcttccttctggaggttgagatacgggatctccttgtcgccgcccacatcgagggtgcggatgatgacctgcttgcccttcatggcaagagcgaccttctggtaggcctggaactgctcctcctcggaaggaagctcagaggcatccatgaagagaaactcggagcggaagaggccgatgccctcggcgtcgtgctcgatggcagaggcagcgtcgctcgggttgccgatgttggcaacaagcatgacctcgtcgccgtcagcggtgaccgtcttcttgcctcggaaggcctcgagagcgagcttctcctcagcgagcttcttggcggttgcgcggaagttctcgagctcgtcagcagacgggtcgacgtacacgacgcccttgttgccatcgacgatgcacatatcgccggtcttgatgttggccgtggcatcaggcacggaaaggacagcagggatctcgagctggcgtgcgatgatggcggagtgggacgtgcggccaccggtctcggtgatgatgccgacaatgttcttcttgtcgatgtcagccgtcatggacggggtgagctcatggacaacgacgacggagttctcagggagcacagccaggttcacgagctccttgccgagaaggtcggcaagaaggccagtgcggacgtcagcgacgtcggcagcgcgctcacggaagagctcgtcctccatgccggagaacatgttgtagtacatgtcataggcgccctggacagcctgctcagcgcacatgccgtcgtcaatggagttgttgaccatatcgacgatgccctcgtcctcggcgaagtcgatatgggcctgcatgatctcagcggtctgctcgccgacggtctccctcatgcgggcgatctgtgcctgggtctgctcgacgaacttgttgcgggcagcgacgtagcgctccttctcggcagcaggatcctccgggctatgcggcgtgaacgaaaggtcaggctcgactgcgacacgggcgacgccgatgccgatgccctcagatgcattaactccctcgtacatgtttcctccgatcggatgcgagaagcagccgatgccgcctctctgcaactcccccaatactcaagcaccgctgtgcagtgcaaagacagaggtgcgatgtccccacatcgcacctctgaatcttccttaggcctcgccgtcggcgaccatcttgtccagacgggcgacgatgcggtcaatggtggcacgctttgcgatgcccttgcttgctgcggtagcagtgccgcatgcagacgagaacagcagagcgcggtcatagtcatgcgtcttgtcatacgtggcaacgaagccagcgaccatggagtcgccagcgccggtggcattgacgagcttgatcttggcgcagggagcgacatgctcctcgccgttctcgtcgacgagggcagcgccatggctgccgcaggagacgaggacgttctgggcgcccatgtcatggagcttgtgggccagaggcatgacctcagccggggtctctggcagcggcttcatgccgaagatgcggccgacctcgtggttgttcggcttgatcaggaacggctttgccttcagtgcattcatcagcaggtcgcccggtgcatcgacgacgaagcggatggcacgaccagccaggcggtccatgatgatcatgtacatgtcagcaggcagcgaagacggaatcgagcccgtgaggacgagcgtgtcgccctcgccgaggtagtcgatgcggtcaagcagctcgtctaccttggactgcgggatcttcgggcccatgccgttgaccatggtcataacgatgccattgagcttcacgttgatgcgcgtgttgcccttgtcaagacggacgaaattgcagctgacgcccttctcctgcaggcgcttgatcaggtagtcacctgtgaagcccgcagcaatgccaagtgcgacattgggggtgttcagctcattgagcaggcagcagacgttgatgccgttgccgcccacatgaatctcctcctgcttcgacctgttcgtgaagcccatatcgagagaaaggggatacatcacgtagtcgatagccgggttgagggttacggtgtaaatcaacacaggctcctttcaatcagaagcacatcaaagcagccgtagtccctctcaacgtctgccctaaaacgcgatgcgatacttacttcacgtactcagcgacggtggcagcgatggctgcaggatcgtcagactcggagatcctggcgcgggcgtcctcatgcatcagcatgctggagacctttgcgaggacgacgaggtgcgtggtgccagcctcggcacccggcataacgagaccgatggcggtggtcacaggcacatcgtccgtggacttccaggagacatcgcctgcgagcttcgcgacgaggatgcccggcttcttgattgcgtcgtccttggcgtgcgggatagcaaaaccgtcagccatgcccgtgcttccgagctcctcgcgatgcttgaaggaggcgagcactgcatctgcgtcgtctgcatagccgagctcgacagccttgccggcaaggaacttgaggacatcgtcaacagaggatgcctcgacgttcaggaagacatttgcaggggtaatcatttcactcatcttagattcctttcccaaatctactgagctggccccggtctcgagccgagatacctacgaaactaagaatacaacaacgcagccctgcatagcatgattgcttacagtctttagggcacacggtcggaaaacctgcccgaaagtccatgtcatctgcaaacacaaggccttgtatgctccttcccagatatcaccatatttcgtaagctattttccaaaccaaattctaccttcccacaaatattcgtctgcacaatttgcggtaaacgtatgcgcaaggcccgccacaggtcaggagcgcataagcacgaagagaaaccgtacgatcttagctatcggtgtataatcaatagctacgcgcccttagcccagctggatagagcaggggacttctaatcccaaggtcatgcgttcgagtcgcatagggcgcaccagataacacagagcctcccggagaaccgattctccgggaggctttctcgtctctatcggccaagcgcaagggcttgcgcagcgatgatggtcttgccatcctggatgagaccagctctggcaccctctagcacatcctcaagaggcagccagatagtccttacaaactcccctacgtcagggtgagccacactctggcggagccctacagccttatagatgtgggtcgcctcatttgtgaaaccaatggatcccgcgaaggttgcgattggcacaagttcgtcagcaataagccccgtttcttcaatcagttctcgcgccgcacaatcttctggggcctcgttctcgtctcgcttacccgcaggaatctccagagtcattcggccgagcgcgacacgatattgtctgactagacaaatcttgccgtcacgcaagacggcaacgccgcagccaccatgatgccaggcaatctctctatcaccatagctcccatcgggcagcttcaccttcaggagatcagcggaaaagattctacctttccacttcacttcatcagaaactacctcttcatatagagatggatccagttcctgatacttcctgatgctgtccagattgccttgctccatggccactcccccgccgcatatcaatgagagtaaaaaaatagacgagacaagtctatacaaataaagccgggaaaaacccggcttgcaaaattctggtgcgccgtcagggattcgaaccctggaccttgggattaagagtcccctgctctggccagctgagctaacggcgcaaaatctatgtcactacgagagaggaaatggtgcgccgtcagggattcgaaccctggaccttgggattaagagtcccctgctctggccagctgagctaacggcgcatcttgtcaaacaagcaaatggggtgggcgaagggtctcgaaccctcgacctacggagccacggtccgtcgctctaccaactgagctacacccaccatccgttctgtttgtgccctctcaggcagctcgtctattattgacgagactggcaagcaatgcaagaggaaattttagtttctatgctctgaggcccttttgtggacaaagtttgaaggtcacatctcaagcagcagttgttcctcattatccatcgaatcaattacagccacttggcagtcaatgctccccaccgaatgcagtcaaatcctgtcgtcttccttcttatactgttcctaatgtttatcaagtttcatgaaggagcatcaatggaatctgaacgtgcttatctcgttcttggacttgatcccggaatcgcaagttgtggcttctgtcttctggacatgaccaaccataagatacttgagatgggctctcgccttttcaagacccctcaagaggacaaaacaaaggtaagccttgccgtaacgcgtcgcaatgctcgtagtgctaggcgcaataatgagcgtacgaagtcgcgcatgaaacactgcatggatattttggccgatgaggggctaatacccgaagatgctgataaaacttggttccagagtaagaagggtgacaagcccattctgaaacttcgctcctgtggacttaacagagctttgactgaccgggagtttgctcaagtgctctattcactctgcggacatcgcggatacattccgcatggtgagggaaaagatgccgagacggacgacgctgaaggaaagaaagtccttaacgccatcaaacgtaatacagaagaaatggctgcaggcggataccgcactgttggagagatgctccattccaggggcaaatctcgcaacagaggcggaaactacgatttttgcgtctataactctcagatccagtctgaagtgcatgcaatcttcgaagcacaacgtgctcttggtaatctcaaggccaacgagaaatttgaggacagatacctagaatgtctaacttgggaaaagaagtcttcggatcatgacaagaaggtctatgaccaagttggcacctgcatctatttcccagagttgaaacgcgctgcggatgcagacgtttcttctgaactgtgccgcgcttatgaaaaactagggcatcttgtcattgtgcatgttgatggtgccgaacagaggctcacaggcgaacagattagccactacattggtatccttttctctccaacaccgctgaataacaacaagtactgtaaggtgacatacagcaccattcgttctgatctggacctaagtggaaagagcgtattcaaaggcgtcccacaagagaaggagaaggacgaagtatttgtgccaaaagcttggcgctgccttcgcaaggttcttgccaacgaccacgaggatctgctcgaccgcatgcttaacgaccgcgaactgggtgatgcaatctgcgaagcactgacattttccagcagtgagacaagccttcaggagcagcttgaaccacttgggctcgctgaggatgaatgcgttgccctatcgagtattccgttcaacggaaagctgttcaaaggttatgggagccgtagcatcaaggcgctcagcattcttcttggagctttcgaagagccaggcgttcaaactcttgcagatgccgaaaaggctacaggccttgataggaagcgattagaagaccgtgtagccagatccgagctcctgcctccatataacacttatgatgagacttgtcgcaaccctgttgtgttgagagctatggggcagatgcgacacatcgtcaatgccatcatcagaatctatggcgtacccgacgaaattcatatcgagctcggtcgcgagctcaaaatgtctgcacgagaaaaagagatggtctccaagcgtcaacgtgcaaacgagaccgcaaacaaaaactgggctgcaatcgcagcaaagatactctgctgcgaaccggaagaagtacccggacaaacaattcgcaagctcgccttccgagaagagcagggcgagaaggatatctatacgaatgctccaatagatctcgagaagctcgtgactgacaaccgctactgcgagatagaccatgttctcccctactcgagaacctgcgacgacagtcgagccaacaaggtgcttgtcctctcggcaagcaatcagaacaagcgcgaacggacaccgtatgaatggatgtcgcaggacgctggcaaagccggcacacccaaatggagcgaatatagcgctcgggtaattgctactgtcaagaaccctcgcaaacgagcgaatctcctcaatatggatcttgataaggatgcagagagcgaattcttgcagcggaatctgaacgatacgcgttacatgtcagttgccgtcaagaactatcttgaggattgccttcaattcccagacgatggacgcaagacccatgtaatcgccgttgctggtggggctacagctagcctgcggcatgtatggggcctcaacttcggcaagaacaatgaaaaggaccgaactgataacaggcatcatgctgtcgacgctgcagtgattgcagcctgctcaacaaaaaccgttcaagctgttgccagagcgagttccgttggcagggaatcattcaagcatatacgccaatctcgacttgctgatacacagccatggaaaacgttcgcagaagatgtcattactgaacgaagcttcgttatacccacctatatggccgaccatggtgtaaccggttgtgtattcgaggacttctcttactcgctagagggaatagacgaaaagggatatgcgcatatatcaagacagacggatcggacaaccggcgaatgccgaagcttgaaggcaagcaactttgaaatagttaacgaaactacagtgaagcttctagactcaatggcatttcttcgtctgtggcatgacccccacgcaggcaaaaccgggcgttggtatattgagcctgtatattgtgcagacattccgaacttagacggaaagacataccatccacggtatcaaaaacagaaagtcgcacgtagtggctggcctttggtccctgctgaggccctaaagaacaagcctctgcttctattccgaggtgatgtgctgattgtcggtaatcatattgcacgctattggaaattcgatattggcggagggaaggtcaccatgttgagcattgttgatatcaatagcgaagcgaaaggattcccaagcatcagcaaatggaaaaacgatatgccagtaagaattctcagcgaagactgcctggctagctgctataagcacatgaccatagattccgaaaattcaaccttcgaagagcgataagccgatgagaaaagcggatggtattactatgcgtctcaagcaataccatccgcctgacatttcattgtttcagacggacgctatttgttcgtctgaatatttaatgctgccctatggagattgaagatgatgtttaccccatcaggctggaatctttgttctagaacactggtctagaacgccaaggtaagctgaggtccaggatctgtgtctggtacagtcgactgccgagtgtccacaagcacttcacggtcctcaaattgcttttccgtaagagtcagaacggtgactgcgccagcttccggtaggttcaacttcaaacgcttgaggtgtgcatccaagctgtcacgggaaaggaggatacgtgaatacacactgtattgctccatgtgatagccgtctttcacaaggaattttctgaactcagcatatgacttccgctcctctttgcttcctgtcggtagatcaaatagaaccagcattctcatgaccctcatcattgctccttattccatgctcgcccgatgcaatgaagttacggccggcagttgaagcagcgtagagtcaccagctttcacggccgttttgagtgtgtcgagctcatattcaattgccacttgaacaggtacatcgcccagtggaatatgaaccatgtattcgaaaattgatgccaacgtacgtctagcggctggtgttagttcgccttcgatcccctcctggacaacaagcagatccacgacaggtctgaaaggttctataagatcgtcaaccagattgaatgcattaagattgctgcagtggtgaatgcctcttgaaactagccatccaccgcttacggccgtacgtccaattccggctcgtagaaccgtatatccataatcaagtgattctgaacgagagctattccttctgccgccatctggaagtagttttttgaagtatgcgctagc

SEQ ID NO: 2690 - DNA, 10605 bp, synthetic construct
  misc_feature 1..10605: note = Synthetic
  source 1..10605: mol_type = other DNA
cctcggcaacctcgggaatggcgtttgccacggcaacggagttgggcacggcgccaaagagctccaggtcattggccgcgtctccaaagaccagcacctcgtcgggcgtgatgtccagctcgtccaggaggatgggcaggctcgcggccttggacatacccttgggcatgacgtcaaaccagtccgggatgggggagactatgcgcagctcgggcacggcctcggctacgattctctggcagcgggccatgcgctccggaccgcccgtgcaggcgatggtggccgccacaaacggaatgtcgggcacctcgtccaccacgccgccgttgaagacggtgcgggcctcaaagacggcaagctcagcgctgctgacgcccacgccgtaggcggggttcatgaggttggtctcttctgggaagcagaccaagaacatgcccttctcgccgcgaattgcctggtcgatgcggacgagctggtcatgcgggatgagcgtggtagagacgtagcgcccgtccagccgcacgcgcttgccgttggagaagatgcccgtcatgaagcactcctcgtgcatgcggaagaggcggctgagctccacgtagtcacgccccgtggccgggccaaagcgaacgccagcatcaagaactgcatggattgcctcgacggtgcgcggactcacgcgctggccaaggggtatgagcgtgttgtccatgtccgacagaacgagctttatcacgcgtgctcctttcttgatgcggccccggcggccccgacggccgcgctggcgagaagcccgcgccgccgtggcccttctcggctagaccagcgtgccgtccgggccgtactcgatggcgtcgaagcggtccaggtgaagcatgatctgctcgatgtccatgatcccgagcagggttgccacgtgggcgccgcccacgcccacgtggaggttgcggtagcccgtgccgtggcgcacgcccgtccacgagaggcggtcgacgtcggagtagcgcaccagcacccggcgccccatcagcggggtcaccaccatgtggtcctcaaagagcgccacctggtggcggcagagcgccagccacgccacaaagaggcagatgacaaaggcgtcaaagaaggccagcacgaagacgtagcgctgccagaagacgcccgtaaggcacagcacgccgagcacgacgcccacaccgcccatgacaaccatggccttgaccagcgagtttgtgagctcggggggaacggtgtaggtgtcgtggtggcggtggtggcgctcggcgatgagcaccttggcgccgcgctcgacgtaggccgcgcccagcggaagcaggatgcccaccatggccagggctaggaacatgggctactccccgtctgcggcgccagccgtcggggtggccacggtgccgtccgcgcgcacggcggcgaacttggccaccagacgctccagcaggtcgaccgtgagctcaaggctgcgcacgggaacgaactcgcgcaccgagtgggcgttgtagccgccggtggcgatgttggggcagggcaggccgcggaaggtcagctgcgcgccgtcggtgccgccgcgggccgggacgagcacgggctcgatgcccacctcgcggttggcctccacggcatagtcaataagcagctggtcagcgggaccgaacttctcggccatgttgcggtactgctggcgcacctcgacggtgaccgtgccctcgccgtagcgggcgttctggaaggcggcgatgcggcgcagcgtggcctcgcgctcgtcgaagtcggcggcgtcaaagtcgcgcaggatgtagcagagcttgacctcgtccggggtgccggagatgtccgcggggtggtagtagccctcgcggccctcggtgtgctccgggcgctcggcggcgggaaccatctgctggaactcggaggccagcgtgatggcgttgaccataatgttcttggcgctgccggggtggaccaccacgcccttgaaggtgaccgtggcctcgctcgcgctgaagcactcgtagttgaactcgcccagggcctcgccgtccacggtgtagccccacttggcacccagcgcgtcgaggtccaggagctccgcgccgtggccaatctcctcgtcggggacaaacgccaccttgatggtggggtgggccagctcgggattggcgaccagacgcgccaggagcgcgcaaatctctgccacgccggccttgtcgtcagccgagaggagcgtcgagccgtcggagcacacgatgtcctggccttggaacttggccaggtcgggcacctggtccggcgtggtctggacgggctggccgtcgacgatgccggccaccagcgggccgccctcgtagtggacgatgtggggcttgacgccggaggccggggcgtccttggcggtgtcgatgtgggcgcagagcatgagcgcgggggcatcctcggcgcccttggaggcgggcagggtgccggtcacgtaggcatgctcatcaaccttcacatcaatgcagccaatggagcgcagctcttctcccatgacctcggccatcttgtgctgagtgggcgttgagggtgtctgcgcctcgttgtccgggtcggactgggaatctacctgcacgtagcgcatgaagcgctcgacgacatcactcatggtgcctcctggcgttgcgcgcacggacgagcggcgcggccgccggcgccgggcgctggtcttgtctgggtgagattctactccaggtgtgcacggccgcggcaaacggcgcgtaaggtgagggccgcaaacggccctcaccacgttttgggttcgcggatttggcggcgagacaagcagcacttgatgagcggctcttctacctgcgcttttgctacgccattctgggaaggcgccgcgatcgcccggtaggccgaacccagatcggatattgatttgggttcgccgctcggccggtcccgaggcggcaaaaagacccgcaggcctccgacctgcgggtcttgtttctcgtctctgcgacggcgcccgaaccgcgaacccaaaacgtgttttggccgcgtctgaagccgccttgggggcgtcctagagcctggccacgccgctcttgcgggccgcatcggccaccgcggcggcgacggcgggggcgacgcgctggtcaaaggcgccgggaatgacgtactcggcgctgcggtgctcgtcgtccaccaggccggcgatggcgtaggcggcggcctccatcatgtcgtcgttgatgtcggaggcgcgcacgtccagggcgccacggaagatgcccgggaaggccaggacgttgttgatctggttggggaagtccgagcggcccgtggcggcgacggcagcgccggcggcgagggcctcgtcgggcatgatctcaggcacggggttggcgcaggcaaagacgatggcgtccttggccatggagcgcaccatgtcctgcgtgagcgcgccgggggcagagacgcccacaaagacgtcggcatccctgacggcgtcggccagcgtgccagccacgtgctctcggttggtccaggaggcaacctcctccttcaccggattcaggccctcccggccctcgtagatggtgcccctgcggtcgcagatgacgatgtcgcggacgcccatgcggcgcatcaggcgcgcgatggagatacccgccgcgccggcgccgctgaagatggccttgacgctgcccagctcgcggccggtgagcttgcacgcgttgataagcgcggcgcaggtcacgacggcggttccgtgctggtcgtcgtggaagacggggatgtcgcagacctccttgaggcgacgctcaatctcaaagcagcgcggcgcggagatgtcctcgaggttgacgccgccaaagctgccggccaggagctccaccgtgcggacaatctcgtccacgtcatgcgagcgaatgcacagcgggaaggcgtccacgtcggcaaaggtcttgaacagggcgcacttgccctccatgacgggcatgccggcctccgggccaatgtctcccaggcccaggaccgcgctgccgtcggtcaccacggccaccaggttgccgcgacgggtgtaggtgtaggagtcctcgacgtccttctggatctcaaggcagggctgagcgacaccgggcgtgtacgccacggccagctcctccggcgtgctgatggaagcgcggctcacgacctcgatcttgccgtgccactccttgtgcttgtccagggcatactgcttggcgtcatcggccatggcgtctcctatctgccgggccgcccgcaggcggcgagctgctcacatatgtgggtagcgtaccctgcggccgggcaacccgcacgcacttctcggcaagcgcgccccttcgcactcatgagtgcgaagcagaggtgtgaaggttgcgcctcgcgctcatggcggcgctggcgagaaaaccgcaggtcgcgcttctcgccggcaattcagtgcgaaggttggcagccccggccttcgcactcatgagtgcgaagcgggccctcccgccgctcgcaacgcccctccgacggacaaggcgtcaattcttgtccggctcgtccatatactcattccatagtcgagagaaatggagggacaaccatggacgcaaacaggccttacctggtccttggtctggatccgggaatcgcaagctgcggtttctgtctgctggacatgacaaaccacaagattcttgagatgggctcgcacctcttcaaggccccgcaggaagacaagaccaaggtcagcctcgctgtcacgcgccgcaacgcgcgaagcatccggcgcaacacggccaggaccgccgcgcgcctcaagcactgcctttcgcttcttgtcgaggcggatcttgtcccgcccgatgcggacagagcctggttccagacaaagaagggcgataagcccgtcctgaagctaagggccaccggcctcgaccgccttctcacagaccgtgagtttgcccaagcgctgtattccctctgcgggcgccgaggctacattccccgcggcgagggccgactgggagaggcagatgacaacgacaacgagggcaagcgcgtcctcgacgccatcaagaagaaccaggaggccatggaggcaggcgcctaccgcacggttggcgagatgctcaacgcccagggaaggtcgaggaaccgcggcggagactacagcctctgcgtctacaactcccaagttcaggatgaagttaagaccctgtttaaggagcagcgagcactgggcaacgccaaggcaaccaaaaagctcgagcaagcctatatcgactgcctgacctgggagaagaaatctctcgaccacgacgcgcgcgtttacgagctcgttggcgagtgcgtctacttccccgaggagaagcgcgccgcaagtgctgacatctcgtcggagctctgccgcgcctacgagcgccttggccatctcgccatcgttcgcgaggacggcagcgatcaggcgctttcagccgagcagattgcgcattacctgggcattctcttctcgacggccccaatcaaggggaacaaagactgcaaagtcacatacgggaccattcgcaaggacctagatatcagcggcaaagacgtcttcaaaggcgtggcgcaagacaaggagaaggacgaggtcttcgcccccaaggcgtggcgctgcctgcgcagaactttgccccagggcctgctcgagcggatgttcgacgaccgtaagcttggcgatgccgtctgcgaagccctgacctttgccagcagcgaggcaagtctcgtcgagcgtctctccggccttgagctctcagacgacgaagccgaagccatcctcgaagttcccttcactggcaagctgttcaagggctacggaagcagaagcctcaagaccctcgggttgcttctcggcgcctttgaggagccggaaatccgtatcctcaccgatgcggagaaggccacgggccttctggaccttcgcctgagtgaccgcggcgtccgcggagggctgctgccgccctacgatgagtatgaccgcacctgcagaaaccccgtggtcctgagggcaatgggccgcatgcggcacatcgtgaacgcaatcatcaggattcacggagtccccgacgagatccacatcgagctcggccgcgacctcaagatgtccaacaaggagaaggatctcgtcgacaagcgcaaccgcgagaacgaggccgccaagaagaagtgggcgaaaaccgccgccgacatcctcggcatcgaacccgaggaggtgcccggtcgcattgtccgtaagctcatcatgcgtgaggagcaggacaattgggacctctataccggagacgccattgacttggagcgccttgtccgcgacgaccgctactgcgagattgaccacatcctcccctactcgcgcacctgcgacgacagccgagccaacaaggtcctcgtgctgtccaagagcaaccaagacaagcgcgagcgcacgccctatgagtggatgacttctggcgaagcgggtgcacccagctgggacgagtatcgtgcccgcgtcatggcgctggtcaagaatccgcacaagcgcgccaaccacctcaacaccgatcttggcgaggaggcgcaggcaaagttccttgcccgcaacctcaacgacgaccgctacatgtccgttgcggtcaagaactatcttgaggattgtctgctctttcccgaagacgggcgcaagcgccacgtcacggccgttgccggtggcgccacaggcaacctcaggtgggtctggggcctcaacttcggaagcggcaacgtcaaggaccgcgatgacgatagacaccacgccgttgacgccgccatcatcgccgcgtgttccgagggcaccgtccagaaggtcgccaaggcgagctcgaagggccgagaggccttcaagcacctccgtgagtctcgtctcgcagacacccagccctggccgacttttgccgacgaggtcattgcccgtcgcgagtttgtggtccccacgcgcatggtcgaccatggagtgacgggacgggtgtttgaggacactctctatcacctcgaaggcattaccgaagacaagggaaaataccccctcgttcgagctggcgagaaagtcgccaaacagggcaacgtgcacgtcaaccccgacgggtcagtcaagctcattgacggcatggctttcctgcgcttgtggcttgatcccacagctcgtcccaacggcaaggtcaagggcaagtggtatgccgagccggtgtattacgcagatattccagcaattaaggcggggacttacgtgccgagggcgtgcacgattcacgttgcgagagtgaactggaaacccgtgccagaggcggccgcgcagcaaaagcccgtcgtcttgtatcccggagacgttcttcaagtcggttcccatgtcgggcgttatcgtagttttgatatttccaattgcggcctgagcgtcaatagcctcgttaataaggatgtcattgctcccggcttccctaaaactctcggaggctggggcaaggacacccaagtccgcgtcctccaagaggactgcctcggcaactgctacgaccacatagccattaaccccgacgattccacattccgtcagcgttaacctcgcggggccgcatcgattcgctcgatgcggccccatattcacatgcccttgggcatcttcttgtagacaccttgccgatggcccaccctgacgacatcaatcacaagctcgtcttccttgatcgtcgtcaggattcgatacgttccgaccctatagcgccagccagctcttgtcccctgcaacggctttgagccaagaaccgccttggggttctcgcagccttcaagattctcctggacccacttcagaaccatcaaacgttgttttttctcaatggcgagaaggtccttcgtcgccgcacgcgaccactcgacgcgaaagctcattcggcctccatcgccatgcgcatgacctcatcggtggaatagcggacgccgtcatcggcagcaatcgcgtcctcgtacgcctggcggtcggcagcagcctcgaccatctccagcgctgcctcgcgaacaacgtcagagaatgtcctgcccacaaagtcggcgtaagcctgaatccaggacttctcctccggctcgaagcgaatcgtcgttgcttccattgccatgtcaggcatcccctttcagtcgtattctctcgtaatacgattatacccacttggacctttcctcgattagaacatcagagttagttgcggtcccggatcgactttggctcccggactcggcctgctatcgacaagtacttctcgcccctcgtattgcttctccgtcaacgtgagcaccgtgaccgcgccggcaacgggcaggtttgccttgagcctcttcaggtgcgcatcggcgctgtcgcgtgaaagcaggacgcgggaatagacgctgaactgctccatgtgatagccgtccttgatgaggaactttcgaaagtctgcgtaggaccggcgctccttcttgctgcccgtcggcaagtcaaacatcacaagcatcctcatgattctcatcatcgctccctattccatccccgccttttgaagcgggattacgacaggcagttcgaggagggcggagtccgatgctttgacggctgccttgagagtctcgagctcattctcaatggcaacttgcaccggaacctcgccgagggggattctgactaagtactcaaagatagacgcgagttcacgcttggtttctgacgtcagctccccgcccaagccactttgaatgacgagaaggtcgactatgggtcgaaatggttcgatgaggtcatcgaccaggttgaaggcgttgagattgttgctgtggtggatgcctcgcgaaacgagccaaccaccgctcaccgccgttcgcccaattccagcacgcagcacggtatagccgtagtccaatgcagcggtaaaggggccgttcctgcggttgccttccgggaggaccttcttgaagtaggcgctagccgccactgactcgcggttcgaggtgtctccggacaagacttccttgaccattgctctgacggtcgagccgtccaaaccaagcaagtccatgaccattgcttggtttgaaatcttcgcctgaacgatgctctgccaaagacgtttttgaagcggcttggagattgcgagctggtcatcgactattgcggcatgtctggagtgcgctcccagtggaaggagaagcccgttgggcatgtggtcatcgccgcacagcatgacgcctataccagcatccacgagccgcgagagagccgccgtcgttatctgcgcctggtgagtttctattatcagaacccagatatcctcaagcggaactagtcccctcaactccccgtgctggcttaccgccaaagcgtcatttttgattgagagcgacgcggcgttctgaatgcagatagtcctctttggcacggcagtcgccctccccgctgaggtataattgccttgtctagcgtggtttgtatcaactggggagttggaaggaattacggctagacaagggaatcgcttatgcgattacccgcaaggtaagcccgtcgacacctcacgtgttggcgggcgatccttttttctgcgaacggttttcagaaaaaggcgcacggaggggcatttggagcacccgcattctcatttttatttcagcccaaaccagaacaccccctgctcgcagggggtgttctggtttgggcattgtaccaactggggaattggaaggccggcaagacgggcaatgcatgcgacctcacctgcccctaattgtaccaactggggaattggaaggccggcaagacatacggcactttgtaaatcgcgcgttggtgattgtaccaactggggaattggaaggccggcaagactgtcgttctcggaggatgacgaagggaccaattgtaccaactggggaattggaaggccggcaagacttgggtacctccctcaatatcgcccgtctgattgtaccaactggggaattggaaggccggcaagacctagaaacgagcgcaagcggattgagtcaaattgtaccaactggggaattggaaggccggcaagactagctgtacttgtcctcctcgctggagccaattgtaccaactggggaattggaaggccggcaagactcgcaaacatgcatactgtcgtgtttgacgattgtaccaactggggaattggaaggccggcaagactcaaactgggcatcggtcaggcccttcaccattgtaccaactggggaattggaaggccggcaagacagtgcgggccttggtttcagtggcaagcttattgtaccaactggggaattggaaggccggcaagactcctccctaaaaaggattaacgaagccgtcaattgtaccaactggggaattggaaggccggcaagacaccttggccgcagtaccccaagagccgcggattgtaccaactggggaattggaaggccggcaagacaccttggccgcagtaccccaagagccgcggattgtaccaactggggaattggaaggccggcaagacaccttggccgcagtacccc

SEQ ID NO: 2691 - DNA, 9748 bp, synthetic construct
  source 1..9748: mol_type = other DNA
  misc_feature 1..9748: note = Synthetic
atgatgccgcccaagagcatgccgacggcgttgacgggcagcgacccgtggcgctcgagcgcgcagagcggcagtgagttgtgcaggaacgcgaggacgctgtcgagcaggcaccaggcgaggcctgtgatgccaacgacgagcgaggaggggtctcccttggtcgcgatgcaccagacgccggcgagcgcgagcgcaagcccggcggcctcggtgggcctggggcggcgacgggcgcgcagacaggtgaaggccatcatgtacacgaggttgagctggcccacgagcgactcggtcgcggcgctcgtggtgtcgatggcgacgacgtaggtcacctggagcgcggcgatgccgaaaatcgcgtagaggaccgtgcccgcgagcgcgcggtggtcccgcagcagcgcgaggaggttctctttgtccgtcgccgcgcaaacagccgtgaagaccgcgccggcggtgagcacgcgcatgcagccgagccaggtcggggcgatcgcgtagctgctcgtcatgaacgccacgaggacgtttgagattccccagaaaaacgcgccgaggattcccgcgacgattcccttggtctttgcctgcatgcgaccggtctccctatctgtgtctgagtttgcctaaaagatgaaatcacgtcgtcaaccagaagtacaattcatagatataaagaaacccataagcacaattgattggttgcgcatccatggagctcaggaacatcaagaccttcgcccgcatcgccgaggtgggcagcttcacccgcgtggcgacggagctcggttacacccagtcggccgtgacgatgcagataaagcagctcgagcgcgagctcggctgcgtgctgttcgagcggctcggccgcagcgtgcgcctgacgcccgagggcgagcggctcctgcccgtggccaaccggatgctccaggcggcagacgaggcctcacgcatcgcccaggagccgggcgaggtctccggcacgcttcggatcggcgtctcggactcgctgctcgtgggcgtgctcgccccggtgctctccgagctctcgcgcacctacccgcgcgtgtgcgtctcgacccatcagcagatgcccgacgagcagttcgcgatgctgcgccgcaacgacatcgacgtgctgcttttgctcgacgagcgcatggagcgccccgagtgggtcaaggtcttcgaggcccccgccgaggtcggcttcgtcgccgccgcgaccgatcccatgacaagaagggcgagggtcccgctcgaggaggtgctgtctcggcccctctttctaaccgagcgcgacgtcagctaccgcgcggggctcgacgagcgtatctgggcgcgcgggctcgaggcgaccccgcgcgtcgagtgcggcaacaccgcgtttctcgccgagctcgtggagggctgcggcggcgtgtccttcttgccgtcgtgtgccgtgcgcgcggccgtcgcggccggcaggctcgcgcacgtggacgtcgatttcgagcggctcgacctgtggcaccaggccatcgtccggaagaataaggtcgtgacccctcagatgcgcctcttcctcgagctcgtccagcgcgagttgtgcggctagcccgcatgacggcggccccggtggtcgcgcgaccggcagctccctcctgtttgtcccatttctgggccgttctcggggcaagaaagggtcaaacaggagggagctcgctggggcggacgggcggttgcgcgtgcgctccttgcaagcgagttgtgcaaataatccgcaggttgggtgccgtaggtaccgtccacccggtcgctcgggggaaatgtcgaaggccaccttgtccgagtgcgtgaaggtcatagaatgaggggtgatatttatgaagtctttcttcgcggcccaattcaaagattgagagagtcttatgtcggaaggtcgtccttatcttgtactgggattggatcctggaatcgcaagctgcggattctgtctcctggatattgctaactgcaagatcttggagatgggcgttcatctttttaaggctccccaagaagataagactaagaccagcttggccgttacccgccgaaacgctcgtagtgtaaggaggaacactctccgtaccgctgctcgacttaagcactgcatggagctgctcaaggaggctggccttgtacctgaagatgccgacaggacttggttccagagcaagaagggcgacaaaccgattctaaagctgcgcgccagtggcctcggtcgtttgcttacggatcgagagttcgcgcaggttctttattcactctgctcacatcgcggctatattccgcacggcgagggccggcttggagaaaccgatgacgcggaaggcaggaaggttctttccgcaataaagaagaacctagcggacatggagtcgggcaatttccgcacggttggagaaatgctttatgctggggggaagtcgcgcaataagggtggcaactacgacttctgcgtctacaactcacagattcaggacgaagcccgtactctttttgaagtccagcgaagtcacgggaatgctggggcgacggaggagcttgagaagaaatatctcgagtgtctgacgtgggagaagaaaactctcgatcatgatgaccgtgtctatgaacttgttggcaattgtccctacttcccatacgagaagcgcgcggccaacgctgacgtttcctccgaactctgtcgcgcgtatgagcgcttagggcatcttgtcgttattaacgaagatggttccgagcagcgacttactgcggagcagattgacggttatctcaaagtcctgttttctcccgttgctattaaaggcaacaaagattgcaaagttacgtatggcaacgttcgcaaggatcttgaccttagtggcaagagcgtgttcaagggtgtcgcgcaggataaggagaaggacgaggtcttcgctcccaaatcttggcgctgcctccgcaaagctttgcccgaagggcttctcgcgcggatgctcgacgaccgtcgtttgggtgatgacatttgcgaggccctgacttttgcgagtagcgaggcaagtcttgccgagcgtctcgaagcactcaaactgaatgaaggagagcgtgaggcgcttctcggagttccctttacgggaaaactgttcaagggatatgggagtcgcagtcgcaaggctttggatttgctgattggggcattcgaagagcctgaaattcgtattcttacggatgctgagagggctacaggccttcttgacctgcggctttctgacagaaatcctcgttccaagctccttccgccttacaatgcatacgacgaaacctgccgcaatcctgtggtcttgcgtgccatgggccgcatgcgtcgtatcgtcaatgccatcatcaagatttacggtgtgccagatgagattcacatcgagctcggtcgtgacctaaagatgtcgaatcgtgagaaagacctcgtctccaaacgacagcgtttgaatgaggcgacaaataaaaaatgggccgcggttgccgccggcgtccttggctgcgagcccgaagaggtttccggcggtctgattcgcaagctcgccatgcgtgaggaacagggcgagaaggatgcttatacgggcgtcgctatcgatctcgagtgcctgattagagatgatcgatactgtgagattgaccatgtactgccatattcaagaacctgtgatgacagccgcgctaacaaagtgctggtcctctcaaagagcaatcaggataaacgcgagcggaccccgttcgagtggatgacttcgggtgaggttggcgtgccaagctgggatgagtatcgcgctcgggtaatggctacggttaagaatccccgcaagcgtgccaaccttcttaatactgaccttggtcccgatactcaagctcagttcttggcgcggaaccttaacgacgatcgttatatgtctgtagctgttaagaactatctcgaagatagtttacttttccccgaggatggacggactcgccatgtgactgccgtttctggtggggcaaccgggaatctgcgctgggtttggggcttgaatttcggcgaaggcaacacaaagaaccggcaggatgacaggcatcatgccgtggacgccgccgttatcgctgcatgttctgaaaagaccgtccaagaagtggcaaaggcaagttcgcttggtagggaaaccttcaggcacatgcgtaagtctcgtcttgccgacactcagccgtggccatcgtttgcccaagaggtcgaggagcgtcgagcatcagttactcctacgcgtatggtgaatcacggcgttaccgggcgtgtattcgaggacacgctctatcgctttgagggattaacggaggataagggcaggtatccgcttgtacatgccaacgggaagacagtcaagaagggtaatgttcgcattacttctgacggctcggccaggcttgttgacggcatggcattcctgcgtctttggctcgatcccgaagcgcgccccaatggcaaagttaagggagaatggtacgcggagcccgtttattacgcagatattccggcgatacgggcggggacgtatgtgcctaaggcgtgcgcaactcacatggcaagaacttcttgggaacccgttccagaaagtgccatgaggctgaaaccggtgacggtcttcttcggagatgttcttgttgtcgacgaacgggtagccagatacgctggctttaatattaacagtaagcggatgaaaatggttaacttgttgacaaaacttgaagttcctgattggccgccgtttggtggttgggggcgtgatacccgggtctatgttctccaagaagattgtcttggtcattgctatgaaggtatggcaaccgattttgaaaactcatcaattaaagaagattagtgggtgatgaagccgagggaatgctcttaacttgagcgtatccctcggcttttttgttgggatgctctgctaaaaagctaaagttagctgaggcccggggtcgcattgtttactgatgacgggcctgttatcaactaatacttctcgcccttcatactgtttttcggtcagggtcaaaactgttacagcccctgcagcgggcaagttagcttttagtctcttgagatgcgcctcggcgctgtcgcgagagagcaacacgcgtgaatacacgctgaactgctccatgtggtagccatccttaataaggaacttccggaagtctgcgtaggaccggcgctcttttttgctgcctgccggcaagtcgaacaaaacaagcattcgcatgatcctcatcattgccccttattccaatcccgctttttcaagcgggatgactgcaggcagttcgagaagagacggatccccagtcttaactgcagcctttagtgtgtcaagttcgtgctcgatggctatttgaacagggacttttcccaggggaatgctgaccaagtactcaaaaacggaggcgagttctcttttgttgtctaatgtcagaggtccgaacagctcgttctttagaacgagaagatcgactatcggacgaaaaggctcgattaagtcgtcaacgagattgaacgcattgaggttattgttgtggtgaatcccacgcgaaacgagccatccgccgcttaccgcagcacggccgatgcctgctctcaagaccgtgtatccgtaatcaaggggaggagttagaggcccgttcctccggttccctgcgggtaacgcacgtttgaagtaagcgcttgccgcaacggattcgcggttcgatgtatctcccgacaacacgtctcttgccattagccttatttcggttccgtctagcccaaggagctctagcacggcggcctggttggagatttttgccttaactatgcgttgccaaaggcgtttttgtatcggttttgagatggctaactgatcgtcgacaattgccgcatgccttgaatgagcaccaagggggagaagcagcccattgggcatatggtcatctccgcagaacatgacgccaatgcctgaatcgacgaatttggagagagctgccgtggttatctgggcttgatgagtttcgatgatcaggacccaaatgtcctcaagcggcactaaacccttgagctcgccatgctgacagatagcgagcgcatcgtttttgatggagagtgatgcggcgttctggatgcagatggttctctttggcatgtctaccgccccggcattgagctataattcattttgtctaccatggtttgtatcaactggggagttggaaggaatcgcggctagacaagggaatcgcttttagtgattacccgcaaggtaagcccaccaacatctccgatgttggtgggcgatcctattttctgtggatggttttcaaaaaaaggtaagtgggcgtatcgctttggatgccatatcgtcatttttatacatgaagttactaaaaaagcccctgttcaaaagggcttttttagtctaggcattgtatcaactggggaatttgaaggccggcaagactaacttacatgatactttgtgatgacatttattgtatcaactggggaatttgaaggccggcaagacttctcaatagcagttttggcagatgcctgtattgtatcaactggggaatttgaaggccggcaagacgcgtcgcttgcagacgccctctcgctcgccattgtatcaactggggaatttgaaggccggcaagacttttctctttacttatttcattatgttgttattgtatcaactggggaatttgaaggccggcaagactacttgaccagcccgttctgcttgtcctctattgtatcaactggggaatttgaaggccggcaagactcggacggcatgcaggtcggcgatgtgatcattgtatcaactggggaatttgaaggccggcaagaccagcgcgtgccacagcaggcccaagcggatattgtatcaactggggaatttgaaggccggcaagactgattgacaagattatattacctggtaactattgtatcaactggggaattggaaggccggcaagacttcgcgtggtggtcggcgatcgcctccgcgattgtatcaactggggaattggaaggccggcaagactcgctactcgtgaaaagacttttcatgcgcattgtatcaactggggaattggaaggccggcaagactaaccacctcgagaaatcttcaaccctgatattgtatcaactggggaattggaaggccggcaagactcaaaccgcctggttctcttacctagatgaattgtaccaactgtggaattgaaaggtcggtaagacatggtcgcgcgaccggcagctccctcctgtttgtcccatttctgggccgttctcggggcaagaaagggtcaaacaggagggagctcgctggggcggacgggcggttgcgcgtgcgctccttgcaagcgagttgtgcaaataatccgcaggttgggtgccgtaggtaccgtccacccggtcgctcgggggaaagaagcccgcgggcgccgcgcattgctatcctaaagagtcgctagtacaccaacgctagtacaccaaccacagggggatggcatggtaaagacactggtgctcgtgcgtcacggaaagaccgaggacgtgagctcgacgggcgacgacatcgaccgcaagctcacgccggcgggaattcgcgcccttgaggtcgcgtatccccgcacgttccagcttctgggcgaggacccggaggtctccatctggtgcagtcccgcgatccgcgcgctgcagaccgcgggtgtggtggccgaggcggtcgacgcctgtggcatcgatgtgcaccagtccctctacgaccaggacgtcgacgcgttcctgtccgagctcgcggctgccgacgaggaggtcgaggccctcgccgtggtcggccacgtccccttcatggaccggctgaccaagcgcctgaccggctcggatatcaagttcaacaagggcgccgtcgcctccatcgcgctgcccgacggtccttcgggcgagggctcgctgcgctggtacgtggcaggccccgactccgtgtcgtgggacgcgatggccgaggtggacaaccaggtcgagctgatggccgccgagctcgcggacgcctgcgacgccttcctcgccgaccccagcgacatcgaggcgctgcgcgtgttccgcatccgcctgcgccgcctgcgctcgctcatccagttccttgccccctggcagtcaaagaagcagggcaaccgcacctccgacgacctgcgcgccctccttgacgcgacctcgccgctgcgcgagatcgacatcctgtccgacgccgtggcggggctcgtcgattccggcgagctcggcgtgaactgcctactgcccgtggcctgcgccaaggagcgccagctcgagctcgagagcgtgctcaccctcatgcgcaagcgccacgtgcgccgccgcctgcacaatatcgccgacgagtgcccaagcatcaagtggaagagccgtgtgctcgacgcgggcctttccgccgccgatttccagaagcacttcgacgaggagctcgaggtgctcgacagcgtgctgttcggccttgatctgcgcgatcccgagtccattcacgtggcgcgccgcgacgccaaggagatccacttcgtcgcccgcgccctgggggcggtcctcggcgaggagcgcgcctcggcgagcgagtacatgaacagcatccaaggcgagctcggcgccctcggcgacgcctatcgcaacgagcgcctggcaaacgagtactcgaagagcccgcgtttccgcggcgtgcgcgccgacttgggcgtcgttgcccgcgaccaggccgaggtcgcgagcgcgatcctagctggctccaccttctcggcccgtatgcgcgccgccgactagctcgcccccaagccaatttacatttggcgtcagacgcaggattctcggtgcgaacatgagaagatggcgtctggcgccgttttcgtcgtaagagccttaagacaaaggagaggccgatggccgactcgtccgaataccgcgttgagcacgactcgatgggagaggtgcgcgttcccgcgagcgccctgtggggcgcgcagacccagcgcagccacgagaacttccccataggcgagcagacgatgccgcccgagatcatccgcgcgtttgcccagctcaagaaggccgctgcgctcgcaaaccgcgacttgggacgcatgacgcccgcgcaggccgacctcatcgccgccgctgccgacgaggtgctcgacggcaagctcgacggcaacttcccgctcgtggtgtggcagaccggctcgggcacccagtcgaacatgaacatgaacgaggtgctcgcaaaccgcggcaaccagatcgcggccgagcgcggcgtcgagctcgagcgaccgcttcaccccaacgactccgtgaacatgagccaaagctccaacgacaccttcccgacggccatgcacgtggccgccgccatggcggtccgcggacgcctgctgcccgcgatcgccgagctcaaggctaccttcttgcgtctcgaggaggagaacgccggagtggtcaagtgcggtcgcacgcacctgcaggacgctgtgcccatcgccttcagccaagagatctcgggctggcgcgggcttctggagggtgccgccgaggagctcgaggcgtcgcttggcggcctttatcgcctggcgctcggcggcacggcggtcggcacg

SEQ ID NO: 2692 - DNA, 8439 bp, synthetic construct
  source 1..8439: mol_type = other DNA
  misc_feature 1..8439: note = Synthetic
gcgtggtcgatctcgaagtgcttctccagctcgaagtaacgcgcgaggtcaaagccgggaaacaccgcgcggtagaagtccgccatgccgtccgcgctctcggagccaatgaagtagggatcgctggggacgcaggcgatgcgtgccttgacgctgggattctcgaagaccttttcgcccaggacaaagacgtcaccggaggtggggcgcatgacgccgcataggtgcgagacaagcgtggacttgccgcagccgtttggccccacaagtccaaagaccgcgcctgcgggaacggtgaggctcaccccgtcgagtgcgggcgtgccgtcgaagaccttccgcaggtttttgacctcaatggccgatgccatcacccctcgcctcccccgactctgcgcccaagctcctcggacgtcacgcccaaggacccgagctcttggacaagctggtcgaactgttccaaaagctcgcgccggcgcgcctccgcggcgcccgatacgtctgcgacaaagctccccttgccccgcacggaggagatgcagccctcctgctcaagctcgcgataggcgcgctggatggtattggggttcacggcaaggcgagacgagagctcgcgcacagagggaagctgctcccccggggcgagcacgcccgcaaggatctgctggcggtaggcgtcgcgcacctgctcgtagatggggcgagggtcttggtagcttatctggatcacggcacctcccatcccctgggtgagcggctggacctgccgcggggtgcttgtactgctagcggcgattatccgtgctaactgtactagttagtttaatacagtttggacagagaaaaacgccgccacactgcccgccggcaggcggtagcaacgtggcggcgaatgagacaaagggactgtccctttgtctcatcggtcggcaagcttctcgcccatgagcaagcccatcaccgaggccatcatgaggcctcgggtccagccggaggagtcacccaggcagtggaggtgctggacgttggtatcgaagttctcgtccatctggacgcggttgctgtagaacttgacctcgggtgcgtagagcagcgtctcgtaggaggcaaagcccggaaccacgcggtcgacggccttgatgaactcgatgatctcgaccatgggacgcatgggcatggcggcggtaatgtcaccggcctcggcgtcggggagcgtggggaccacgttggactgtgcaagctccttgggccaggtgcgcttgccgtcgagaatgtcgccaaagcgctgcaccaggatgtggccggcgcccagcatgttgatgagctcgcttacgcgctgcgcgtaagcaatgggctggttgaaggggtgcttgaagttaagcgtgcagagcactgccacgttggtgttggggctcttgcggtccttgtacgagtggccgttcaccactgccaggccaccgtcgtagttctcctgactcacaaagccgccagggttctggcagaaggtgcgcaccttgttcttatacggattgggatagccgatgagctttgactcgtagagcacgtcattcacgcgctccatgacctcgttgcgcacttccacgcgaacacccacgtcaacggggcccgccacgtgcccaatgccgtgctcctcgcacatggagtcgaaccagctggcaccacggcgacccgtggcgacaatcgtctctccggcaacgacgcgcgtctcgccgtcacggttgcgcaccacgaggccgtggcacacgccgtcctcaatcacaacctcctcgcactcggtctcgaagaggatgttcacaccggcgtcaagcaggtgcttctcgatgcgcgcatagagctcctgggccttctcggtgccaaggtggcggatggggcagtccacgagcttgaggcccgcgctaatggcgcggcggcgaatctccgcaacctcgtcggcgtggccaaggccctcgacgtgcgggtcggcgccaaagtcgaggtacatctggtcaacgcggtcgatggtgtcctgcgcgaactgatggccgatgagctcgggcaggtcgccgcccacctcgcgcgagagcgagagcttgccgtccgagaaggcgccggcgcccgagaagcccgtggtgatgcggcacggctggcagtgaatgcagtggcccaccttggccttggggcagctgcgcttctcgacgggcagtcccttctcgacgatggtgatggagcgcgtgtctcccttgccgataaggcccagcgcagtgaagatgccggccggaccagcgccgacgattgcgacgtccgtgcggatggtggtagttgtgtctgccatgttccccttgttcctctccgcaaggggcccgtaccgcgggcgcatcccttgcgtgctcattttgccctatttgggggctaaagtctttggtgtggcacgttctggcgagactcggcttcaccccagcagctccgtccttttcaaggttaagctattccgtcaatgagccatctgccgagaagcgcggattgatgtctcgagcacttttatactttattagttgccaagcatctgtttccaaacgtaaaacgactagaggagcgcccatggaaaccaaccgcccctatttggttctcgggcttgatcccggaattgctagttgcggcttttgcctcctagacatgacgaaccacaagattctcgagatgggctcccatctctttgacgcacctcaagaggccaaaaccaagacgagtctcgcggtcacgcggcgcaacgcccgcagcgccaggcgtaatacgcttcgcaccgcaactcgcatgaagcattgtctagcacttctcaaggacgcgggtcttatcccggagaacgctgacaaagcctggctccaaagtgcgaagggcgacaagcccatcctcaagctacgcgccaacggcctcgaccgacaactcacggatcgcgagtttgcccaagtactttattcgctctgcggacgccgcggatacataccgcacggcgagggccgactgggcgaaacagacgacggagaaggcaggaaggtcctcagtgccataaaggcaaacgaggcaaccatgaagagggggaattaccgcactgtaggcgagatgctttatgccaacaacggaaaatcgcgcaaccacggcggagactattccctttgcgtctacaactcgcaaataaaagacgaagttcaggcgctcttttctgcgcaacgcgccctaggtaaccccaaggcttctggtgactttgagcaggactacatcgactgcctcgagtgggagaaaaagaccatcgactatgacacgcgcgtctacgagctcgttggggcttgctcctactttccagaagaaaagcgcgctgccgacgctgacatctcctcccagctctgccgcgcttatgagaggctagggcatattgtcattgtacgtgaggacggctcagagcagcgcctcacagccaaacagattgacggctacctcaacatactcttctcgcctcttccgctcaagggaaacaaggagtgcaaggtcacgtatggctcgattcgtaaggaccttgatctaagtggaaaggacgtcttcaagggcgtggcacaggatggggagaagggtgagccattctcgccaaaatcctggcggagcctacgcgcggcgctgtacgagaaccatgaggacctgctcgtccgcatgctcaaagaccgcgagctgggagatgccatctgcgaagcgctgaccttcgccagtactgaggcgagccttttcgagcgacttggcctacttggtctcaccgaggatgagcagacggcactgtgcagcagcgtgccgtttacaggaaagctcttcaagggttatggaagccgcagcctcaaggctttgggaatccttctcagcgccttcgaggaaccggagattcgtacccttacggatgcagaaagggcaacggggcttctcgacctgcgccttgctgaccgaggccttcgtgacgagctgctccccagttacagcaagtacgacccaacctgccggaaccccgtggtccttcgtgccatgagccgcatgcgccgcatcgtaaatgcaatcattcgtatccacggcgtaccagacgagattcacattgagcttggtcgcgacctcaagatgtccaacaaggagaaggtggccgtcagcaaaagccagagggcgaacgaagccgccaataagaagtgggccgccaaggcagctggcatcctcggctgctcccccgaagaagtccctgggcgaatcgttcgaaaacttgccatgcgggaagagcagggcgagaaggacgcgtacacgggagcaaccattgatcttgagcacctcgtacgcgatgaccgctactgtgagattgaccacatccttccctactcgaggacgtgcgatgacagccgggccaacaaggttctcgtgctctccaagagcaaccaagacaaacgcgagcgtacgccatatgagtggatgacatccggggagccgggcacgccagattgggacgagtatcgcaatagagtcatggccacggtcaagtacccacgtaagcgcgcaaaccttctcaacaccgacctcagccctgagacgcaggcccagttccttgctcgcaacctcaacgacaatcgctacatgtccgtagctgtgaagaactatctggaagactgcctggtgttccccgaagacggccgaaagaagcacgtcaccgccgttgccggaggcgcaaccggtaaccttcgctgggtctggggtctcaacttcggacaaggaaataccaaagaccgagacgatgacaggcatcacgcggtcgacgcggctatcatagccgcctgctcggagagcaccgtcaagaaggtagccgaggcaagctcgagaggccgcgaaacgtttaagcatctgcgcaaatctcgccttgccgacactcaaccttggcccaccttcgctgaagaggtcatcgcgcagcgcgccttcgtggtaccaactcgcatggcaaaccatggcgtcaccggacgcgtctttgaggataccctctaccacctggagggctttaccaatgacaaaggcaagtatcctctggtcagagcaggcgagaagaccgtcaagaagggcaacgtccgcatcaaccccgacggttcggtcaagctcatcgacgggatggcgttcctacggctttggcttgacccagatgctcgaccaaacggcaaggtcaaaggaaagtggtacgcggagccagtctactatgccgatatcccagccataaaagcagggacatacattccgagggcatgcaccatccatgtagctagaaacgcatgggagccggtaccagcatcagcgatgcggcggaaaccggtggtcctgtttgcgggagacatagttgaggtcgacgaacacatcggaagatactcaggcttcaacatcgctggtgggcgaatgggagtcctccacattctgacaaaagtcgaggttagtgactggccctctcttggctcttggggccgaaatacccaagttcgcgtcctacaagaggattgcctcggccactgctatgacagcattatcatcgatccagacaattcaacgttccggcaacgcgaataaaccaaacgagccgggagccatgatcagctaggtacggctcccggcttgtcatagttccttaggcagattcttgtatacgccctgcctatgccccacccgaacaatctcaataagcagctttccctcgttgattgtcgccagaatcctatagctaccaaccctgtatccccagccattcttcgttcccctgagcgccttggaaccaggaattgccttggggttctcgcaacctgtaaggttgtcctcgacccacttgagaatcattaaccgctgttttctctcgatggacagcagttcctttgccgcggtgcgcgaccactcgacctcgtagctcattcggcttccattgccatgcgcttgacttcatccatcgagtagcgcatgccatcgtctacggacagtgcgtcctcgtacgcttggcagtcagcagcatcttcgaccatttcaagagcagcctcgcgcaccacttcagagaacgtcctgccgacaaagtcggcatatgcctgaatccacgacttctcctccggctcgaagcggatggttgttgcttccattgccattgtcgttctcctcgattcgtatttcgtcgtaatacgattatacccgagcacgcttccctaaaacacgagagtgagctgaggtccgggatcgttcgtccggctgacattcggccgactatctactagcacctctcgcgcctcgtattgtttctcggtgagcgtgaggacagtaactgcaccggcagtgggcaggttagccctcaatctcttgagatggacatcagcgctgtcgcgagatagaagcacgcgagaatagacgctgaactgctccatgtgataaccgtccttgatgaggaacttccggaactctgcatatgacttgcgctccttcttgctacccgtaggcaggtcaaacagcaccagcatcctcatgattctcatcatcgccccttattccaaactcgccttctcaagcggaataattccaggcaactcgagcagagacgcgtcacctgacttcaccgcagttttgagggtctcaagctcgttctctatggcaatttgaacgggaactcttccaagaggaatgctaacaaggtactcaaacaccgacgcgagttcccgcttgttctctgatgtcagaggtcctccaaggatcctctggataacgagcagatcaacaattggccggaacggctctattaggtcatcaaccagattgaaggcgtttaggttgttgcagtggtggattccccgcgaaacgagccatccgccacttacggccatccggccaatgcccgccctaaggaccgtatagccatagtccagggctggggtaagggggctactgcggcgaccaccttccggcaggagctttttaaagtattggcttgcggcaacggactccctatttgacgtatctcctgagaggacgtccctagccacggccttcacggaagagccgtccaaaccaagaagctcgagaaccgcagcctgattcgatatcttcgctttaacgattctctgccatagacgcttctgcatgggctttgagattgctaactgatcatcaacaatcgccgcgtgtcttgagtgcgcccccaacggaagcaggagcccattgggcatatgatcgtctccgcaaaacatgacaccaatgccggcatccgaaaacttagaaagtgctgacgtagttatctgagcctgatgagtttcgatgataaggacccagatgtcttcaagaggtattagccctcgaagctccccgcgctgactaattgcgagcgcatcatcttttatggacagcgacgcagggttctgaatgcaaacagttctctttggcatatcttctcaccccaccgataggttataattcccctgtctagcaaggttttgtatcaactggggagttggaaggaatcgcggctagacaagggaatcgcttttacgcgattacccgcaaggtaagcccgccagcacccttggtgtcggcgggcgatccttttttctgcgaacggttttcagaaaaaggctttcggtgggcgtcattgattgcttcggtcaacatttttatttcaaccaataccaaaacaccccctgttcacagggggtgttttggtattggtattgtaccaactggggaattggaaggccggcaagacctagccgcgcgttctcttcctccagcccagattgtaccaactggggaattggaaggccggcaagactacttcggaaggctcgacatacgacctcccattgtaccaactggggaattggaaggccggcaagacttcaagcggtatcaggtgcagctgaacaacattgtaccaactggggaattggaaggccggcaagacagattgagccacgcactcacagagcgtgacattgtaccaactggggaattggaaggccggcaagacctacgggtaagatatgtagcgtattcaagtattgtaccaactggggaattggaaggccggcaagactggggaccagcgttgccacgacggattggaattgtaccaactggggaattggaaggccggcaagactgggatttttggagggatatcgatgctttttattgtaccaactggggaattggaaggccggcaagactcctgcggcagggaccggagcagcgccatgattgtaccaactggggaattggaaggccggcaagactcgtccagccaccagcattgatattctgtcgattgtaccaactggggaattggaaggccggcaagacgagcagcgagatgagcgagcccgtgaacgtattgtaccaactggggaattggaaggccggcaa

SEQ ID NO: 2693 - DNA, 6691 bp, synthetic construct
  misc_feature 1..6691: note = Synthetic
  source 1..6691: mol_type = other DNA
ccgccgttgccgccacgctgcccgcgcccgtacctgcattcactcatgttgcgctcccttctgcggttgcccgcccttcgcctcgtgttggcacgagtctaggcggcgcgggagcgccatgggtaaactgggaggctacatcgcaacgtgtcgtcgtaggtccttgcatatctgcagttcaggacgccgtttgcggcatcacgccgaccgtctcgtcatgccacgcccagcagctgctggtcatggcagaagagctcgtagttgatccggtcgacgtcgtacacgcgacgcgatataaagtactcaactatcacatcgaacttgctgttgtgcgcgagcgcatagccggcgcgcgccagcagcatctgcgtctgctccaaatcaagctccagcgccacggccagcgctaggaccacgcgcttgctggggttcagcctgccggagcgcagcttgctgaaatactgccgcgtcaggttcgcgcgaccgtacacctgcgcgtctgtcagcccgcgcgcgtcgatcatggaaagcagcgtctcgctgaacgacgcgtcgaggctcgccagcagatcgtccagctcgtcctcaagcgcttcgtggcgttcgccccagcgctcgtaggccttgctcatcatatccaccggctcgtcgaacacctcggacggcaggtctccggccgagaaggacgcaccgcccgaggtcgcgtccgcatgccagcggttctcgcgtttgggccgccgcctgtggtcacgacgctcggcctcgtccacgtatcgctggtcgatgtactcctcgaggccagggtatgccacgcgggcctctcgcgtggactcgcggtcgaagagcgcgaggtagacgtccatgtccgcgtgcctatccggcgctgcgtcaagccacgagcgtatcgccgagacggcgtcctcgatcgccaggtcccttgggcagccgaatgctccggacgatattagcgggaacgcgactgaggtcgcgccaagcgaggctgccaggtcgagagagctcttgtagcatcgagcgagaagccttctgaggtaccccaaatgccctgctttgacggcgccttccggccagcgtgggcccgccgtgtgtatgacccacagcgcaggcaggtcgaagccgggggtcacgaccgctccgccgcattccacatggccgacctcgcgacatgacgcctccatgcagagggcgccggcggcgcggaaaatcgcggcagataccccgccgtcggcatggagcccctcgtcagtggggtcgacgatagcgtcgacccgcatgcgggttatgtcctgtcgaaccaatgtgagcggcatgcttctcccaacggcgcgtcgtttgagccgcgctcatgcagtgtccggtctagaagcccaggctgtcgttcaccaggatcacgtgcatgcggccggggtggtggttgaagcgcgtgatgaggaagttgcagcagatggtgtcctcggacttgcagttggcgcacgcgccggtcttgcagcacggggtgttgaggttaaagcgctgcgcgttgatcggcgcggctacgttgcgcgcacgcttgatggcaccgtccaggtcgccgcacaccttgttcatgcccactatgaagagcacgtggcgcggcccctgcgcgatggcgctcacgcggttggagttgccgtcgatgttcacgatcacgccgtcgttcgtgatggcattcgcgcttgcgacgaacacgtccgcgtcgtatgccgcgagcatggcggcgcgcttgtcctccgtcttgtcgcggtcgatgaagtggtagtttccgctggtcagggcatcgttcagaccaatctcgcgcgcggatgtgcagccgcccatggtgacgctcgagccctcgccgatgaacgcgagtgcctcctggagcgcctcctccctggtggccgcatactccgcggtgatgttcctcctggcaagccccttgatgacggtctgggccaagagctcgttgcgcttggtgaggttctgatccatacgctccccctaacacgggcggcgcgcagcgaaggcgcgccgcgtttctcccctgtcacgattctacgcgcacggaggaccgcgcacccctctacccgccaataatccaatgacatcgctgatgaaaggtgcagcccgggtcacgctgtccaaagatcgtgcgtagtcctagggctaagcacggaagctccgaaggttgcccccattcgtcgttgtgttcgcagctaccccgatgacgcttcccatacctcagacggaacggatgtgcacgtcggagttcatactgatacgatacgaaccatctagtcatatagccgccttgccctatcaggcatggcacgtttgacaggagttggccatggcagaaccctaccttgtgctcgggcttgacccgggtatctccagctgcggatttgcacttttggacatgaacaatcacaagattctcgaaatgggatcgcatctgtttgacgccccacaggatagccaaaccaaggtcagtcttgctgtcggaaggcgcagtgctcgaagcgcccgtcgaaacaaccttaggaccaagaatcgccagaagcactgcatggagctgctgcaagaagcgggactcgttccccaaggagtcaccaaacagtggttccagtccacaaagggcgatcgtcccctgctcgaacttcgcttcgcggcactcgagcgcccattgaccaatcgcgagtttgctcaggtgctctatgcgctctcggcacgcaggggatacatcccccatggtgagggccgcattagcaagctctccgacatggacacgagcggctcctccgatgccgaggcgggcaaggtcctaaaggccatcggcgagaacaacaagctcatggcacaggggcatttccgtaccgtgggagagatgctctacgaccaaggcaaatcacgtaacaagggtggctcctacgagcgctgcgtgctcaacagccaaatcgtggacgaggtccacatcatcttccagagtcagcgcacgcagcagaacaccgctgccactcaagaacttgaggctcagtacgtacagaaccttacgtgggagaagcgaacactcgaccacgacgccaaggtccacgctctcgtgggtaaatgcagctactttcccggcgagtttcgtgccgcacgcgccgacctctcctcagagctctgcaatgcctacgagcgcattaagcacctgcgtatcgtgaatgccgacggcgacgaggtggctcttgcccccgagcaggtcgaaacctacatcgccattctcttctcgcccgaacctctcaagggcaagaaagagaaggtcacgtatgcgcgcatccgcaaggacctagatctatccgcacacctcttcttcaagggaatcgacccggaagacgagaaagaccacgagccctacgtccccaaggcgtggcgcgccatgcgcaaggtcctctccaccgagcttatggaacgtctccggagcgaccgcacgcttgccgacgccgtcggcgaggcactcacctatgccagcagcgaggacagtctcgtctaccagcttgataatctcgacctcagcgatgaggagcgcagccagattctgggcctccccttctcgggcaaaatctttaagggctatggttcgcgatcgctcaaagcgctcgacatgctcgtagacgccttcgaggagccagaggtcaccacactcgccgaggcggaggaaagctctggtctattgggcctgcgcatgagcgatagaggcgcacgctatccgctcctaccttcgtacagcaactatgacaaagaaaacaggaaccccgtcgtcctgcgcgccatgggtcgcatgcgtcgtatcgtaaacgcgatcatccgcatctacggtgtcccggacgaaattcatgtcgaacttggtcgcgacctcaagcgctcgaagcacgaaaaggacctcatcaacaagcgcaaccgcgagaacgagcgtaagaacaagcagtggcgtgcacagattgcagaggaacaaggaatcgaccccgatgaggtgcgtccgaagctcctcaggaagattgccctttgggaggaacaagacaacttcgacatatacaccggtcacaaaatcgagttcgaccgcatgatttccgacgacaagtactgcgagattgaccacgtgcttccctactcgcgcacctgcgacgacagccgtaacaacaaggtcctcgtgctcgccaagtcaaaccaggacaagcgtgagcgcacgccatacgaatggatgacccaagacgcacggaaaggcgcccccaactgggacgagtaccaggcacgcgtcattgcaaaccaccacatctctcctagaaagcgaaggtacctgctggacaacaacctcgggccagaccaagagagcgacttcctcagccgtaacctgaacgacgaccgctatatgtcgcgagaagtcaagagttacctagaagacacgcttatctttcctgaggacggaagggtaaaacacgttattgctgtagccggcggcgccacgggaagcctacgccacgtgtggggcctcaactttggtgcaaacaattccaaggaccgttccgacaaccgccaccacgctatagatgcttgcgtcatcgcagcgtgctccgagtcaaccttacaagccgtcgccaaggcgcgaaagcttggcgcagagacctacaagcgcatgcgcaaggaccgcttgaaggatactcagccttggcccactttcgccgacgaggtcattgcccgtagggagtttgttatccccacgcacatggtctcccacggcgtcacgggccgagcgttcgaagacaccaactatcgctttgacggcataacgaatgacaccaagaagctcggcatcctctatggcaacggaaagaccaccaagaagggcaacttcgtcattggaaacgacggtaatgcgcacctagtggacggcatggcgttcctacgcctttggctcgaccccacggcgaggaagggcaagggcaagtggtacgccgagcccgtctattacgcagacattcctgccatcaagaacggaacctacataccgagagctgcaaaggcgcatgttgcgcgtgttgcttgggaaccagtccctgaaaacgcgctcgcttccgcaccagttgtgttgttcagcgacaacgtaatcaaagtcggaagtgccattgcgcggtattctaggtttgacatcggaaatgcagcattggttctcgaaaacttgagaacgggggaagaatgcaagaagttcccaaccttaggaagatggaacaacgagcttgtcccaataattattaacgaggattgccttggacattgctataaggaactggcaccgaacattttagaaggttagcgtcagctggggcccgatgtcagggaggttctcgtgagatgatgtatccacaagaacctccctgttctcatactgcttttcggttagctcgatgaccgtcacttctccagcttcgggaagatttgcgcgaagtcgcgataggtgtgtctcagcactgtcgcgggataaaagcacgcgtgaatacacgctgtactgatccatgtggtagccatctttaatcaggaacttccgaaatagcgcgtaggacttcctttcacgcttactgccggtgggaagatcaaacatcacaagaagacgcatggtcctcatctccctactcctgttctacgtaggcaagcggaacgacttctggcaaagacaacaacgtatagttggccgatttcaccgcagccctcaaggtgtcgaactcaagctctattgcatgctgaacggatgtgagctgtccgttaaccagcacctgcagctcgaacactgatgcgagctttgattttttctgtggatcgagattcccctcgagtcccatattctttaccatcagatcaacgatgggtcgaaatggttcgatgaggtcatcaatcaggttgaatgcattcagattgttagagtggtgcagacctcgagatacaagccatcctccagagacgcccgtacgaccgatgcctgcgcgtaagactgcgtagccatagtcgagtggtggggtcacgggaccgtcacgacgagttccctcggtgatatagtgtcggaagtagaccgaagccgcagcagactccatgttcgaactatcacctgagaggacacggctcgcaaactgccgcacgagtttcccatcttgaccgataaggtcaagtacctttgcctggttcctaatcttttggacaacaatgcgctgccacaaccgcttttgtagcggcttggagattgacagctggtcatctacgattgccgcgtgacgagagtgggcgccaagaggaagcaggagaccgttcggcatatgatcctcgccgcagagcatcaggccaatccccgcgtcaacgattgaggagagggctgaggttgtaatctgggcacgatgcgtctcgatgataacgacccatatgtcctctagaggtatggcagccgtgccgtcgctgttctgtaccagtaacgctgaattacgtattgataccttcgccggattttggatacatattgtccgctttggcattgcatgtcccctgtttcaaagtaaaatgatgccgtctaagcaagatgtaccaactggggagttgagatcgtgcgtagacaagggagccacctagtggttacccgcaaggtgagcccccc

SEQ ID NO: 2694 - DNA, 6231 bp, synthetic construct
  source 1..6231: mol_type = other DNA
  misc_feature 1..6231: note = Synthetic
ggacgtcggtgtggtggcgctggtagttggcgtagaccaggtggctggcgtcgtcgatgacggcgagcttgaccgtggtcgagccgacgtcgatgcccaggcgcaggtgcgcgtgggagaagtcacaggcgttggcggggcgcagctcggcgccgtcggccctgagggccagcgggtgggcggccgtggactgctcggcgttggagaggtcgtggttggtcattcgtttcccttctcgaggaacatgagggcgagtccgaacttgcggacgtcgaagtcgatcgtcttgccgtagaggtctccggggcggacgaacatcagggcagtcatcaggcgtgccatgatgccgatgtcctcgcgcatgcccgtggtgagccagcgcacgaggacccccacctcggccgagatcgtaaacgtgaggtagtagtcgaagaacgggccgagcgcacccaggtccaggccctgcatggcgcgagtcttcacctggtcgcggacgacggtctccatccgacgggcgaaggcggggtcgccgccgtcgccgagaagtgcgcccaggtaggagccgcgagccttgaagtactcgagcagctcgatcgagcccgggcacgggtcgagctcgccgatcgagtcttgaagctcgtccaggtgcaccgcggcaaggccacgcaccaagggaacgagctcctcgagcgtctcatcctcgatctggacgaccaggtcggggatgtctcggaagtgcgagtagaacgtgcggcgcgtgagcccggcgctctcggcaaccgaggtcaccgtcaccttgctcaggtcgcccgtgcgctcgatctcggcggccagggcgtcgcgcagcgccgccctgctgcgcagggtcctgcggtcggtcgcggtaccgacacgtccggcactgacctcgcgaagcgcaggtcgcatggggtccctcccctctattgcacagagtgtgcagaacttctcaacttgtgaagtattgcacacggtgtaacgacacacgcacaccgcgccccgccaccacgccaaccccatcgagccaccacatcgcttgaaataacgccccgacccaccgattccgcacgacgtcggaccccgctccgcgcgcaccccaaacaccattgtcacctcgcccgatagccgagaagcctttcagagtgcagtaagtgtctggtggtccgcctatactcaacggtattgcagtcgtagcaggaggagacccatggaaagaaatcgcccctatctcgtgcttggccttgaccccggcattggtagctgcggcttttgccttcttgatatgaccaaccacaggattctcgagatgggctcccatctctttgacgtcccgcaggagccaaagaccaagaccagcctggcagtgacgcgccgaaacgcccgcagcatcaggcgcaatacccttcgaaccaggatgcgcctcaagcactgccttgggctgctaaaggacgctggccttgttccgcaggatgccgataagaactggctccagagcaccaagggggataagcccatcctcaaactacgctcttgcggcctggatcgtctgctcaccgaccgcgagcttgcccaagtcctctactccctttgcaccaggcgtggctacatcccccacggggagggtcgcttcggcgagactgacgatgtcgagggaaggaaggtcctcgccgccatcaagacgaacaacaaggccatggagtctggcaactaccggaccgtcggcgagatgctccatgcgcgcggcaagtctcgcaacagaggtggcaactacgacttctgcgtcctcaactcccagattcaggacgaggttcgtacgatcttctccgcccaaaggaccctcggtaacgacagggcctcaacggagtttgaggagaagtaccttgactgcctgacgtgggagaaaaagaccctcgaccacgacaagcgaacctacgatctcgttggcaagtgctcgtatttccccgaggagcgtcgcgccgcacttgcgtgcctttcctccgagctctgccgagcctacgagcgccttggccatcttgtcatcgtccacgaggacaattccgaacaggtactcaccgcgcagcagatcgatgtttacctgaaggtcctcttctcacccgcaccgctaaagggcaacaaagactgcaaggtcacctatagcgccattcgcagggatcttgacctcagtggaaagagcgtcttcaagggcgtctcccaagagaaagagaaggacgaggtcttcgccccaaagtcctggcgacgcctccgcaagaccttgccagaagaccttatggtccgcatgcgcaacaaccgcgagctcgcggatgacatctgcgaggcgctcacgtacgccagcagcgaagacagcctgttgacgcagctcgagcccctagacctttccgagaacgagaccgaggcagttcttggcgttcctttctcaggaaagttcttcaaggggtacggctctcgcagccgcaaggccctcggcatcctactcggtgcgtttgaggagccggaagtccgcaccctcacggatgcggagaaggcaacgggcctcctcgaccatcgccttgccaacgacaccgtcagatcggttttgcttcctccatacgtcacgtatgacgaaacgtgccgcaaccccgtagtccttcgtgccatgggacggatgcgtcacgtcgttaacgccatcatcaggattcacggtgttcccgacgagattcacatcgaactcggtcgcgacctaaagatgtccaaacgcgagaaggacgccgttagcaagcgtcagcgccagaacgaggccacgaacaagaagtgggccaaaaccgccgccggcattcttggctgcgagccagaggaagtgcctggcaaggtcattcgcaagctcgccatgcgggaagagcagggcgagaaggacgcatacaccaacgcccccatcgatcttgagcgtctcgtgcgtgaggaccactattgcgaaattgaccacatcctcccctactccagaacaagcgaggatagccgtgccaataaggttctggtcctctcgaagagcaaccaggacaagcgcgagcgcacgccctacgaatggatgacccaggacgtcggaaagcctggcgtccccaattgggatgagtaccatgcgcgagtagtcgccaccgtgaaacacccccgcaagcgcgcaaatctgctcaacaccgatctcggacccgaaaccgaagcgaaattccttgcccgcaacctcaacgacgaccgctatatgtctgttgccgttaagaactacctcgaagactgcctgctcttccctgacagcgacaggaagcgccacgttaccgccattgcaggtggagcaaccggaaaccttcgatgggtatggggactgaactccggaagcaacaacacgaaagatcgctccgacgaccgtcatcacgcagttgatgcagctgtaatcgcagcgtgctcggaagcgaccgtccaaaaggttgcccgcgcaaggtctttggggcgcgagacctttaagcacatgcgcaagtcccgacttgccgacacgcaaccctggccgacctttgccgacgaggtaattgcccgcaaggagtttgtcatccccacccgcatggcagaccacggtgttactgggcgtgtatttgaagacacgctctatcaccttgagggcttcactgacgacaaggggaagtatccccttgttcgggcaggacagaagactgtgaagaagggcaacgtttgcattagtccagatggttccgccaagctgattgacgggattgcgtttgttaggctttggcttgatcctacagctaggcccaatggcaaggtcaagggcaagtggtatgtcgagcccgtttattacgccgacatccccgcaataagaagaggggcatacgtaccaaaggcatgcaccatccacgttgctcgtacaagctgggaacctgtgcccgaaaccgccttagcatcaaggcccatcacactttattcgggagacgtacttcgagttgacgaccacatcggtcgatattcaagtacggacatcaatggttgtcgacttgtgatgttgaatctcgactcaggaaatagagttaatgattggccttctatcggaagctggggcaccacaacccaagtccaggtactccaagaggattgcctgggtcgttgctacggcaatgtgattctgcactcagatggatcaacttttgagactcgctaaccatgagtggcgggaccgtgcctgtaaacacgtcccgccattcagctcagcatgccatcttcagtcgcttcgacacaactcaatcaagtttgctcgcacatcagaaaaacagggtgagatcagcaccaaaatcctccgcgtggttgacagccaccctgctatctataagaacttctcgcgcctgatattgcttttcggtaagcgtaaggactgtcacagctcctgctgcggggagattcgccttgagtcgcttaagatgcacgtctgcgctgtctctcgatagaagcacgcgcgtgtaaacgctgaattgttccatgtggtaaccgtctttgataaggaactttcggaagtctgcgtatgatttcctctcccttttgctgccagtcggaagatcgaacaacacgagcatcctcatgactctcatcctcgctccttattcgaggccaaccttttttaggggaatcactgctggaagttccagtagcgaggcgtcatttgcctttacagcggctttgaggctatcgagctcgttttctatagccgtctgaactggaacgttacccagcggaatgttgaccagatactcaaacaccgccgtaagctcctgtttggattcaggcgtcaggtacccacccagctcatgctcaattaccaggagatcgacaacggggcgaaaaggttcaatgaggtcgtcgacgagattgaacgcatttaggttgttacagtgatggataccacgagaaactagccacccaccgctcacggcagttctcccaattcccgcacgaagaactgtatagccgtaatcaagagctggtgtgtagggtccttttcttcggtttccctttggcagcacttttctaaagtagctactcgctgccacagcctctcttccagacgtgtcgcctgataaaaccgttttggatatcttccgcaggtcatctgcatcaatcccaagcagttcaagaacggccgcctggttgttgattttcgcctttacaatgcgttgccaaagccgcttctgtagcggttttgatagagcaagctgatcttcgactattgcggcgtgccttgaatgcgcccccaaaggcagaagcaggccattcggcatatgatcttcaccacaaagcatgacacctattcccgagtcaaccaacctcgaaagcgctgcggtagtaatttgggcctggtgcgattcgataattagaacccaaatgtcttcgatggggacgattcctcgtattacctcttgctgacgtatgaccagagaatcgttcttaatagagagggcggcgggtttttgaatgcagacggttctctttggcatggcattccgtcctgacgctgagatatacttctacttgtctggcagatagcttgtatcaactggggagttggaaggactaacggctagacaagggaatcgccttcggcgattacccgcaaggtaagcccgtcgatgcctttggtgtcggcgggcgatcctttttctgccaacggttttcagaaaaaggcctacggaggcgttttttgcactctctagcatcagataattattgcttgaaactgaaacagcccctgctcgcaggggctgtttcagttcggcaagtgtaccaactggggaattggaaggccgacaagactatagccctcatcgatgacgccctcggacgagtgtaccaactggggaattggaaggccgacaagaccgtctctatcttctctttagagtctttttcagtgtaccaactggggaattggaaggccgacaagaccctgcccgtctggtcaccaccgcgaccgccagtgtaccaactggggaattggaaggccggcaagaccgatacgtgccccttttccacactcctatcagtgtaccaactggggaattggaaggccggcaagactatcactcacagaaccgtcgcgaccagtacagtgtaccaactggggaattggaaggccggcaagaccgcgaggcggaacgccttcacctg

SEQ ID NO: 2695 - DNA, 23528 bp, synthetic construct
  misc_feature 1..23528: note = Synthetic
  source 1..23528: mol_type = other DNA
tcgatctcgagctggcgcggcggacggtggcgcggctgaagccgctgggcgtgccgattttcctcggcgtgatgccactgctgagttcgcgcaatgcggagttcctccacaacgaggtgcccggcatcaagatcgcggagccgttgcgcgagcggctgcggcattgcgccgatgatcagaccgcgacgaagatcggcctggaagtggcgcgggaggtccgcgacgtggcgctggaagcgttcaatggcgtctacctgatcacgccgtttctgcggtatgaagtgagcgtggcgctgctggattagaggcgcgcagttactgcgcctccggcttcacgtgctcggaggtttgcgtttccgtcgtgctttgcgggccggggactacgtcggcggtggcgtccggcttggcttcagcgttgtaaccggcgccccgccatttgccatcttcccatttcaagacgatgacctcggtggcctcggccagtttttggaaagcggtcttgtacgtgatgatcatgaactcgccctcggtcccttcaaaaccgttgggcttgtagacgtggctgatttgctcgcggctggttacggcgccccacggagtccgcaacgattttaaaaccaactcccacctgtccgccggaaccttatcgtgcatggcgccgcagccgaaggcgtagctctcgtcgtactggccagcgtcgatctggctcacccagcctttggaggcggcgagggccttgtcgacctcgtccgccgccgaggcaaaggcggtcggcgcggtcgcgaaaaacagtgaaacgatggtggcgaggaggaggatcgatttcatagggatgaaaagctgcgctttatttttttgaccgggattacgatttgagtatagccatcgcgggccgttttgggaatgtcatttcgtgattctgaccaacctgacccgggccaacgagatcggcgcgaattcgtacctgcttgatttcggcgccgatggccgcttcgtgctcgatgcggggatgcatccgcggggcgagggcatccagggcctgccgcaactggagaagatgaagttcgattcggtcgatacgattctggtcagccacgcgcaccatgaccacaccggggcgctgccgttgctcatgcgggaccatcccggcgcgcgcgtctacatgagcgaggcgacttactatctctccgagccattgctccacaattcggtacaggtgatgctgaagcaaaaggcggagaaggggatcgcggagtacccgcttttcacgcatcgcgagttggatcagttggtgaaggtctggcaggcgtgcgggctgaaccgggcgtggtcgccgaatgggtatcccgacccggagaacgagccgctgacctttgatttccacgatgcggggcacattctgggctcgacgggaacggcaatccggcatcgcgggcggacgattttctacacaggcgatgtgaatttcacggatcagacgatcctgcgcggggcggaatttccgcggcaggacatcgacgtgttgattaccgagacaacgcggggcgcgcaaccgaggccggagaatttttcgcgcgaggcggtggtggaacggctggcggtggcgttggaggagacgttcgcgaaaggcggcgcggcgctgatgccggtcttcgcgatggggaagacgcaggagttgctcgcgcaactccactttttccagaagagccggcgcttgcccgagacgccgatttatatcgggggattgggacgctcgttctgcgagatttatgaccggctcgcgggccgcacgcggcggaaatatccgaagctgagtttgctcgacgacattcgcccgcaggtgatggatgggcggcgcgcgcgcgatttcagcccgaagaaggggcatatctacctgatctcgtcagggatgatgacggagaacacgctctcgaacgtttttgcgcaggaattcctggcgcatgaccggcacagcattttctttgtcggctattgcgatccggaatcgccggcgggccggttgcgcgcgacgaagcggggcgattcagtgacgctgaacgcggcgtacggcgcgcagccggtccggtgccgcgtggagcatttcgatttcacggcacacgcgcagcgggaggatttgctcagctatattctcgacgtgaagccgcgcgtctgcgtgctcgtgcatggcgatccggccgcgttggcatggttccagcaggaactggccgcgcaggctccggggatgaaagtggtgattcccacgccgggtgaggggatcgagctttaggtctccgtggtagccgccgctgtcccagcggcggtggatagagaaagcgtgttgcaaggccttcgccctttcatgttttcatttcttcatgttttcctgttaaaaaaaggcatgaagtcgcgcccgcgtcatgacagccagcccgactcgtattggctgacccgctttgtccttttgcggtggatggggtttgtctacctcatcgcgttttatgtggcggcgcggcaactggtgccgctggtcggcgcggatggacttacgccggtgaatttgtttttccagagggtgatcgccagtcccgattataacagttggctcgcgggtttcatggccttcccgtcgctcttttggctcaactcctcggacttcgcgctgcgtatcgtgccatggatcggcgtgattctttcgtgcgtggtgctggctggttatgccaacgcgatcatgatgacggtgctctggtttttctacgtgtcgatcgtgcatgcggggcaggattggtacgggtatggctgggaaatccagatgtcggagaccggttttctctgcatcttcctctgcccactgttggatgggcggccattctcgctacggccgccgccgatccagatcatctggcttttccggtggctgatcgtgcggatcatgctcggttcggcgttgatcaagctgcgcggcgactcgtgctggcgcgatttgaccgcgctctactaccacttcgagacgcagccgatcccggatccgatcagcccgttcttccactttctgccgcatccagttttgcaattcggcgtgatctggaccttcatcgtcgagctgggcgcaccgttcctgtgtttttggccgcgatgggggcggtacatcggaggtgcgctgatcatttcgtttcaactgaccctgatcgtctcgggcaatctttcgtttttcaactggctgacaatcctgcccgcgctggcctgcttcgatgaccgggtctggcgaaagatcgtgccgacgttcgtgacgagccaagcggtcgaggcgcagctcgttgccaagccgagccgccagatgcaaggcgcagcctgggtggtggtcgtgctggtcggttttctcagcatcgagccggtgctgaacttggtcgcgccgggtgcgggcgggcaggcgatgaacgcgtcgtttgagtacgattcgctgcacctcgtgaatacctacggcgcgttcggctcggtcgggcgcgagcggcctgtgattattttcgaggggaccaatagcgatgatcccgacaacacgaccgactggaaggagtatccctatgtcggttcgccgtgggacccgaagctgcggccgccgttcatcgcgccgtaccagccgcatctcgactggcagctctggttcgcggcgatggccgcgcccgattactatccgtggacgcgcaatcttgtctggaagctgctgcacaacgacccggcgatgctaggcctcttcgcgggcaatccgtttcccgatcatccgccgaagtacatccgcgcggtgctctacaactatcacttcgctccgctggataatcccgagcatgtctggtggacgcgcgatcggctcggtctgtggctgccgccttatgccgtcgatagcccggtgttgctcgatctgctgcgcatgcagggatggattccgtgacggtgtaacctttttgctggcgcgaacgtccctcttcctatgcgtcccttaccgaatccgattggattgggaatctcctttctcgtgctggcggggatttttctcgtcgtgcagaagctgagcccagggcagcgcggccagccctttttccggcgcggattcggcttggacgttctctactggttcttcacgccgctggtgacggggctgatttcgcgccttgcgatcgtactgacggcagtgccgctgatcctcatcctagggttatcgtggaagacgtttcagagtcacggctatcacggctttggccccctctcgcggcagccgctctggttgcagggtatccagatttttctgctcggcgacctgatcgggtattggatgcatcgccttttccatgggcgcagcctctggccgttccacgcggtgcatcattgctcgacggaggtcgattggctcagtagcgtgcggctccatccgctgaacgaggcggtgacgcggagcatcgaggtgattccgctcttcctgaccgggtacaatccggcgacgctcgccgcctacgtgccgctgatcacgctttacgccatcttcctgcacgcaaacgtgaactggagtttcgggccgttgcggtacgtcatcgccagcccggtttttcacaggtggcaccactccaaggaaccagaggcgatcgacaagaattttgccggatttgtggccctatgggatgtgcttttcgggacgttttatgtgcccaaggccaaggtgccgaccaacttcggcgtgagcgatccgattccggaatcgctttggggtcaactggcgcatccttttcgaaagcgcgcgccggaaaatacttaattccagtttttttgtaagaaccgcgctaagccgttgttgttaacaaagcgctacaaaggagagcgccgtcgcgaaaacgtaacattttgggtcttgtcggcgagttattcacaagttattcacaagggtagcggtgaataaaccgccttggattttgaagaaaattctcatccttacggccggtttcggcgaaggggaagatgtcgccgcttggaaccttcgcgaagccgtcgagcatctcgcgccccacgccgcgcggatcgaggtcctcgatctgctcgattcctgctacggccgctttcatgagctgatgcggcatacgtatcaggccgcggtcagtcgcgcaccccggctttggcacggcttttatcagttgctcgggcaatcgcaattcgtcgagggccagatcgacgggctgacccggctgcgcaccacgttgcgcgatgcactgagggggctcgagcccgatgtggtcatctcgacctgcccgatctacagcttcatgatcgaggagctttatcgcgacggccgcacgcgcgacttcacgctgatctcgctcgtgaccgatgcggtggtgaaggattcgccctggtcacgcaccacttgcgattttttcgccgtagccaacgagacggcggcgcgggtcttgtccgccgcgggtgtgccggaaaagaagattcaggttttcggtttcccggtgcaattccggtcgaaaggaaaacgtgaaaatgaagtttcgctgcccgatctggccgcgaaggggcgcccgcgaattctctatgttattaacagcgcccggaaaaaagcaccgaagctgatcgaccggctgctggaacatcccgattgggacctgaccctctgcgtcgggcgcgacaccgacctcgaggaaatggcgcgcgagaaagcggcgaccgcgccagatcgcgtggaggtgatcggcaacatgcagcatgtgcgtcagatgccggaactcctgcgcgaacatcacgtcgtcatcagcaaagcggaggcggccatcgtgcaggaggcgatcgcggcgcgctgtccgctcgtcgtcaacaagctcggctcgggacaggaagagggaaatttctcgatcctgcgcgaggccaacgcgggcgtgctggccgagaagccgaaagaagtcgtcgaatggcttgagcgcgcgttccgcgacgaggggcggctgctgtcgctttggcggaaaaatctggagccgctcggcaagcccgacagcgcgctgaacctcgcccgctttattctcgaacaggcggtcgcaacgggtatgccggtcccgaaattgcgcgcgttgcccgcaccggaagctgaggacgcgtctgcggcgaaaatcgagaaatcggtcaagctgcggcatctgccgaagaagctgctcctttgcgatctgcatacgcacacgacctggtcagacggcaagctgaccgtgccggagatggttgatttttacggtcagcgcggcttcgattgcctttgcatcacggatcatctgtgcgatccgaaacggttgctcggcaaattggtgaacctgaccggcatggtgatacctccgggcgaaatcgccgcctatttcgaggagatcgagcgcgagaaaaagcgggcctgggcgaaatacgacctgttgctgatgaacggcgtcgagttcaacaaggacggctacacggcgaagacatcgacgcatctgctcggcgtcgacctgaagcagccgatcgacccatcgctcgacatcaagcagctcatcgcggaaatccacgcgcagggcgcactggcgatcgcatcgcatccgcacgagatgaaaagtgagtggggcaagaacacgctttatctgtgggagcacgtcgatgaatacgcgccgctgatcgatgcgtgggaagtcgccaatcgcgatgacattttcaacccggtagggctaaagaaactgcctttcgtcgccaacagcgatttccacaagccgaagcatattcactcgtggaagacgctcctttattgtgagaaagaggcagaggcgatcaagcattgcatccgggtgaaccgcgatgtctcgatcacgctttatcgcgatcaccgatttggcctggatgagcggcatctgcacttggcggcgctggaagacgggccggacatggcggccttcgaggagccgagccttgccgccacccggggctaaacgccacgggcttgtgcacgagtgtaaactcaaaagtgctttagtttgccaatctctggtcctaatctgaagtggcaatggatttcgattcgttcgtcacgctagcgtccgttctgctggttccagccagcatcgtcttcatcatcctgacgatcctgcgcgtgcgccgcagcaaatttcatcggcagcgcatcaccaagaaaaacggcaaagtatcgtagccgtgaggggaggctagttccggctccaatcaagcatccgctgcagcgggacgagcgccttctcgcgcagatcggaagccatgacgagctcgggcgtctcgtcgcgcagcgcctcgtaagctttctccagcgtgttcatcttcatgtagcggcaatcggcgcaggcgcatttgtcggtcgggccgggaatgaaaaccttgtcgggcaactcgcgccgcagccggtgcagcatgcccgattccgtcgcgatgatgaaggtgcgcgcgggattttcccggcaatagctgaccatcttttcggtggagcagacttcatccgccagcatgcggacggcgcgcgtgcactcggggtgcgcgacgagcggcgcgcccggatattcgtggcgaatcttggtgatgctcgcgtgcgtgaactcgatatggatataacaattgccttgccagagccgcatcttgcgcccggttttttccattatccactcgcccagattttggtccgggacgaaaaggatttcacgatcggctgggacgttgcgcaccattttctcggcattacccgacgtgcaaatgacgtcgctctgcgccttcacctccgccgtgcaattaatataggccacgacgtaaacgcccggatgacgctctttataggcagccagctcggcagcgtcacaagactcggccagcgagcagccggcattgatgtcgggcagcaaaaccttcttgctcgggttgacgatcttcgccgtctcagccatgaaatggacgccgcaaaagaggataatgtcggcgttggaagcctgcgcctggtaggagagaccgagcgaatcgcccacgtaatcggccacttcctggatttcgcgcacctggtaattgtgcgccaggataacggcgttcttcttctttttcagggccaggatttcctcttggagcggactcatcgacctaccttagcccatgaagccacaagggtctagatgcaaggttcaagtataagttgtcgcgcgacgtgaaaaatcctgctttgccgcgagccatgcttgccctactgtactactctttcctcccgcacgtgtgggcgggaattcagtcatggacgggtcgcatagcggtttagtgcggtcgcctggaaagcggctgtggtgttaaagccaccgagggttcgaatccctccccgtccgccctctgaaggcttagacagacttgctttttagtgacggattagtgacactccgtgcgtggctctcacgtttccggtacgaatcaaagcaggatcgactacgatcacgatcttccagtctcctctcaaaacagaggacaaggaatacgattcctacgtcttgagctactacgagggaaacaagcgaattcggcgtcgattcagcgattacgggacggccaaactggagggtggtcgtgttgctgcaaaactgatcaacactgacactcgggcacttcaacttacgggggaggatgcacgcattttctctcgggccaaggaggctgtcagtgaccttcaggtgccacttgatctggtagctgtcgaatacgctgaagcctgcaaagtgctcggcgggaagaggattttggaggcagccaagtttttcatcaagcattcagcctctgctctcaaggaaggtaccatcccggaactggttgccgagtaccgggcacaaacggaagcagacggtcgatctgaatatcatctccgtgaccttcgtcttcgtctggggcgtttcgctcgggactttactggaagtttgagcagtcttacctccgaccagatcaatacgtggctccgtaatttggatggctcgatgagaactcgaaaaaactatcgagaaaccattcggacattctttcaccacttacagcgtaagggctatttggcacgagggctacccacggctgccgacgacacatccatcgttaatgtgccagattcggaagtgagtgtgctgacgcctaatgaaatgcagctactgctggatcttgctccaaaacggatccttcccacgttggtgctgaaagcattcagtggcatcagaacggaagaactttggcgtatgcaatgggagaacatcgacttcgatcagggcttcattcggttgacgggtagcattacgaaaacaggtcagaagcgactggtgccgattgctccgaacctgaaggtgtggctcaggccttatcagaatgagaagggcaagatatgtgcgcggtggaaaaactctcacactctgaccgatgcatggtatgtctttggacaacaggtcggcgtttctgtgggagacaacaagctccgccacagtttcattagctaccgagtagctcaaacctccgacatcgcaaaggttgccagcgaggcgggtaacagcattaggatcatccaaaagaactacttggaattagtcacccccaagcaggcgaaagagtggttcagtatcaacccgatgaagaaaaaaccgaagaaggacaaggagagtaagcaatccccagcctgactaggcttacatcattatgaatccacgcaggaaactggccaagattatccgcgatgaactgactcagtccgattccgttctcattcctgaaagtaccctgcaagcattcttggaaaccagcaccaccaacctcagcttggaagcgacgctactcgcctacgaaaacgggtggacgacaaagcttacaccagacggactctggctatttgagagaaaaggttcctgatcgatatttgtcgccattgcagcaatttttctctctgctttcctaatccggactaaataggtacggtaagtgaatgtccgatcaccaaacagtttggtcgttcgatttgggtaagggatcgattggtgaagctgttcgtgacatcaagagcaacaggttcctgcataaagcttcgttgctcatacctgctgaattcgcctctacgaaagaggccactgctcgtcgccggatgtggcgcacccggatcgcacacaaggctcgtgaaaaatggttggatgaagtttggctggctgctggcctggaaccactacaaacacgcaaagtttggaaaaatcctgagatcagtaaatgggaactgaagcaagttggtgattaccggatggagcgggagtttgctccacagaacaggaaacccggacgtgacggggcaccggcggatggaacgatctgttacacctcctgtctactacggatcaaattgctcaggggagaaaaactggagacgtggcaaatttacaaagctctacattcagcgatacagaaacgtggctatggacgtgtgccttgggccgctcgggaagaaaagcggagtggtaagaccgaggaggagcaggagaaagaattaaaaaaactcgacccagattatcgggaggcagtcgaaacgtggccaaaattcaagcgcgccgtgggcggggtagaatttcatcttccttgcttttacgacgcatggaagatggggctctggtcggtggattgcccggaggtttttgagaaccgtatcacctgccaagcggagagcactcgaaaggtgcgctttgaccgtgccgatgtcgaacgagaaatcgaaacgcttggtcaacgggctgccgcgcagttgctccaactggccgatgccttcgcccaatggaaacgtgacggctggaaatcgatagattcttttccggtgacagccaaaaccttcggtgaatttcttgtccatggccccgctggcgagccaaagggggatgctcgaaacaatttctctgattatttgaagttccgtgcttcaaacaacatccattctggcagcggtgacgattggatgggggcaatggcacaaaaaacacctcgctttgataatcgcattatcaacacctgtgctattatacccagacttcaagtttgcaacgtgaccattcgttttaataagagtgacagcaaacctgtaccagagtctctgctcgccacggaagtgacctttctgatgaagctgaaaaatactctcgttacgagctaccccgcacagcgaaaattgactgtggaggaaatacgaaagatttttgaggtcgtaaccgctgaggcccttaccaaggcgttgagcattgatcctagtgacaaaatccgtgagaagaaggtcgtcgaatgctacgcgctgacaaaaacggactgggctagaaccaaaggcattaaggagttggggttattccctctgccgggacacatggaaataagagcccccaagtcggatgggcgtagccggttcagtcgccccgctcttcgcctgattcgggcgttgattctaagtggacaaagtccctcaaccttttaccaacgattgcttgcgcgtgatcctgctctgattactgagattggaatggatgtgctcgatgctgagcccgttcgttttgttggctcattgggtggagagaagaaatttatcaagacagagcgttcttgggtggttgctaccgatctcaaattcctcactgatctaactcgcagcaacaacacatgggataatatttattttccagaacaacgtttggatgccttggaaacccgttacaccgataccgatgggaagatcaacgtgcctcaagccgtaagagagcttttgggtagcatcaacgatcctgtagtcagacaccgactgggcgttttttcggatcgtctcacgaagttgcaatggggtgatgataaggagggtattccgccgtgtggcattcccgacaccgttgtgctggaattcgtgcgcgaagatttcatgggagagcgagccaaacgtgaactgcaaaaatttatcagtgaccgcgagaaggcgcgtaaagaggccggagagcaagccgccgcacttggtgtccatgagaagtcaggcaggctgaaatacgaacttttcaagtcgcaaggtggtatctgcctctactgccagcagaatttcaaagagaccgatctggcagattatcgaatcgagcacatcgtgcctcgcgctcaaggcggcccggatgccatggtaaactatgtgttggcccatgaagcctgcaacgacgccaaaggtgacaagacaccgtttgaatggaagcacggtcaacaaggttgggatggatacaaggcatgcgttgaaaaacacggaacattgcttcgtaacaagaaagtacaactcctgcttcgagaggatgccgccgagttggtcgagcgttataccgctttggcggagaccgcgtggattaccaagctcgctcaaaaaattgtatcactccattttggatggccgagaggtaatgatagggagggtaaacgacgtgtgattgctgtttctggtggtctcacggcttggattcgcagaaagtatcggcttaacagcctgcttaatcctcctcccgctggtaccgttgatctcaatgagtgggaggcaaaagccgaaaagaaccgtaaggatagtcggcatcatgcgctagatgccatagtcattaactttctgccccagtggatgcgtgacgagaaaaagggttggtttttccgttttccagaacccgtaagaaaaaatcctcgtggggtttttgaaaaagagatcgctgatgtcatgccacgattactcgcttttgaaaaggcaccgctggccgaaacgatctacggtggcagattagataagggtaaaactaccatcgtccaacgggtgcacttaaaaaaacttgcgttcaatacgatcaaacagaaggaggtctttgatcgcaagtatttggccggacaaatcaagtccgtccgcgattcaatcacagccgatatactgcttcgtttcttggaagaggagtcgaatggagaatcggaatggcatgatttttgtgaagggctatttcaacgtaagcgcgatggaaccaagggggcaaggatctccaaggtaaacgtcacagtgggatcggctgacgagtacgcagaaatgtcgaaagacggcggaggcgcataccgtaaggggaaaaaggggcataagggccagatcatttacctagaacgcaccgtaaacaaaaagggggccaccaaagacatcattcaagttcggccggtttacgcttttgaatcacgtctcacaattgaacgtaaactccgggatgaattgggcgacaacataagagtgtacggtttcttccaaagcggatgtctcgttggagtagagaaggaggtcgcacatgaaaagaagccactaccggcaggaacgtatttgctgaacacaatcatggcagacgccaagtgcatgaaggtcaccactcagaatggagtgacctatcctgacattcctcgttattcgttatccagcctgatagaagctggcctgcgtcgtgctgattaaaaattcaaggtaataccaatgagctaccacgttctccatgtcttccagcacggggcaacgcttgccaaggaaagaggtttcatcgtttgtcgcgcccaggacaagtcggagcgaaagctgccacatgaagaccttcgtgccgttattattgctgctcgtggggtgacactgacatccaattttgtttcggctgttttggaaacggacgggatcattctgcactgcaacgaatcgtaccagccatgcggtgtgactgctcccttggagcgagtgatcgaccagcgagcttttctgaaccaaacgtcgcgacccaagcggctcaacgagcgaatttggcaacgcattcttcgcggcaagaccgtcaatcagcagcgtgtcttggaacacaaggaactccgcagtccccatctggagcttgcgctcaagtcgggtaatatcgacgagggcaactgcgcaaagcgttactggcagctctattttcctgctatcggttggacatcgaccaaacgggatcgaaaggaaaacaccgcaccgaaccaaatgttgaactacggctacacagtgcttgccgcgctctgtcatcgtagcttgatcgtccatggcctgacgacggcccttggcgtacagcacgccacacgctaccgctcgacgcctctcgtttttgatctcatggaaccgttccgtcccgtggtggatatgatgctggccgagtttatgaccgagccggatgtcaacatgcgggcatggtcaaaaaaagttggtacggacttgagggagcgtcgagtgtcgcacgaccgctattctttgaagttgatggatgctattgattcgtccgctaattcgctggctcgcagctatagtcagatgactgtagaccccttctgggtgcctgagttgtgatcgaaaagaaaagtgcgtaccgaatgggctggtctctggtcatgtttgatctgccagttctgaccgataaggaaagaaaagtggcctcgcgttttcgcaaggatttgctcgatagcggatacctgatgatccaatggtcaatttatgcacgcccctgtgtgacctacgaacagatggacactcacattgcccgcgtcaaggcgatgaccccggaggcaggtaacgtgcgtctcatgttcatcaccgatcaacagtggggcaacgccgtgacgatagttggccccaattaccatcaggggagccgaagtcttgatcccaccatgccgcaacaggtcgaattctgggaatgaaaacaaaaagtgccattcggacgtgctaggcagtggtccgaatggcactaaattagttgagacttcgccccccggcaaaaccagctaactgaactaagtacaactcgatcaaccatctccgtcaatcctattgtaactgactttgccggggggtgaagtcagaactatcctagttgttttaaacgccttcctatgattgtaactgactttgccggggggtgaagtcagaacaccataaaacgaggtagctactacgagaacattgtaactgactttgccggggggtgaagtcagaacgccgtggtctctggtgccagcggtcagtagattgtaactgactttgccggggggtgaagtcagaacattccggagggagcgggtagtggtccgataattgtaactgactttgccggggggtgaagtcagaactggtacgcccggaatatatcgtggaagaaaattgtaactgactttgccggggggtgaagtcagaacgaagctggagtgttcccgatggacatcccaattgtaactgactttgccggggggtgaagtcagaacggtagccgggtgctccgttggctgtgaaatattgtaactgactttgccggggggtgaagtcagaacggattctgcacggccagaaaagctccacgaattgtaactgactttgccggggggtgaagtcagaacgctcatcaacttcccctttcggaatttgacattgtaactgactttgccggggggtgaagtcagaacgcctttttcatcaacttcgacttacgccatattgtaactgactttgccggggggtgaagtcagaacaattccgctattgttaacgtgcagtcatgcattgtaactgactttgccggggggtgaagtcagaacgggttgtcagccgtatccagttgtggcatgattgtaactgactttgccggggggtgaagtcagaacattggggaaatgaaccacgggcggacggcgattgtaactgactttgccggggggtgaagtcagaacttgccgtccctgcatacgacggcaacatgaattgtaactgactttgccggggggtgaagtcagaacactctatctctatagggtgtctgttcagtaattgtaactgactttgccggggggtgaagtcagaactgaggcgtcaaaataacgtggtccggtttgaattgtaactgactttgccggggggtgaagtcagaacaggtctacggcatcccgtggaatctgatcgattgtaactgactttgccggggggtgaagtcagcagctaaaaaagaagtgccctgctacgcagaacacttcctttaccgtcaccggcgatgtggctttccacgcaccagccgacgactctcccgactgtcgttgacaaggttggtgccgcaggcgagaccattgatccctaccaacatggcgagacttggtagacccacccacggatcagggacaaagaggagagcaccttccattatcaccacaaaaccaagtgctttcatggggtgtttgaaagccactcgcgcccaactgaacacactgaggccactgtacgtcatcccgccaccaaccagtaaccagagcatgggtaattcctgcacatgatagtggacgacgagataactgaccacgggtacccatccaccgaggacaaacccggctgccatcgcgactcgattctgcttatgacttgcccgcttgaccatatccacgatgcccaccccagcggcctctgaggtgggtagagtccaaaggtacgacatggctattttatcctccggctgttgcgctcgatctccttcaaagcaacttgaaccaacgtgaccacgacggcaccgaccttggtgatcttcctgcccgtcctcttactgaacttcggcatcttgaatttccacttcatactgtcctcctttctttggagggggttagttcaactgagcggcgggtaagccgacatggttatccatgagtccgtgtaaggcttgcgtcctctttggcagctcgtccaagtttcccaacttgagaatctcagtgaatccgttgaagagactccagacgttccgttcggtaaagacggagtgccgtggttccctccactctttgatgattgatggaatcatgcggttggtgcaggccccaacatcgaccgcacgaatgactagatcgtgcgcagtcttgtctcgaatccgttcattcttgtatgcctcgatgcgttggtcttggtgatgccagcactccatgagcagccccacggcccgagctgacatctgaggcaagtcacgcatgagatgaaccgtatggcgtctggacaacttcacttctccactgaagctcagattgctgcacacgaacacatttgccccagctacgattcctgccgggaaccgctttgaatgactgttcctgagcccaaggacccacgagtaatcttgttgggtattctgaccacgaacttccgtaagtccgaaatattcggaaccgccgaggtcgagggaatgaacctgctgaccgatctgcaaaccgacggctctcaaggacgattcgactgtctccaccaacgtcagatgtggaatgggaacccatgtggacgttggttttggcgtcgaggttcgcgccaccgctattctttcgactggtttgctgccgtacaacacgaggttcgtgcggcgttgttctttcaattctggcattttgactatttcctttctgggttgttggccgctgatgacggcgactttggttgtgacaggagctttcaacggctcctgtccgttcttcgattcggatttcctgctcgctgccgtcgcctcgacgtaagctttcaggatcgcctgctgctcttctctgggtggattttcaccacggcggcgtgcgatgagatccttgaacgactcacctttcaggtcatggccggagagtttgttttcgaggatttgaagaagctcctcttcgttctttccctcgatgggattcttgattccttggtaacgtgcctctgacttagtcattccgactgcgatgatccaacctgagagcgcgtcatagagacgtagctgcacaggctttttcgattcatcccgatggatgaaaagctctacacctttgtagaacacagttttgaaatactgtttcttcggtggtttaactgcgctttcttgaatgttaaccatggactgattcctttcttttgtttgggttttagtgccagtgtcggcactcgttttggaactgacacgagagacatgccatccccggactggggacgtagtcctctcgcttaactccttcgacgtagctctcgatttgcttgaagagccgtgtctgctggttgtctgtgatcggcgggagcgaggtgacgatcaacttgggcgatttggttttcaccagatgatgcaattcaaaccctgattcgatctggtccgtcgcatcgcgatagagcaggccgtaacaagtgagctggatttcattctggtgagccaccgattcgccattgggcgtctgagcactcgttttgaagtccacgatatttccatccggcctgaccagatcaatgaagccgatgatcttgggtagcccatgcttcccaaggtcagcttcaagctgcacttccaccgccatcggtttctcgtctggtttgatcggcgtttgatcgaggtaaagctccagcgtactgatggctgactgcttttgctttccctcgtcaccgtcccagtcgatcttctgaccgtcttgctctttctgccacttgctgtcgaatacctcgttcaggttttcccggaaggcgaagtcaccgcgccagcgtgcatgattccattgctggagtacggcgtgaacgaccttacccaccgccaacgcaggcgtggcaggcttcttgatctgagccacatagtggaaatagaactgaagcctgcacgttgaccaccgcttcagacgactggcactgacctcttcgatgagcaattcagcaatggatttatgatcggtgccgttgttttcggcatgagcgatcatcggcgattgcctccccgctgatacgaatgggaacggctaccgttccggtttccattgccgttggatttcgagggaccgtatttctccagaagctcttcaatcagcccggatgcttccatcttgttgagggccttcaccggctttccgaacatatccttggccaagtcctcgatctcatgtttgtcgagccggtgttcatcgacaatcttgaggaccaaatccttttgtttatcgctgcatttccagtagtcgccactgtgggatgaactggaacgaccgttgccacgatgattccctgacccgttggcattggagtatgacggctctggtgctgaatcgtggccgtttggctcgggcacaaaaccctcttcctgaatgttcttgtcgaccgtctcttgtaacaacacatagagctggttggattgcttctccacctgaccgacgtcatcaacttctgtacggaccgtgacgctgtacgaatggctgctgtaaccgggcagaccgatcttcttataatagctggcttcgattgtgggcatgacgcctcctttcttgggttagacacgaaaaaagccctgctccacgaggagacagggctgctaaaaaacgtcagacgtgacgctttcttatctagttattataccgcttgggcgggctgaactatgggagggggtatcgaagtgaatggtcccttccgaagacggatcgttgtttatcgtggaggccgaaactggtcagcgcagtgccatcttgtacaccgtggtcgagtgctgccgacgccgtggactcgatccccaatcctatctgcgccatgtcctcgtccggttgccttcggccaccaactggcagatcggcgaactgacaccacaaggctgggccgaacacgcacaaccactccagcgtgccgcctaatccaatggtacatgtggtgcacgtcgaactgcaccacatataccatccggctctacgtcaataggcactccgttggacgcttacgataaacatggcttccgcccaactcgacattctcacgatgcagcaacctcacgtgacaattgcacagccaatgcatccagcgactcagctcctccatcattttaatcgagaccaccagataccagtgatttcccatgagacaatagccccacaattgcatctgaaatttctctacggactgaccgagaagctccagaaacacagtaaactcctccgaccgccgaaacaacatctgccgatgattacccctgttgagcacatggaaatagccctgtcctaagtttcgccgtgcgatcctcggcattcttcttagctatcgcatccattcgcgcccgacaagaaaagatgcctgtcccctttttcctgtgcagcggatcacggaatagccaattggcatcccatcagctattggttgcttcatttcgagcatattaaccaaagatacgagcctgcaaagacagcaatggcaacgtagaaccatattcctagcgattgagcaattgttttcgagtttttatcgtcgcggataaataacagacttatcgcccaaaacccgacaggtaaaagagagtattttaatgcccttccaccaagatgatctccaacccccaaaaccagcgcaacgtagatcaagccccaagtgctataattttttatgatcatggatatgattttatttgctagatgatgcacttgatccactggcgcatgctttagccacggcaagataaagcgttactaaatatttcacctctgggctcaactctggagcaatcgccagcgacaaaattgcagccacattaaccatcatgtctgcagtgagcgggggcaagtcaaccggaccaggtgattgattgagagtggtatcaccgaaaacggaacccgaagagtcatcgtaaacgctgtctgcttgagcttgagcgttttctgctgcattatacggatataaacccatcgggtcacggaaccgaagcgggttattgccaacataatcgtacaagttaatgcccatccgttcccccatggggtctctggatagccattctgctatcgacctatcttgaggtaaacttatccctgttttgaatgaagaaattgactccatcttttgtgatgtaaaaccagaggccagcaacttccccttctgaaaacgttgtttcaacatactgctgtttggtaatttcgtaccgataagcttgcaccagtttgcgttcaactaaattaaacaaactgtgtgcgatctcctcggacgaaagatgtacattatcgttgcgagccaggcatttttttatttctgaaacctcttcatagtcgtcagccacccacttcaaacagtagtaatcgatctggttgaaggagttcattttttgcatttaggtcccccgggacgataatgttgagatattatcttcccattcttacttatgatggtgtgtctggtgaccaaattaccttgggcatcgacgaagacttcttcaacgctaactgccccgtcgatacttgttgagtcttccacttcaatttgtcccgtcggcgtgaggctaccttcggggacgggattgccggctgcatcaatagcttgtgccaagctctgtatggcactggctacggcgttggcaattgcattgcttgcttgctgcccagcgggagtgctccaaatataagctccgagcgccgcacccaaagcataaccagctgccgcatcggcttccgcggcatcgtcaacgccggccaccaagccaagtggatcaatcaagcctgtcggctcgttgttgacgtaagcgtacaggttcggtccgatgtcttccccgagaggatcccttgctagccatttggccgtattgggatcgtaagctctgaacaaggtcaaattcagtccactagcgacgtgctcataatagcctgcgtactgataatctgaatcgagcgagccggatattttggttgctcttccgtacggatcgtaagcatatctggcttggaccgcgccggaattatcaaccatttcgcggatagagccaaggtgatcgcgggtgtagtagtagttggttcctgaaatctgctcaccttggaaaaagaaccgtttggtcactgtgttgctggcgtcgcgttcctcggccatgcggctgccaacccagacaatttgcttggtgctcgtgaccgtaccactggaattcttctccacaatcgagatacgacgccccatggcatcgtagaggaaactgctggtacctccgccggtgtacgtgattgtggtcaattcattctgggcatcccacgtgtatgcctggccattaccgttactggtcaggtttccgttgccatcgtacgtgggcgacaccccggttccggaaggaattaccacctgatagttgttggtcgaagtattcccgtcaacatcatgggcaataaccgcaacggtgttggtgccggtcgtgacggtggcattgccagcgaaattggtgctgtagctggtcgtggctgcgttgccggcgacggtgacttgagcaggcttactgagggtgccgctgaattgaagtgggcctccggccccggcgctggcgatctggttcaggttgttcacggcggtttgggtcacgttcaaaccgatctgctcgctggtgcggtttccggccaaatcgtacccgtacacatactgagacaataccgcttcggtggaggtattcaacttcgtagccgaattcaactgatcggcgttatcgtaaccgtaattccagacagtcggcgtgttgctgtcggcctgctcctgccagctggcgagagtcccctccgggttgtaggtgtagtcgaatttggacaggacggtcgtgccggtcgaatagttgctgatatcggtcaggcggaagtcctggccagtccccgactggtagctgtagctggtgttgagtccgttctggtcattgctgacggtgtggagacggggcgtgatcccatagtagccataggtaaagttgccgagcggattactggccccgttgacccggcccaacgaatcataggtcacgctggaggagacgctgttgatcgaggtgccggtaacgcgcccgagttcatcgtaggagtaggtgacggcggctgtactgcccaatggcccggtttcagtgttgagtcgaccacccccggtaatcaatgaaccgctggtgtagacgccattgtaggtgaaagtggtcgggtaagtcgtactcgtggcggtgatggtcttgttcgcgctgaggagccgcaaatagggagtatcgtaagtcagggccacggtgctatccgcataggtgatctggcttgggctgtcgtcgtcgttgtaggtgtaggttgtgacctggctcttggggtcagtgatggtcttcaaccggctggtcctgctctcgtaggtgtaggcgtaagcgctgccatcggcaaaagtcttactggtggtgcggccttcgatgtcctggttccacgaggtgcgatttcctttggcatcgaccagccctttcaactcgccacaggtacagcgttcgtaggtggtgacacgcccctgggggtcaaccatgccagtcaattgctggagagaattgtagagataccgggtccagcggttgtgctaactaccatttgatggggccgatggtgggctaaaaaggggtaacactccaatgatggtaaaggagtgttgtgatggaagagaagatcgaagttgggaaaaagtcccctcgtaagaagagccaaaaaaaccg

SEQ ID NO: 2696 - DNA, 15385 bp, synthetic construct
  source 1..15385: mol_type = other DNA
  misc_feature 1..15385: note = Synthetic
aatgcgccggagtcggtcacggtgctgatgcttccttgggaagcgccgctatttgctgaagttcggatgcttcggatcgcccatggattcgaggtacgccagcaagtcgaggatctctgcctccgtgcaagtggccagcaaacctggaggcatgatcgaaatcttcgacagctctcgcgatttgattttggatttatccaccgtcgtggtggcggcggcatcaaacggattggtcatcaccacgaccttgtcacccgactcctgactaatgcgcccggcgacgaccgtgccatcggtcatcgtgaaaatggtgttcatgtattgctcggagacgaccttcgaaggctccgtgatggattccaaaatgtcctgccgcttgaatcgggtggacacggtggtgaggtccggtccggttgctccgccttgatcgccgtaacgatggcacagggcgcattgcacggtctcgaaggttgccttgccacgcgcaaaatttcggcccctgccgaccttttccagcagcggctgcaggtcggcggtctgccaatccttgacgaatttgcgcggctcgatcggagccttggcgaccggcttgagcttggtgaggtcacccatcgccgcgacttcggcaggcgtcatcgaggcggtcacgtccttgagggcattgcgcagaaagcccgcaaagcttgcgccgttgttgaaattgatgccggcgtccttgaaccactggacgacatgctccggatgctgcttcgagcgctccgcattccaccacgacagatattcgcggcgcaattcctcggtccatcccgatttgatattccgcaatgcaatcacataggtgagctgctcctcctgggtcggcgcggacttcagcagtgcgaccgtcctggcgacggcgtccggggcgttgagcgcgagcagaacctggcacaattcacgattcgcaaactccgtcttcgcgggataaagcgggctcacatcggcgatcaactggctggcaatttcacccgaaggaacgccttgccgcgcgatcgaaacttcgatcacgcgcaatttgttgagcgtctgttcttccgtgagcttcgcgaatagaaatgcggtgagcgccttgacgatggcaggctgcgtgtcggcactgccattccgaaccagcgcaagcagcgccgtgaatgcagcgtcaggccgtttctccgcgagcgccttggcctgccactcggcaacaggattgcgttcaatggccatgcgcgctgcatagcgaatggaacgatccgggctgttcaggtgcagccatgcgatcgcaaccgccgcgggatcggcctggacattgaatgcctcgagcttgtgtcgcaattcgcgcgcgtcgctcccgtccttgtcgcgcaactgcgttgcagcgattggagcggcagcttcggttcccgtataggtcacgcggaaaagattcgcctgggtgccacgtccaccggtgacgaagaaaagcgagccgtcgtctccaatcataacatccgtgagattcagcggcgtttttcccgtcttcgttttcagtgatttcggtgcgacgaagttttcccactctccgccgtagctggcgccgttcggtttcagatgaacggcaatcaggcgtccgtaagtccagtcgcagatatagaaagccttctggtatttcgccggaaatttcgcgccggttccgaagaccacgccggtggggcagccgatgccgatcgtcaccgatgctggcaggctgtccgcgtaatactccggccatttcgcgccgccctcgcggaaaccctgatcgcccccgcgcaccgcatgaaaggcgcgaatcggacgataccatggagtgccccagtcccattccatgtcgctgtcaaagccgaacaactcaccatcggcattgaacgcgatatcgtaatcattgcgctgacccgcggagaacaattctgcattcttgccatccagatccatgcgcaccacgtagccgcccggcggttgcttgcccacgccgaagccgttgccgtcttcgatgcgcttgagcgccagatcgtccgcgtagttgcgatggggcgaactggccacgaggtccttcggcactccggtgaaatttccgcacaccgcgtagagcatcctgtccggcccgagcacgagaccgtgcgcgccgtgttcacccgatccgccctgccattcgcggagaaactccacgtcgtcgtagctgtcgtcgcccttcgtgtctttgcagcggtaaagcgcgaacccgcgactgccactgccattgatgtaaagcacgttgtccacgaacagcattcccatcgtctcactcaccgggatgctcaggatttcctccttcgcgactttgccgtccttcagcgtcacccgcgtgatcggctggccacgctgaccgccaagcagcagccgccctttcggatccttcgccatgcaaatccacgagccgttcttcttcgcatccgccgaaaggacgtgctcgatcttgaaacccggcagcgtgtccagaacctcgccggggctttccgtgaggacggcgacagccgcgggcttcgaaccatccgccggcccatacacggccttgagaatgacgaggtgtttccccgcaggcgccgaaatttccagcttcccgttctcgcgcacatcgcgcgaaagcttctcggtgccgacggtgtattcgacatgcaatttcttcggcacgccctgcgccgtatcgccaaacagcgcattgccggccgcaatcgagagactctcgtccttcacggcggcggcgacgacggcggtcacatccgtcggatctttggctgcgattgcaaaatcaaacggagcgagacacgcgacgacgatcgcaagcattgatgacttcaatcgaaaacacggttgaacacggcggttggaatttttcatggattttttcaaaacgatttcaggttcacggagagacaggatgaatctgccgtaggagccgatgcttagggagccaaaatgcgctgaattccaaccgcgtgttcggctgcgattttttttgagggagtcgtgatgaagcgggcggattcgatctacccggtgcagttttgcgattggcggttgcagccgggctgtactctgatcatttgtggttcgactgatggcacgcctcgtcgggtgcgaatcttgatgaacaagacgatctctgaataatgctgcacgctccatgaagccgaacactcgcattctcccgtttgtcctcgcgatgctttcaatcgcgggcatcaaagccgagccaccgcgcacttggaactcggacgagtcgaaggtcggatcctacacgctgcccgatccgttgctctgtgaagacggggatcgcgtggaagacgcgcaagtgtggcagaaaaaacgccggggcgagatccttcgctcattttcctcgatcatgtatggccgcacgccggagccgccgttcaaagtgcgcggcgaagtgacggcgacaaggaaggatgccgtggaaggcctcgccactcgcacgctcatcacgctgcgatttttcgatgacccggcagcgccgttcatccggctcatgctctatgtccccaactccgcaacgaaacctgcgccggtgtttcttggtctgaattattgcggcaacgcgtgcgttgagaatgaccccgccattccactcaccgatcagtggattcgcccttcgcccgagatgggaattgtcaacaaccgtgccaccgaggccacgcgcggatgccaggcttcgcgttggccgctcgcgatggcgttgcggcgcggctacgcggttgccacgtttttttatggcgacattgagccggataatgcggatggctggcagacggggctgcgtggctatctgatgaagaaggagggtcggagcgcacccacgccggaggagtggggtgcgcttggcgcgtggggctggggactgagccgcgcgctggattatcttgaaacggtgccatccgtggacgcgcgacgcgtggcggtcttcggccactcgcgacacggcaagaccgcgctctgggccggcgcgcaggacgagcgcttcgcgctggtcatttcaaacgacagcggcgagggcggcgcggcgctcgcacggcgcgactttggtgaaacgatcgcgtggtccatcgaacacgctgcctggcggtattgcgaacggttccgcggtttcgtcgggcgcgcggccgatctgcctttcgatcaacacatgctgctcgcgctcgttgccccgcgcccgctctacatcgccagcgccaccgaggatctgctgtccgatccccgcggcgaatttctcagcgccgtccacgcggggccggtgtatcggctgttcggatacgaggggctgggcacggcggaaatgcccgcacccgatcacgccatcggccaccgcgtcggctaccacattcgcacaggcaagcatgacatcacctcctacgactgggagcagttcctcaactttgcggatcgccacctcaaaagcccaagaccgtgaaagaaaacttcgctgctttcgccgctgccagcgatcttgctggcatcgcccatgacgtgccgccggtgcgcgcagaccatatcgaatctatcgagcgcgccagcatcgccactgcaaccgggattccagtgatcctcaatccgtcgccgctgacctccgagttcatccaatccagagcggaaacggacacgctcatcctcagtgcgctggaggggtcgcgcttgtttcgacgacgcacgccgagatcaactccgacccgcaacgcgcacgctccgccgccggttgccgccaaataatcatcacccgtggaagccgatcccacgcccggagcgcgatgcgatccttgcgctcatggggcggtgcagcgcagacatcgtgtgatgtcttggggatgtagcgtgcgcgtttggcggattggagatttccttccctcctcatcgcgcacgtcgtggcggcgatgtcggctccattttcgcagcacttcatcgtgagtgggcgaatcgtcaccagaaaatcttcaccgacggaacaatttccgaaaaagccgcagtgccgtgatgacaatgcacatgctctgcgcgacctcaatcggacacggcgaccgtgggaaactggggcgaaaaggacatcagcgaccgtcggtggatacggtgaacgtgttatgcccctgattaagacttcgccacgcttcatgcgtaactccttcacgtagaaaatggcggagagagagggattcgaaccctcgatacggtttaacccgtatgacgctttagcaaagcgttgctttcgaccactcagccatctctcctagtgtctcgatgtgagtcatttgcgacgattttttcctcgccgatttttgcgcttgtaagccactttggtaagtgtaggctgtcggcatggctgcaaaccaaaccgacgctctcaagcgcgtgggcgagaatctttacgtcaacgatcacgggacttatttcgcgtggttttcggtggcgggcaagcaaattaagcgatcactcaaaacgagcgacaagacgctggcccggcggcgtctggccgagcttcggcagaaaggcgcgcggctgcatggcggggagaaaaaaaacatccatttcgacgaactggtgaaaatgtggctcgaatcgatccggaatgaggtcaaggaatccacgtacgtgcggcgcatcgtctgcctgaaccagattaccccgttcttcaagggcgtgtcggttcgctccatcgggattcagcaggtcgagaaatggaagatcgcccgtggcggagagattgcgccccgcacgttcaacaaggagctggaaacactgaaccatgttctgcgctacgcgagggacgtgaaggggcttctgctggaaaatcccgcggagaaaatccgtaaccgcaaggcggacgctgcggtggtgcagattcccagcaaggatcaattttgtgcgctggtcgctgaaatacgcagggaaccgcaagcggttcggagcggtgccgctgatttcgtcgagttcctcggatattcgggcctgcggctgggtgaggcgattgcggtggagtggtgcgatgtgaatttcgacctgggcacgctgctggtgacgggcggggaggacggcacgaaaaatcacgaggctcgttcactgccgcttttcccgccgttgcggcgattgctggaacggatgcgtcacgaacggaaaaacgcgctcaatcccgatgggagaattttcggatttcagcacatccggcaggcgcttatgtcggcgtgcaaacgtgccgggctgccgcatttcagccatcatgcgatgcgtcacttcttctgctcgaacgccatcgaggctggatgtgatttcaaggtgatcgccggatggctcgggcacaaggacggcggcgtgctggtggcgcgcacctacggccatctgcgcaacgagcacagcgcggcgatggcgaagcgaatgacttttgatgtgaacgcgcaaacagaggagcccacgaatgtcgtcgcaatcacccgcaagtcctgagtcgccccttcccaccgatccggcacagcagcaaaagccggagctttggaaaatgccccggactccggagtggctgacgagagttgtgagtcgccttcaagccatcgaaaaattctacccaccacctgcttggctgaacgacgaacttcctccgtgggcagttcacattgcccgggagtttgccaaaacgtgctacccggtcgccaaactcaaagtcggcagagtttggcatcccggtgaggtcggcgcactgctcggacaccagtttgcatactggcaatggttcgcagaaaccgtcgaaacgaaatgtaacaggccacagccatcgtgggatgagcttcgcaaagtgtttggtgccgacattgaggagcgttcgacggaaatgatgcagacgatttgcgaaaaggtcgcgcccgcattcgacaaggcgctgaaatttgcgctctgcaccgccaccgatcaggattaccacgaggcttcagcattcttcgcggcgtatggccgcgcaatcggaaggaaaccaagacagggtgatacctttggccgcaccaccacgacgctctactgggtgatgctgacgagctggcggcgcgttgtggaactcggctcaatccatgaactgcaccgtcggctgtgccgctgcattttcctcgggccgcgtctggttggagatctgaagcgcgtggaaaaaatctgtgagcggattggattgagctaccagacgcaggaaataggcagcaggtagcgcgcccgccttcccgacatggcaattctggcatgtcggtgccgcgcgtgatttatcgggtgtaaatggtcgctgcatgaacgcagcaccactctcagcaatcggtaatgaccggctcgcactgacgcgcgtcgaggcggcgaaggcaatcggtgtcagtccggcgacgattgaccggctgactgtgcgcgatctgctgcggccttcgcgcgcaacgcgccgcccgctctacgcggtcagcgagatcgagcgttttctgcgagagacgaccgcgcaagtgccgcaaggaggcgcgtcgtgaactttcaagcatggccgtttgccggccactccgcgcgctggtccggcgctgttggagccatcaagggactcatcgttgtgaggatcaacggcggaggccgtggcgaagcctgccgcgcaaggaagccggaaacaaaaccatgaaagaacaaatcgcagtcgaagaattcctggctgggcgccgcgtgctcatcgtcaggtttgtggcccaccgccacaaggaagtgcagaacaaggcaaagaaaaccgtcggcatcgtgaacctctacgaggttttctgcgccgacgggaaggcacccacggtccaaacgtggtgcccccgcagcatccagacaatcgaacaggccgccgcagaatgctcctgcaagttcagtgaggggcaaaagctggtggtgcagttcgacctgatggaaccgaaccattttgacgccaagaacggcgtcatcatccgcgcggtttccgtctcgccgctggagtagctgcacgcggccacgcatgacggccccgtggaagggttggcgggagcgggcgctagcccgccccgccaatccatccttgtccgagaggtgtgtactgatgtcagcaacccaaaagcagcaaacgaaaaaatcgtatgaacaacgcacgcaacgtcgaaccggatttgagattcaaggccgcccaactcaacatcgagatgggcgactgggtgcattccctcgctccatggcaggtcatcggccacctgacatttgcttggcaggcttccatctggtctgcccagcggtgctacgagaaattcatgcgaacagagatgcgtggcgtttcgtatttttacgcgctggagcagaatccgggaagggacggctatcacgtccacgcactatggtacgactgcaagagcaagtcccggcagcatacttggcggatgtggtttgagcgttacggccgcaaccggattgagccggtgaacaaccgggacgacgtggcggactactgcgccaaatacgtgtgtaaggaaggcgcgtggtggaacgtcaaactgctgggggatcgtcaccctcaattcaccaacggcctgccgctgtttgggaaatcaacgacgggcaaatgatcgtgcttcgcggctggtcttccctgctcccgtttcacgaaaatggcgcgatcaactcgattaattccgtccggttcttccggtagatgcgaaaatcttcgtccagtgtgaacactcgcgcgtcggaagccagttccgccatgcgaacaaggcaggcatcggcgagcgacattggaaggttcccgtagcggttcatcagttccagcactgccgccagctcggagcgcaaatcaaaatccagcaggatcaatccctcgcgcagcgcatcgcgcaaggccgcatggcctccgcgaactttcgcaaggagatgaaaggcctccgtcagcaccggctcgcacgttacacacggctccgcccattccgcaaaccgctcctgcacccacggatgatgcgcctcacgtgcggacagcagcgccacgagcggccccgtatcaagcagaacgcgagacaccgaaaccctccatgtgcgcgggattcgttgccaaatccaccgggctggccggatcgttcaccatcagttttttcagcttttcaaagacagactgcggcaccgcattcgcatcctgtggcagcgcttgctccagtgcctggcgcacgatcacatcttgcgtcacactccgatgacgcgcttcacggaccagacgctccgcaagcgggtcgggcaggctgacagtcagagtgctcatggaagcgaaggtaatcgcctgaataggatgagtcaaggatcggtgcttacttgctccgatccacgggcgatatagatgaccatcacgcagttcgacttcgatgacggcgtaactcatgcgcgaagcctaatcgaaagcaggcgctctcaagcgtcatgcccacttcttcttcatgcaatgaggcggcaaccattcccccaccaaaccaccggatgcgttgccgccgaactgatcttcggtggagggtgtttcgcacgaggcatgacacgcctggcgtggcgggacttgtgcgggttgcaggcgggctcgttgggaagtttgaatcgtcgtaggttcgcggagcgattcaatcttcgcggtgggtcttcggctggtggcagcaaagtcttcggcgtttgcagcggagcgaagtcgcgggaatgtgggacgcagtggcgcggaaaatggcgaagtctttgctgtggcgggacggtgcgtgttcgctcctcgattcatttctgcgacgcgtcttttcgcgtggaaaacacgcttgcccgccactcggaaagctgtcacaaacggccgatattcccccatgaatacgacctgcggcaaaaggagcggtgtggtccggagcgcaacacttcggggccgggatatgtgttgccctgatttccacgcggaatgttttcacggcggagcgttcactgtcaccacgcacccgaagttttcggaatgagacgaaaccccatgacacaggaaaacacccagccgggctcggcccggaaaaccatatggtctttcgacctcggcaaggcctccatcggcgaggccgtgcgcgatttgaaagacgactcattccctcatttggaatcgttgctcattccatttgaatttgcggagactcaatctgctgcctcgcgcaggaggatgtggcgcacgcgcattgcgcaccacgcgcgggaggattggcttgcgagaattgtgaagattgctggcttcgagccactgcgaggacgacggatggaaaagacggcggaaggttggaggcaggtgccggagaatgcggaggaaaagaaacggcgcgcgatgttggagcgcgagttcccggcgaagggcgatgagacgcaatacaactcggcggcactccgcatcctgcttctcgaacgggaaaccaagttggaggaatggcagatttacaaagcgctgcgttcggcgattcagaaacgcggctatggcagggtgccgtggagtaaccgtgaggaaaagcgtggcggcaagagtgaggaggagatggagaaggagatggcaaaaaaggatcccggctatcgcgccgccatcgaggcatggccgaagttcaagcagcaggtgctgcccgaatttcactttccctgctattacgatgcggcgcacaccggcatctggtcgccggaagatccctctgtggtgaagctgcggcaggatcaccatgcggagagcacccgccgcgtgcgttttgaccgcactgccgtggagcgggagatcacgctgcttgccgacgcggcggcggaggagtggcccgcattggggaaagcattcgagcgtatccgggctcagggctggcgatacacggagcacgcgaccaaacgcgagcgcatgctgcccgtcgttgcggagacgctcggggagttccttgtccacggcccggcaggcacgccgagtgacgaggcactggaggactttcaccgctatctcgaagagcgccgcgcccgcggcatccgccccggcacggaagacgactggcaggccgcgaccgggcagaagacgccgcgctttgacaaccgcatcgtcgagccctgcgcgctgctcgacggccttcgcgtgtgcaacgtcgccgtgcgcctcgacccgaagacgaaagccgcgcagcccgattcactgctctattcggaggtgacgtttttgatgaagctgaagaacacgcgggtcgagggcaggccgggctatgccgggctcacaagcggcgagatccgcaagctgtgggaaaccgcgctcggtgatgtcgctgcgatcagtctgcaaaaaattgaaagcgacatccggaaaaagaagccggatgcgaaagacgatgaggtgaagtcgaaggcgctccgttcgtgggaggaaaaggtgagcgagtgcttctcgctcgtggagtccgatcccgacaagaaatcgcggaccaagaaaaggtcgcttcacagcgtgaccgggcttcgtcccgctgcgggccatgaggttgtccgttcgccgaaatcgcaaggccgctcgcgccacagccgtcccgcgctgcgcctgattcgctcgctgattctgagcggaaacaagcccagtgaattcaagcgccgcctgctggtccacgatgccgcattgctcgccgagatcggtctggacgtgctcgccgcgccgctgccacctcgtgcgaaaattgatggcaagcccgagccacagcgccgtccttatgttctcgaaagtcaactcaagttcctcgacgacctcatccgtgaaaacgacacttgggagaagattcatctccccgagcagcggcttgatgcgctggaggaacggcactcgaccgatgggcacttggatcgcgaggcggcggtgcgcgatctgattggcagcatcaacgatcccgttgttcgccaccggctcggagttttcaccgagcggctgtgtgaattggagaggcagttcggcaggccggacgaaatcgtcctcgaattcgtccgcgaggatttcatgggggagaaggcaaaggacgaactgaagcggtttcagaacgagcgggaggagcagagaaagcacgcgcgcaagatggcggcagaagcgggcgcaagcgggaaggcagccgggctgaggtatgaactgctcaaagcgcagggaaacaaatgtctctactgcgggcaggacttccatgtctcaaagctcgacgactatcccattgagcacatcgtccctcgggcgcaaggcgggccagatgcgatggtgaactacgtgctcgcccacgaaaagtgcaatgacgagaagggcgacatgaccccttaccagtggaaatatggcaaggaaggatggagcggctacgtggaactcgtgaagcaacacgcgacggctctccgcaacaagaaggtgcagcttctcacgcgcgaggatgcggcagaattagtgcagcgatacaccgccctcgcggagacggcgtggatttcccgcctcgcgcagaaaatcgccgggctgtggtttggctggcgcaatggcaatgatgcggagaacaggaagcggatcacggtcatctccggaggattcaccgcgcgtatccgtcgccgctaccggctgaacagcttgctgaatcagctcgatcctgactttgtcaccaaggcgcttgcggaagcggaaaagcagaaaggttcacggctttccgatgaggagcgaaaggccgcgacacgcagggcggaggacgactgggaagccgctgccggcgaaaccaagaaccgcaaggaccaccggcaccacgcgcttgatgcgatggtgattaacttctggaatacgggatcgaaaaaacaggatgcggatttcttccgcttcccgcctgcaattcataggaacgctttggcctatttccgtgaacgcatcgagccggttaatcccatgctctacgtccgcgaaaagccggcgattcaggcgatgttctatggcaagcggcaactggatggctcgacgttcatcgtgaagcggcgtcccctcctcgaactcggcacgaaggaggtgaaaaacaagaaggtgctaaagccgctcgcggacatcaggcaacaggcgcaaacgattgtggatggtgccatccgccggatcgtcatcgagtttttggaagcgcacggtgatctcaccttggaacaatggacggagtggtgcgacaatgtgacgaggggtgacaatggcccccgaatcaagcaggtgcagatgagggagagcgcggcggacaagaccgagaactaccatgatttcggcaaggatcagacggcgcgcttcggtcaattccggaaggcggatcaatgcacgagttatttcgtcatcgccgtccctacgccgtcaaagaaagacccggatgcggtgcgctacaaacggcgagcagtgtatgccttcgacaatcgcaatgagaagcggatgcagattcagagcgagccgggcgtgcgtgtcgtggatgagttttggccaagctgccaggtgcgtattgagcatgaatgggaactccgtggccgctccatgccgcccggcttgtataggctgcacggtattgaggatgacggacggacgactctcagcagcccgcaagccggcttgcgtggcaccaaggatgaagggcgggcgagccttgcggtgctgatgcaggcggggatgaaacgtgttcgcgcctaagaatattctttcgccatgagctaccatctcctccacatcttccatcacggcgcggtgctgggaaaagatcgcggcttcatcacctgttcggtggacaggaaggaagtggggcggattccgcatgaggacttgcgggcggtgatcatcgcggctcgcggggtgacgctctcgtcgaacttcgtctcggctgtgcttgagacgaacggggtcatcctgcactgcaatgagagctaccagccgtgcggcatcactgcgccgctggctcgggtggtggacacgaaggcgtatctcaaccaaatcgcgcggcccaagccgctgaacactcggctatggaaccggctgctgcggggcaagacgctgaaccagtcgcgcgtgctcacacggctggagaagccttcgccgcatctcgaagtcgcgctgcggagcggggacatccacgaggggaattgcgcgcggcgctactggcagcttttcttcccgagcatcggctacatttccaccaagcgggatcgcaaggaggacaatgcgccgaaccagatgctgaactatggctacacggtgctgggcgcgctctgccaccgctcgctgctcgtgcacgggctcacgccggcgctcggcgtcttccacggcacgcgctaccgctcacagccgctggtgtatgatctcatggagccgttccgcccgatggtggacatgatgctcgcggagttcatgcgcgcggaggatgtctcgatgaaggcctgggcgaagaaggtgggaacggagctgcgcgagacgcgggtcgcgcatgagcggtattcgctgaagctcatggatgcgatagatgccagcgcgtcctcgatggcgcgctgctacgcggcgctgagtgtcgagccgttctgggtgccggaagtggctgcgtgaaaaagtcgccgttccgcatgggctgggttctcgcaatgttcgacctgccggtgctgacggatgaggagcgcaggacggcgacggcctttcggaaggcgctgctcgatgacgggtatctgatgatccaattttccatctacgcgcgcccctgcgtgagctacgaggaaatggacacgcacatcgcgcgggtgaaggcgttcacaccggaggcgggaaatgtgcggctgatgttcatcacggatcaacagtggggaaacagcgtgacggtgatcgggccgaactaccggcagggaaaaagggcggtggacccgacggtgccgaagcaggtggaattttggggatgaactgtcggttgggtgtttcattctgactccccgcagtctttttcttgcgaaggaaggtcgcaggaaaaaagaaggccgctctcggacgtggctaggcagtggtccgagagcggccgaatcagttaagacttcaccccccggcgtagtcgaagactggcggaagtctttcgacctccgcgaaatctgtcaagctggttatcgccgactccgccgggggggtgaagtcaaaacatgcaaacccgcctgtgcgccaagtgcggggttatcgccgactccgccgggggggtgaagtcaaaactaccagcggacaggtgacgatccagccgaagttatcgccgactccgccgggggggtgaagtcaaaacgaagcccgttgatcgagagagcttgatcg

SEQ ID NO: 2697 - DNA, 9837 bp, synthetic construct
  misc_feature 1..9837: note = Synthetic
  source 1..9837: mol_type = other DNA
ttcacgagtagcgccaaacatttcgaaacaatttttttgagaaacgtgaagcaaatcgcaaccgaggaaccaatgccagaacatctcctgcgcatgcgcgacgccgaactcgcggcgtagcgcgccagcgccccccgggtcgggccgcaaccgcgccatgctgctcgtgggcggggtgctcttcatcgtcatcgcggcgggtgtggcgctggttgtcttgatgcaaatgctttccgagctcgagcgcgcacccgggcatgcgggttctcgcgatctggtgcaaaaaaccggcggaaaattttgagaatcagccccgcgcccggcacatcggctgcttaaaaagcctactcaaatggccaaagctctcacctcaatcatcggcgtggatctcgggtgctactcgctcaagtccgtgctcctccagcgcaaatccgggagccgcgtggtcgtgactcactacgcttcgcaggtcctcagcgggccggtcgataccgcggaaagtctcgggcgcgaactcaaatcccttttcaaaaccatgggcggttccgcgaaatcctgcgccgtgggcatttcgagtcccgacgcgctcatccgcatcatcgagcagccggaaacgccgcccacccttttgcgcgacgcactgcggctcaacggcatggctttgctcaatcaggactgcaaagatttcgtgctcgattgcgacgaaatcccgaccgctccgggcaatgccgaagcggaaacggccgggcggaaacgctatctcgtcggcgggctgccgcgggcgcaggtctccgtcatcggtggcgcgctggagcagagcgggacgaatgtcggcgcgctgcaactcgctccgatctgtgcgttcaacgccttcgagtttgccttcccggaggtcttcaaaggacaggcctttttcctcgtcgatatcggtcactcgaactcgacggtgatggtcggctcaaagcgcgaattgatcctcgttcggtcgattgatttcggcggcaaggcgctcatcgagggactcgaaagcctgagcggcgaagggcgcgaatccgttttccaggccctcgaacaggaagacgaagtcatggtggaatacacccgcgtgacgctcgctccgctgatccgcgaaattcaaagctcgatcggctttctcgaacatcgcgacgaggaaaccatcgggcgcatctacgtctccggcggtccggccaaatcggccgcgctgctccgcgtcctcagtgacaatctccatctgccctgcgaatcgtggagcgctttggcgaactgcgaatccgcattgccggccagtcggagcaaaagtttcgcccttgaggcgctcgacctgaacgtggcctgcggggccgcagtggaacttttgcaagggaactgaaccatggcgctgcatctcaatctctatcacgaagtcatcaaggcgaaggcgctcaagcgccgcgatccgctcaagctcacgatgtatgcgctatccgctgtggtcgccggtttcgccggctactacgtgctgcaggcggtcaaactgcacagcctgaacagcgagctggcgacggtgaaagaggagttcgacaagctggacccggcatccaaagccgcgaaggcgcgcgaggttgaactttcggtgaaactaaaagccggcaacctgctcgtgaagaaggtggaaaatcgcttctactgggctccgctcctcgagcagatcctgcaggtcgtgccgcgggaggtgcaggtgacgcggttcgtcggcgatgtctccggcgagggcccccgccgctgcgcgctctcgatcgacggcctctcggcgggcgaagatgcgcgcaatgtcgcggagacgttgcgcacggcgatcgcggaaaaaatctcgccgcagcacaagaacgtcacctcgaaattccggatgctcgaagacggtatcgagatggcgatgctcgatggcaagcaggtgccgacggccaccttcgcgatcaacgtggaattcacctccggtgaagagccggcccccgaaccaaccaggagaaaacgatgaaactcggcaaagaagaaattcaaaaactggtcctcggcggcctgctggtgatcggcgtgatctactgctacttcacgctccttctcggtccgctttcgcgacggcaggcggcgacccggaagggcatcgaggacctcggtccgatgattgccgcggccaaagcccagatcgcccggaccgccgatgtcgaacgcgccgcgccggccaatatggaagccacccggcaggtcacgtcgatgattcccgacggctccccggtcgcctggtttccgccgcgggtcggcgatttctttaagcagcacgggctggagaaaagcacgacccgcctcgccggcgagatcgtggaaaaggagatggtgggcttccgccggatgtcctggagcatcgatctgccgaaagtggcgttcgtcccgtttgccaccgccgtcgcctcgctcgaaaacgaggagccgctcctcgaaatcagcggcctgcaaatcgaatccggccgcgacgacctcggctcccagcgcgccctcctcaccgtcagcaactacgtcaaacaatgaaaccctatcccttcgtccttgccctggccgtcagccttttgccacttccggccgttcatgcggccgatgccgatgcgggcaaggacgagcccgcgcccgcgccctacaagctgaaacgccggtcctcctttacgcctccgaccgcggacgcgcgcgcgcccttttggccgatcggctgggtgccaaagaaaacgatgatcgcaacggcacccggcgctccggctgcggcaccggcgccattgctcgatgagaaagcctttcgcgtcaccagcatcctgctcggagccggtaccgcgccttcgctggccgtgatcaacgggcgcgcctatggcgagggcgagtttttgaaagtgccgcgcggcacggtcgttccggcggtcgctggccagcttggtgcacccgccgtggcgcgcatccgggtgcagctcatcagcgatggcagcgtcgttttgcaatgcgcggagcaggcgattaccatctccatgcagcgaccggaattggcgctgaggaaagtgcaggaagagcagttgaccccggaggatcgctgagcgcgcggcttacgcgttgagctgcgcgagcacctcgggatcgcgcacgtcggcccagtcgccggtgagttccagcgctggcacgcggtgtccgctttgcgcgagcgcgcgcacggcatcggtcagctcatattcgccgcgcggggatttctccagcttcgcggtgaactcgaaaatgctcggacggaaggaatagacgcccgcgttgtaccaagggctcgtcggctcgccaggctgcggcttttcgcggagatcggtcagttcaaagcgctcattcacaaacaccgcgccgcctttggaaacttcgccgggattgtgtttcacgctgaccagggcctcggcgtcgccgagcgccgcgagccgagcgtagttcgagggatcaatgaggatgtcgccgtagctgaggatgaacggatccgcgcccgcgaactctttggccagttccaccacgcgcccggtgccgtcctgcaccacctgcgtcacgtattccaccgccacgccaaactttgcgccgtcgccgaaaaactccgtgaccacctccgcccgccagccgacgacgatctggatgtgcgtcacgcccgccgcgcgcagcccctcgacgatatgcagcaggatcggcttcccgcgcaccgggatcatgggcttcggcagttcgttggtcagctcgcgcatccgcgtgcctttgccggccgcgaggaggacggctttggtgacatggcctgaattcatggccggacgctggcccagccgccgccccgtcgtcaaggtgcgcggcggtccggccgcggcatagtttgtccggccatggtcggaatagcggccccgttcagcagcgccgcgtgccggggctctgaggccggccggatgaaggcttgccactgcagcgaacttctccccacgctgcttgcggaaacgggccgaccgtcaccggctgaaattcttcccgccagcaacccatcgaacccacgccccatgaaaaccatctggtccttcgacctcggcaaagcctccatcggcgaggcggtgcgcgatctcagcaatcattcctttccgcacaaagcgtcgctgcttttgccggaggatttcgccgaaacccaaaccgccgcgagccgccgccggatgatgcgcacgcgggaagcgcacaaggcgcgcgaagcgtggctggatgcggtgtggcgtgcggcgggactgacgccgctgatcgggcgtcgcgtcgaggagcgtgatggaaaatggcaggcggtggaggaaacgccggagcagaaaaccgagcgcgaggaaaagctggagcgcgagtttccgaaaaagggcgacgcgacttgttacaactccgcgctgctccgcatcagactgctgcgcagggaaaagctggagccgtggcaaatctacaaggcgctgcattcggcgattcagaagcgcggatacgggcgcgtcccgtgggcggcgcgagacgagcggcgcactggcaagacggaggaagaaatggacaaggaactggcgaagaaagacccggcttacaaagctgcggtcgaggcatggccggtgtttaagcgcgagatggccgagcacttccacttcccatgctattacgacgccgcgaagatgggtctgtggaaacccggcccgccggaggttttcgctgaccgcattgattgtcatgcggaaagcacgcggcgcgtgcgcttcgcccgcgaggatgtggaaagggaaatcgccatgctcgcgcggaacgctgaggttcaagtgcccgcgctcgcggagatgttttcccgcgcacggcgcgacggatggacgctgcgcgacggaaagagcggacgcacaaagacctttcccgtcgtggccgccgacatcggcgcgttcctcgtccacggcccggccggtgagccacttggtgcggaaaatgatttcgccgcctacctcgactttcgcacggagcgcggcatccaccccggcagcgcggacgactggatgggtgcgaccgcgcagaagacgccgcgctttgacaaccgcatcatcaacgactgcgcgctgctggatggtctgcaagtctgcaacgtggccgtgcgctacgacgcaaagaacaaacgcccctacgccgattccttgctcgcgtcggaagtcaccttcctgatgaagctcaagaacacgctcgtggcgggtgcggggaaggatcgcaagctgactgcggacgagattcggaagatctttatggtgatcacggcggacgcactggtcgtgccgatcaaagtgaagccacgcgtaaaggcggggacgcaagcattgccggaggaggagcggtttgcccacggaatgaagacgtggccggcgcgcggagcggccgcctacgcgctcaccaagcgcgagtgggggaacaaggcgggaatcaaggagctgaaacttttcccgctcaccaaccacgaagtcatcaaagcgccgaagactgatgggcgcagccggttcagccgcccggcattgcggctcatccgcgctctgatcctaagcggcgacaagccgagcgagttcaaacgccgactgctcgcgcgcgatgccgcactgctcgcagaagtcggcatggatgtgctcgcagtgccgcctccgccgcgcgcgaaagtgaacggcaagccggaagcgcggcggcgcccttacatcctcgaacgcgacgtcaaattcctcaccgacctcgccgaggcgaatgacgattgggggatgatccacattcccgagcagcgcatggatgcgctggaggcgcggcacaagaatgacggcatcatcgagcgggatgcggcgatccgcgagatcatcggcatcatcaatgatcctgtcgttcgccaccggctcggggttttcgccgggcggctgcgcgatctgcacgcgcgctttggtgtgccggaggaaatcgtcctcgaattcatccgcaccgacttcatggggccgaaggcgaaggccgaactcgccgctttccaaaagaagcgggaggaggcgcggaccaaggcgaaggagcaggtcgggaagggcgacgcgctgaagtatgaactggccgcggcgcaaggctgcatctgtctttactgcgggcagccctttcaaatgttggaactgggcaactacgaggtcgagcacatcgtcccgcgccagcagaacggcccggacgcgatggtgaactacgtgctcgcgcatcgggagtgcaacgaggccaaaggcgagcatacgccattcaagtggctgcggcagacgccgggttgggatgcctacgtcgagcgcgtcgaggcgtgcgcgcctgcactgcggaataagaaggtgcaactgctccagcgcgaggacgcgccggaactcgtggatcgctacacggcgctggcggagacggcgtggatttcccgcctcgcgcaaaagatcgcggggctgcacttcggctggcgcaacgggatcgacttcaccggcccgaaaccggtcaagcgggtgaccgtgatctccggtggactgacggcgcgggtgcgccgcaaataccgcctcaacagtctgctcgccccatgcccggcgggcgaagacccgagggaatgggagtcgaaagccgagaagaaccgcggcgacgaccgccaccacgcgctcgatgcaatggtgatcaacttcctcccgcagtggtcgcgcgatgcgagcaaggaacattttttccgcttccccgagccgatccgaaagaacgcgaaggcgtttttccggaaggagatcgacgaggtgatgccatcaaatatcgccttcgcgaagccgacgctggcggagacgatctacggcggacggcgcgagggcgacaatacgctgatcgtgcagcgcgtgccgttgctggctctcgggatgaaaccggcggcgcaaggcaagaccgcctttgaccccaagtatctccgggaccaagcgaagtcggtgcgcgagccgcgtatcgtcgaggcgatcctgggttttctcgacgaggggcatgaggaggaggcggcatggcgggacttctgtgcgaagctgcacctgccgcaacgcgatgggagccccggcccacgtgtgttgaaggtgaacgtgaacaccggcgcggcggacgaatacgccgagatgtcgaaggatcaaacgggtgcctttcgcaaaggcaagaaggggcatcgggggcagatcgtgtatctgctgcgcgcggcaacgaagaagggtgcggtgaaggagaccatcgaagtccggcccgtgtatgtctttgagtcacgatcgacggtggagcagaaactgaagggcgaacacggcgaggcgatcacgatctacggcttttttcaaagcggatgcctcatcgccgtggaacgcgaggtggcgcacgacaagaagccgctgccggttggggagtatttgctgaatacgattatggctgattccaagtgcatgaaactcacgactcaggatggtagaacttacccggacatcccgcgctattccctcgccagcctcatcgccgccggcctgcgccgggcggactgaacatttgccaagcgcactggaaaggagcaccctatgcccaatgaaactccgactcgatcttctcgcgaagctgacgacggaagacattctggaggaggcggcggcgaatcagcaccgttacaaagccgagcccactttctccaaaaccgggactgggcatctgtcaccgagatcaaccgaggactctgcgcgcgaggcggagcgcagcatggctttaaccgagaaactcacgagccgcttgcgcgagagtggggagcaatcggaagccgggaactgacgctggaagaggttttcgatttcctgaagtcctgccatcggcgggcaccttttcttttcttcaacggcaatactttcgcggaaatcgggcgtgcgctgacgaatgctttgtttggcgactggcctttcgtgcggcgcaaggaggcggcatcggtcgtggcgcatttcattaccggcgtgctcgcccgcgagaatatggtggagtgtttcaacaccttggcgcgctcggcgaaatttcaggcgggcgaccgggtgaagacgctgcggggttcgctgcgcggggtgattgcgcgggtgctcgaagatgggcgagtggcggtgcgggcggatggcagtgcgagcgaacttttctgtctgccggagagtcttctgcccgacgattgacgccatgagctttcacatcctccacgtctttcaacacggggcgacgcttgcgaaggagcaggggttcatcgtctgccgggcgcaggataagacggagcggaggttgccgcatgaggatatgcgggcggtgatcatcgcggcgcgtggggtgacgctgacttccaacttcatctcggcggtgctggagacggacgggatcattttgcactgcaatgaatcctaccagccgtgcggggtgacggctccgctggagcgggtgatcgatcagcgggcgtttctgcaccaggtgtcgcagccgaagcggctgaatgagcggctgtggcagcggctgctgcgcgggaagacgctgaatcagcagcgggtgctggagcggaagcaactgcacagtccgcatctggagctggcgctgaagggtgggccgatcgacgaggggaattgcgcgcggcgatactggcagttgtattttcccgccatcggctgggcggcgacgagccgcgaccggaaggaggatacggcaccgaaccagatgctgaactacggctacacggtgctggcggcgctttgccatcgcagcctgctcatccacgggctgacgccggcgctgggggtgaatcacaagccgcggtatcgttcgacgccgctggtcttcgatctgatggagccattccgcccgctcgtggatatgatgctggcggagttcatggccgagccggaggtggggatgaaggcttgggcgaagaaggtggggacggagctgcgcgagcagcgcgtggcgcacgagcggtattcgctgaagctgatggatgcgattgatgcggtggcgtcgtcgatggcgcgtagctacagcgcgaagtcggtggagcctttttgggtgccggagctgtgaacgagaaaaagagtccatttcgtatgggatggattctcgtcatgttcgatctgccggtgctgacggatacggagcggaagtcggcgtcgcgtttccgcaaagacctgctcgatggcggctacctgatgatccaattctcgatctacgcgcggccgtgcgtgagctacgagcagatggatacgcacatcgcgcgggtgaaggcgatcacgcccgaggcggggaacgtacggctgatgttcatcaccgatgagcagtgggggaagagcgtgacggtcgtggggccgaattaccggcagggcaatcgcgccgtcgatccggcgatgccggcacaggtggaattctgggagtaggaaacaaaaaagcgccactcggacgtggctatgcagtggtccgagtggcgctgaattagttgagacttcacttcccggcggagtcgataactgcacgaagtctttcgcttcgtgccacttcggtcaagccggttctatcggactccgccgggaagtgaagtcagaactcccgtcattgcatgagggagctggaactagttctatcggactccgccgggaagtgaagtcagaacccctccgtatcagcaggacgggcgcgacatggcgctttagcgacaagcgcgacggctgaggaaagcgcggagcgtttcggcag

SEQ ID NO: 2698 - DNA, 15342 bp, synthetic construct
  misc_feature 1..15342: note = Synthetic
  source 1..15342: mol_type = other DNA
tacgttccggttggtaacacacaccgtcttgccgctggctatttcgtacagatagattgccgttatccaggttggctcgttatggttgaacgcgatgaacttgctatccgggctaaagctaattccagggctgtttgcgtcataggatccgacgttgaacgaacggtcaatttgcttgatcgctcccgtcgttgcgtcaatcagcaggactcgcccaactcggtcaccgacaacgatcgacttactgtccggtgcccagtccatttggatagcgttgcctttcagcccgttcgttaactgtttaggcgtccttccacttgctgagttggtaagccagacttcgtactctccggatcgatcgctaatgaacgcgacttgctttccgtcgggcgaccaagctgggagcatggcgcgcgttcctggctcgttctcaagaatacgcatgtccccgttctcaaccgcgatgctaacgatttgccctcgagcttccacggcgagtcgcttgccgctcggaccgatcgaagcatctttggcaaaggcggcgaggcttattctctgatcacgggaatggatgcgatccgaattcagttcaaatgcgagctcttggacctgtcgtgattgcggatcgtagatcgcgagaccgggtccatgttggaagacgatgcgctttccgtcggaacctggataccgcactgggaggtcttggtacttggttgcgctgctcacacccttagagttcggattgagtcgaaagaggtttgagatcccttccctttcgctcacgaaaaaaaggtcctcgccgcaccacaccggagtcgtgtcgacgccaacatagtccgtcagtcgcttgaagtgccctttgaggtcagagagccagatatcatcggcctgaccggctttgtagcgaaaccagttggcccactcgatgctcgtcggcacataagccaatcgcccatcagcactgaaactaccgaattccccctgaggaacaggaatggcctttggctgaccgcccgtagcagaaactgtgtagagctttcgaacggcaccgaccgggctgtttcggttggagcggaatagaatgttcttcccgtcaggtgtccagccttggaccaaagcaccgcgaggatcatatgtgaggcgctttggggcgtcgccgctcaccggcatcacataaacatcggttccgccgtcgtattgggcggtaaaagcaatttgagatccatccggtgaaaaacggccgttcgtttccgtgccggcgtgcgaggtcaatctccttgccgagtgagacgtgatatcaccaagccaaaggtcgccttcacaggtaaacacaaccttgtcgccgtggatatcaggccgagtaaaaaagcttcgttgcgaggcgaagacgctcgaagtgagcacaagcggtgccaggccgagcaacctgtatttcgacagaagagacattcgccagatgttacactcgctggaagcgagattgatggcatctaggtaagtttgtgcacatcacggacccgctcacgccaaaggtcacctgactccacctagactgccccacttttgagccggattacttcgtgctggaggcatttgccttgacaggatcattcgatttttcaacggaagaagggagcgagggtttggtgcctggtaggtccttcttcgagtcagaacccataccaggctccgttggttttttaggcgcggttggcttgctgctaccggccttcttcaagtcagatttgaggggtggcgaagcgctgggtaattcaactgcggtccagacaaccataccgaggaggactatggagatcgcgatcacataaagcgagcagaatatccagcatttgatgactgacttaataaatccctgctggtagttaaccatcatcgataccggcagatacacgagcatccaaatgacgataagcgcagcggggggcgaaaagtgcacgaccttggtaaacagcaggatgcatgccgtcgaaagacagaagaaggcatagtagtgcaaggcaaagaccaagtgctccacatagaacttactgcgccgtatgtagaggaacttgaacaataatgcgaaaattggaagcagtattaggtttgccgtcgagagacgtccaacgaatttgtcattgaattcctgcctcctcgcagcccccgttgacccatcttgcgtgaattttccggtctgatcgaggatccacttcttgaactctgaatttgtggactccttatcgcggtcaattgcagttcgagcctcggcaatggattgcgcctcgccgttaccgacgtttacgacgtttggatgcgtcgtcagagaaaccatcaagaagcaaattgcgcttagcgagatgtagagcttgagaggtgatatgtaccttacacgcttcccggcgacccactcccgtgtcaggaacccaggcttgatgatcagcggcacaatggtgcgaaggaacttcgaatcaaaccgaatgaattcctccagaaactcgaggacaaactgccacacgccctggttgtgttcacgtgtgtgctgaccacaactatgacaataatttcccaagacctgggaaccacagttcaggcactttgttcgcgtcgcacttgttgaatcgtccgatacgatttgatctttcgactccgcaatcatgactcgttatcgtatcacaggcgagctatggtgcaacaactctatggatgggattcgagataatcacccacaagagcaaggacttttccgcggtggctgatctgatgtttacgttctgccgagaggtctgccatcgtgcatccctggtcaggtaggtagaagatcggatcgtaaccaaaccctccattaccactgggctcgacggaaattctgccttcgcacacagctgagaaaatctgagattgatctggttctagtggattcgtcagggcaacaaaacagcgaaatcgggcagttcgcgactcggtcggaacgccctccatcatttcgaggatttttgcgatcttctgaggaaacgggaggtcttccccaccgaaccgcttgctgtacagccccggtgccccatccaacgcatcgatttccaacccagcatcgtcggccaagctccactcttttgtgaactgagccgcactctccgacttaatcgccgaattggcggcgtaatctgcaccgacttcgtcgggctcaggcgctccttcgtaatcggcaagggttaccagttccagcagcggaaatcgggcaccgatgatcgtcaccatctcaccggccttcttccggttatgggtggcgatcaccagctttttgatgtgggtctgactcattagctcaatcagtcgatttcgaggacggctctttgagctgcgatgagctcgccaatccctttctgcccaagtttcaacattcggccaagggtgtcgactgggaatgggtcgcgttcggcagtgccctggatttcgataaacttgccgctcgcagtcatcacgatgttcatgtcagtattcgcggtgctgtcttccgagtaatccaggtcaagaacttcttgcccctttacgacgccaacggatacggccgcgattggctcaagaagcacattctttttgagcatgcggttcttcatcatccactgaacggcgtcataggcggcaacgtatgcagccgtgatcgcagcacaacgggttccaccatccgcgcggatagcatcgcagtcgagcgtgatcgttctctctcccatcgactcaagatcaaaagcggttcgcatggcacggccaatcagccgctgaatttccatgcttcggccatttggcttcatttgatcgcgctggtttctttggcgaccggatctggggagcatcgaatattcggcggtcacccaaccacttcccttgcccttcatgaaaggtgggacacggtcctcaaccgttgcggtgaccagcatatgagtgtcaccgagtttgatgaggcatgaaccctcggcgaactttgcaaagttccgctcaagagtaaaggggcgaagctggtccggcatcctgccgtcattacgcattgctacagggtaccagccgaaaagcccctttaacctcacctattccgacggcctttgcattgagaagttctggacacttgtctcattgggcttgcatcagaaatctgaatgaagtatcgtccacatgtgcttagggatcagccgtatagtctccaaatgcaagttcaagggagccaaaccaataagataatcttattgaaatttgtaccagcaattctatgagataaaagcgatgtatattacaccatctcccaaacccgtccaggcgatcgagtccgcgctcgtggatgcgatcatccaagcccgacgagatagcccgctgcggctggtaaccatggtcgtgcccaaccttgtggcgggacttcagtggcgacgtcgcgttgcccgagcctcaggtgctctgttcaatgttcgatggattgacatcaaccagttcgcccaagagaccataacccaagacgggatcagcctcaaacctgtgacccaagtgtcccaacttgctgcagcctggtcggtgctccaatcctcacctcccgagttccaaatattccgtgatacggccgaagtgccccaacaaatggtacgcgcgttcgacaccatcgacgctcttggcgaagatgaaaggctaaccctccagcccgccgttcagcagatgttcgacgcctattgcgaactgctcaaaggcaaagaccgttacaaccaaatcctaacgaaggctgcggaactcattgaatctggaacacttcccaaagacgacacctttatttttctgccctcaggaagtctttccgcctctcagatccgtttcgcccaagccctcgggagccatgtcacaaccatctcgaccgagttcgccagtttgcctcccattcaatccacatcgctccacgacgaacgcgatgaaatcgaatgggctatcgcccaaattcaagatgctgccctcaatgaatacatcccaatccaccagatggcggtcattctgcccaaccgcaatccctacgccaagttgtttgccaccgctgctgaagcggcgggcctcacgtggagtgggctcggcatccaaacccttgccgagtccatccccggccaactcctaaccccagaatcagaagccgaccatgctacatggaccgaggcgatcgccgcctacagcaaacttgccgagcgggcaggtgcggcgcacgaaaaccatagtcaacgcatcaaggaccaacttgatgcttggaagcaacttgaggaactcatccccaatgctccaaaatcgctggtctctgtactccgtcaagtgctgttgaccaaaccgatcccatgtgatcacggcttcggtgacggagtcttcgtaggcaccggacgccatctggaaggactctctttcgaacgcgtcttcgttctcgggtttaccgacagcagctatcccgccaagtcccgtgctatccccatgcttcccgtagggatgggagtacccaccgtgcccgatcaaaaacgttacttggtcggcaacctcagccgctcgaactcagtcgccctcagctactcacgttccgatcgtcggaacgagagagaagcctttccatcgccatggcttgaagaattttcggcggcaaaacccaaggtcatcgcctcaccgctcgaactcctatcgctgtccggcccccgcaatgctgccgcagtagggatcgcagctggccttactcaaggcgcatccacaacaaaagctagtcaagtcatctccagttggttcgcgaccgatctcaccacagaggcaggtgtcggcaaggatctattgccaacgggcaacctgagcccgagtcaaatcgaaacgttcctcaagtgccctcgcaagtggtatctcaagtccgtcgtcggcattaaggagccactcactcgccccactttcgggctctcttcgccagaaaccggatccgccattcacgaaactcttgcggaactcgttggaaaccatctaggagaactcaaggacccagccttcgcttggtctcaaaagcactttgattttgttcatgctcaaatccttgccaaaacaacccgcctgatgggtgggacgcttcggcagatcgaacgagacgacgtcgaacgctgggcgcgtcgacttcagagagtcctggaatatgactctcaatacagggccgaatccggtgccgtacccatccacttagaagtgactctttctgggcagatagctggcatgcccttccaaggcaaggccgatcgcatcgacatcctacgcaatggcaacctttccgttatcgattacaagactggcaggaacaaggcgggcgtccccaaagacgtctcgagtaaagcactcgaaaaagatcctacgcttggtgccaccacgctgcagggccttatctatgccgaactcggcaagcaatctcttggcgaacatagtggatacgaagctggttactggttccttggtcgagagccagaaaagatgcgggcaacccaaccgttgacccacgaaaccgctggccaactcaacgcgatagtctctgcctccacccaaatgatgcgtgaagggctcgttcccatgacaccacacgatgagggccaagccggactgtgtggatattgcccattcgttcaaatctgcccccacgaccgactctccatcgcctcccaccagcaaaaacacgccaccggcgcttaccgcaagttcctagacctcaaagccttggccgcgccagaccaggagaatgaaaatgactgatccaaccctaatccttcccgatcaatcttgccgcgaccaagcgatccagaatccttcggagcccatgctccttgtcgctggcgcgggcaccggcaaaactcgcacgatggtcgaacgtttggtgcagtctgtcctcgatggcaaccccatcgaagaccaggtggccatcactttcaccgtcaaggctgctcacgagattcaggagcgacttcgaaaagcccttactgaaaacacatcgccgaatgcaagacaagcccttgaacagcttgccaatatgcgaattggcaccatcgacaaggtcgtccagcgccttctagaagagaacagtattcaggcaggcctggctgccggcttcagtattctctcaaaaggggaaaccgaagaccaccttgaaacctggttcacagaccacatcgatctttggagagacaacgccaatctcttcgagtcatggaaagcgcttcatacactggaactttctaccaaaagcgtccatgaactcctcaaacagattgcaagccgagtcatcaccaatggacaagagctttctctgtatgatggccttgcagacacaaatgcactgcattccgagcttcaagacgaaatcaatcggttgcgtcaggaagtcgaggctgcacctgaaaagctgatagaacttgcacgccttcatgtcacctcgcttcaagagaatcttgatctgcttcaggaatatcccttcgaggagcagaaaacacccagttcaatgcggacaacgggcggccctgccgcaaagccgttgcgtgacgccataaagagtgtgcgagaccaaatcaccaagcttgcatccgcgtaccgattcgcacccatcgtgccactcctcaaagtggttgtagccgatgcccaagcctttgctggcgaccttaccaaacgaggtcttctcgatttcaaccgagccttgtcccttgctatccacatccttgaaacgtctcctgaagccctcgaagcgactcgaaggcaaatctcttcgatcatgatcgatgagtttcaagacacctcgcctgaccaaattcgcctcgcaaaactgctaagcggagaagatgtgccttggttcgtggtgggcgatccgaaacagtcgatctaccgcttccgcggtgccgacctcgatgggtttatccgattccaagttgaatccgtagacgagggggcacaccttggcgttctaaccagcaattttcgtagccaccgatccgtgctcgacgttgtcaacgacgtcctgacaaccgaatttgatgtcaactcaaatatcggttacacccccctcgatgccatgacaaagggccaagatcgtctgacgtctcatgcatgggtcatcggcggtcaagaagagaatgcggcagcggctgcttcttgtgaagctgaactcgcggtaaagtcaattgcgctggccatgagccaagcctggcaaacgaggaccgaaacgggcgtccgaccgattgaactctctgacatcgtcatccttctgcgaagccgatcgaaactcagccaactcaccgattcgcttacacaagtcggtattccgttccgaatcgaaggcgagtccgatgtctacggcaccgacgaagtccgcgccctcatcgatatcctccgcactcttacccgcaacccagccaccgacgacgacgatgagtcgcaaatcgctaggtacgccgcccttcgctcccttgccgtcgcactcagcctggatgacctttgcgatccaaccgtacgagacgcggcagtcgcccgtatcgagaatctaaaaaaggaagtccaaagtcttcccccttatcaggcgatgatccgcgtgatccgagcgttcgatctcgaatcgctcgcctgtctacttcccaggacaagagccgtcatcaaccggtaccgtgctgtgatcgataaagccctcgccgccgaatccgaaggcatctacaatttacgccaatttatcgacttgctggatgcggaggagaaacgactgaccgagtcccccgatcctgaaacggatgagtcagccgtccgcatcatgacggttcacgggtctaaaggcctcgaattcccaatgatcatcgttgtcgggtttgcatccgattcgccctcgaaagctaagatctttgattgtggcaatcagcagttcgcggtgaggattggaacaaagggaaaagccgagccaattatcttcgacaaactctcggaagccgatcgaagcgcgagcgacgaagaagtcaaacgcctcctctacgtggctatgacacgagccgaagatcaccttgtcgtaagttcctatcaccatccacaggcgtctggcctcatcaagcgagtcgtgagcaagcgcaatcccgaagcggagcagatctttgcagatttcaatgtggaagagtggcagaggcccgctgccaagtcgattgaggttccggacacagatgccctcctttcggcttggaatgaggtctcccaaagcgagcgccgcaccactccgaccaaactcgcccatgccgatgacgaagacgccgtggaagtcaaggatgccgttgatgtcagcgaagactcgtttagtaagcgccctgttgccaagcaaagcagcgccttcggccgtgccgttcaccttgccatgcagtcgatagactttcgtgccccgaatgtcgaggcggtatcagcgtctgccgccgccctctatggtgcagatcccgagcgcgttgctgcgtttgtcagtcgcgccctggaaacggaaccggttcagcaagcagccacaagccccgaaatctggcgcgaagtttacgccgccgtcaaccgagaagacgccggcaacgaacttctcgaaggcatcttcgacctcgtataccaaatcgacgaccaaaacctaggtgtcgtcgactacaaaaccgaccgcatacataaccagtccgaagccgaagagcgaatggctcgcgcttattacaaacaaggcgaggcctaccgcgaactcctcaccaaagccaccggcctccaagtcccccgaatctcgtttgccttcctttcatccaccccgccgattgtctgcgaagtgcctcaaaaacagaaatagccccgaaaatgcggagctaatcatctgtttggacccttgcggacccggttaggttggcccttaggccatatcctgcgatcttacgatcttattgaggaagcgcaggcctgatctgatacaatccgattatacacaactgcgtttactagtgtcatgaaaaataagacagttcttgctttagacctcggtacctcgtctgtcggctgggctctgtttaaccttggcgaggataaattgccgacttcactagtcgacatgggcgtccggcactttgaggaggtgatcgagcccaagtcaagggagctaaagaaccttgcccggaggcaagcccgccaaatgaggaaaaacctcagtcgacgtaggcaaaggcgaacagctctgttgacgatattgcaggctgcgaaattatcaccagatggcatcgatccttactcggaaagcgagctaaccacccatcgcccatacgaactgcgtgcaatcgccgttgaccagaagattgaattagaggaactgggtagagccctgtaccatctaggaagaaaacgggggttcaagtctaatcgtggcgcaaagatggcatcgctagctgaccaagaagaagttcaggcgtttctcaaggcacctgaacgcgaagatgattctgaagagtcgaaggaagatggacccgtcctcacagaaatcagccaattgcgtagcgaacttgaagggcgcacgctggggcagtatttctggaattgtctgaaagcaaaagaaaagattcgaggacgtcacacggaacgctccatgttcgaagaagagttcgagaaaatctggagtaagcaagctgagttctatcctaaggtgctgacgaacgacctaaaggcaaatgtctggcatgcgatgttcgatcagcgccccctgcggcagcagaaatatctgaaggggccgtgttctctcgaaatcacaaaaccacgcgccgagaaggctcagctcgtctctcagcgattccgctattggcaggatctctgcaaccttgaactcactgacctagagacgggcgagcgccgacgactaagtgctcaagaacgtaacaaactggctgaaaagctggagtccgttgcctccataagtcttaaagcaattcctggcgaattgggatttaaaaaggcgaagtggaaaaccaatctggaccgcgccaaaggcgatgtcttgaagggaaactcaaccgcgtataaggtctcaaagagagccacccatttgtgggaagctcttgacgaaggtggacgggagagacttgtcgagatcatgttgacaatccatgaccggggcgacctttaccgaacacttcggaaagtatttcaattagatcccaaagttgcatacgaccttgccatcgttgaactagagcaagggaccatgtctctcagttcgaaggctatgcgaagaatgctgggacatatgaaggatggcaaatcccgcatcgaagcccaggttgcttgcggatatgagccatggtcagaagaaattgtccaggtagcacgaatcgagtcccttccgagccggacggagattcccaatccgagggtgcgtaaggctttaggacaggttcgaaaggtcgtgaatgccatcgtcgccacttacggtcggcccgagatcatccggattgagatggcccgggatatgacccttaccaaagatgaaaaagcgaaagttgagaagtcagcaaaggatcgcgagcgggagaatcgggaagctgatgaatggctcgccaagcagggtgatgaaaaccctactcggactaaacgcttctggtatcgccttgcaaaacaatgccgatgggaatgcccatacactggcagggccattccttccagcttggctgcgatgaaccagttccaaattgagcacatcgtgccgtacgtgcgctcgatagatgattccttcaacaacctcactctgtgcgaggctgagaccaatcgaaagaagggcaataaaactccctatgaagccttcggtagccgaccggaatgggaggaaatggtcaaccggatcgacaaactcgtcggcgtaggttcgaagcacaagaagaatctcttcaaaagccagctccccccggacgtagataaatttgttagccgtcaactcaacgaaacacgctggatttgtcgtgccacggctcaataccttcgccccgtctgtaccgaagttgaagtgacaaagggggcagcgacggcgatgcttcgttcccactgggggctaatggaggcgctgtacggtgtcaacgagaagaaacgggacgacttgcgccaccatgcggttgacgctgttgccatcgcattcacatcgcgtgcactgttccaaagaatctcccgccaccggtcggcggctgcgaatgagtccattgacagcgtgaaagttgctccgctgtcaaacgacgtcgtcccccccgcgcctacttggctttttggagagatcaagctgcggcttgctaccgtcgtgatcagccatgaaacccagcgagcgataaaagacgcctttcacgaggagagtgcttatggcaagagggcggaaggggtctaccacatccgaaagccgctcgaaaacatgaaggagtccgatattgaggccattgtggacgataaagtgcgtgccctggcacttgaacaattcctcgccaatggaaaggacgccaaagtggctttcgcggatgggctccaagttggatccacgtctgcgagaagggctcgggtggctgttgcgattccgaaagcaccgctgttaaagctaccaaaacttgctcccaccaagttcttcaagttgggcaataatcaccatgtcgagatctttgaggagacgactactggaaagagagatggtcgttatgtgaccactatcgaggcagcagaaagagttagacaaaggcgagagccaatggtcgacacaagccctcctgctccaggatggaaattcgtcgcttggctgtgcccgaatgactgcgttcgagttgacgaagatactagggaattttttcgtgtccaaaccctggaatcaacaaatcgaaaaattgttttccgccaaatatctgctggggccgtgacagacaatgaagaaagactcatcaagtctccaagcaccttcaaaggagtgaaactcgaaattgacccaataggacgcattcgtgaggttcctgaaggagtcatctgagttaccgcgttgtctcagttgtagggccaggcacgattgcacttagggatcaaagcctgctcgtgaccaaacccgctggtgaaacggggaaaatacctcttgaagacatgtccgttctggtccttgatggccccgatcttagcttgtcccatcaagcgcttagcgcatgcgcggctgctggtatagcgatagtaacgagcgatgggaggcaccttcctaatggtttgttgctacctctctcggaccactcgctacatagcagcatcctaaaacaacaaattgcaagtaaagtcccaaaccagaagagggcttggcaagagattgtgaaagcgaagattcggagccaggcagataatctaaggtacttccaacgggatgattcctccttgcggaagatgatcccgtttgttcgcagtggtgacccggataatgttgaagcaagagcggcggctcgctacttcgagtccatgttcggattcgagttcatccgtgatcgtgatgccagcggtatcaatgcatgcttaaactacggttattcgctggcaaggagcgcggtcgcccgagccattgttggtgccggtctgcatccagccctcgggattcatcatcataaccaatacaatgccttctgcttggccgatgatgctatggagccgttaagagccatcgtagatcgtcgagtaagacacctctcactaattgacgcaatcccagatgaactcgatcccaaaacaaaacgggagttgatttctttgctcggaagctttgtggacttcgatggcctgcgatatccactgttggtaggactggagaggtacgcagtgagtctgaggcgtgccatatgtgacggtgagccccttaaggtgcccttgcctgagacctaattgaagcgatgatccctggatatcgactcatgtggctgatgatcatgttcgacctgcctgttgagacgaaggaaaatcgtcgagactaccgccacttcgtcgaaaatattgtggatgacggatatatccggatccagttctccgtttacgggcgcccttgtatgaccgaagaaaataccgctgttcatcaggcccgagtcataaattggatacctccagctggtgaagtgcgcatcctgaagttcaccgataaacagtgggagcgaatgaccgtctttagggcacagaaactcaatacaacagagagatctccaaagcaattcatgttcttcgacgaagatggcctagctcttattgacgaggagccgatcgacgaatccctgtcaagcgaggtgattagagacttagaatcgcctaccctaccaactgtgcaaagcaagatattcacggccaagccacctcccgcaaaacgaactaccacaaagaagccgcgatcacaaaagcaagaccatcctgccttcgattttttcgactagtttttttcaaaaaaaaggccgttccgaaaatttcgacacggccggattcctttttcgaatgaattcttcgaattcatacagattcaaaggagtgtatcagatcaggcttggtgcgcattccccaactagcgaaggaagatcagacccctgacgtgcagtgtatcagatcaggcttggtgcgcattccccaacgacgacctccattgcggcctcggggttttgagtgtatcagatcaggcttggtgcgcattccccaacagcgcccaatccatccatatgttttggatagtgtatcagatcaggcttggtgcgcattccccaactcggacggttggcgcttcgctggatgccgtagtgtatcagatcaggcttggtgcgcattccccaacttgaatcgaaccgataccagccaactggttagtgtatcagatcaggcttggtgcgcattccccaactcatttcgctgcatccttcttgccgatctcagtgtatcagatcaggcttggtgcgcattccccaactcgcagttcgtgcgctttccgttctcataagtgtatcagatcaggcttggtgcgcattccccaacacgtgaacacgggactgacccgatctgaatagtgtatcagatcaggcttggtgcgcattccccaaccacgacgaacaaagagttatcccgtttaatagtgtatcagatcaggcttggtgcgcattccccaacattgttgtcggtatgcccgaagtcgttgtaagtgtatcagatcaggcttggtgcgcattccccaacgtgtcccaaacccgcgagacgaaaggtattagtgtatcagatcaggcttggtgcgcattccccaacgagcttttggctcaggtgtcgatacggttgagtgtatcagat

SEQ ID NO: 2699 - DNA, 23090 bp, synthetic construct
  source 1..23090: mol_type = other DNA
  misc_feature 1..23090: note = Synthetic
ggttacccttaaagttgaacggcgtgaattcttacctgatgctggacacttatcccttgagcaaatcgggaaactttacatcgaggaatgtaagaccaacggtttacaggagattactcacagggattatgaaggagtactcagaaaccacatctaccctgaattcgcccatcgggaccccaatacattcactaccccggaattaaaacgtttctttcaggacttaaagcgtggtgggctctccccagcccgcttaaccaagataaaggttgtattcggggctctcctggccttcgcagtcgaggaagagtacacagccaccaaccccgtcaaagatatccgcctgcgctttcctcaaaccatcaaaggggtcgaggatgaagaggtcgttatccctagcatggaggacttaaaaaagatcctagatcgcgggaacctgagcttacgagaccatacaatggtcactctcgccgccatgtgtggcacccgcgtctcagaaacaatgggtctttcctggaaacacgttgattttagcaatggggaactcctgattcgacagcgcatggaccgtcttaaaaagttaggtcccccgaaaaccaaaaactctcgcaggaatatccccattccagtccccgccctggagttattgcgggcgtggcagaaagaatgtccgcaagctatccatgatctggttttcccgacaacagcgggaacgcctctcgacaggagcaattgggacaaacgcgtctggacatctcaccttttctccaaaggattggccaagatagaccactcaacaaagaaggttcataaaaaatacctcttccgccacctcaggcacgcctatgcctcgttaatgatcaaacaaggagccaatccaaaggaaattatgcaatatatgggacacagcaccattaatgtgacttacgacctatacgggaatttgttccctgacgatgggtcctataaacaggccgtgaatcaggctatggggggcctccttggtacaaaattggtacaaagctgaaaaacgctcaaaaaagtttcccaatgttttcaacggcttggaaaagcagagattttgtaccacaaggggagaaaacctcaaataaaaaaccctttggcacttgataacgcattgataccaaagggttttttagatggtgccgatgataggacttgaacctacgacccacgcattacgaatgcgttgctctaccaactgagctacatcggcacgccggtgcttcataaccgggggctaaaataggcacaaaaagtcctgacgacaagccaaaaattacgttttttacgcttttatcgtgtcgcaggagcaactggcgatcaggggacaggcccggtttcgggcatagcttagagtgagttgtgcataggttggcacaattcaccacactagagtcaaataattaactagtcttcttgttgactctgaaattcaaatagcctgctacaaatatgatacgaatttcagagtcagaagactaggttcaatcgacattcatgcttcacaagatgtgttttatgtgcttcatagggtttcacctttaatgttggagcccttttgatgtcgaagcgctatgaactgacgaccacacaatggaaccggatcgcgccgctcttgcccggcaaggcgggtgatcccggccgtaccgcggtcgataaccggcaatttgtcaacggggtgctgtgggtgctgcgctcgggggcccactggcacgatctgccgccccgctacggcaagtggaaaactgtccacaagcgcttcacgcgctgggcgaagcgcggggtctgggaccggattttcaatgacctggtggaggatcccgacaatgattatgtgatgctggatgccacactggtccgcgcccatcagcaggcagcgaccggaaaaggggggaccaaaatcaggctctggggcgttcccgaggaggactgaccaccaaagttcatatggcgagcgatgcccttgggcgccccctccggttcatcctgacaccgggacagcggggcgacatcacacaggctcccgccttgcttgacgggttgagcgccagccatgtactggccgataaagcctatgacagcaatgccctgcgccagatcatcagggatatgggggcggaggcggtgatcccgtcaaaccggaccagaaaaatcgagatcccctacgataaaaccatctataaggcgcgaaacgccatcgagcgagccttcaacaaactcaaacatttccgccgcttcgcaacccgatatgatcgaaaagcctgcaacttcctcgccttcaccctcctcgccgcatcaatcatatggatgcgatgaatgtcgattcagcctagccgtccttccaatcgagactgtcgaaacgatggcattcgggacaggttgcggcataatgggcagagcgataaccgcagtttttgcaatgccatgctgcttccgccggcgcggtgcgggccttggccagataggattcagcggccgccatgtcctgtttctgtttttgttccagaagtgcataaagctgccaggtccggctggtggcctgatccgccttgacaacgcggtcgagcgcctggcgcgcctcgggccagtggccggcggcaatggccgcggccgccagcagatgacggctttcccggtggtcagggttgaatctgaccaggtgatctacgcgccggaaacgttctgtggggctttcctggggcgcgaggtccagaaacagttcggccagttccggatggggccggattttccaagtgttttctataatttttcgggccttgccggtctctttccgggtcagcaaaaggcgggcggcaagactggccgcgggcaggaaggatgcgtccttcttaagcgccgtctgggcttcggtgagggccagatccttttggccggccacatccgcttctacggcctgaacataatgcaatagcgccgagagatgtttgaattccgcctcgctataagctgattttttatgggcggcgatcaggcttttttcagcggcctgccaatggccataatggatttcaatgtccacaatccggcgcaagacggatgcaacgccgggctgacggtcgttcagctcccgggcgaggctgagcgccagcccgtagtccccccccttgagcgcatcatccagaagctctttcagcgcaaaagccgccgtttcctcccgacggcgcagaatattcaggatttcctggcgttttttgtcactttcgcaggcgctgagcagcctcaggacatcattgcgttcccctagactgttgcgggcccggcgggcgtgccggcgcgccatttcccgatcatccagcgccagtgccgaccagcctttatccagttccgcctctccccgttgacgccgccgccggacggcggatttcaggggggcgaggttgctgatcatgcgccacacccgccccacgccccacagggccaggctgtagagcagggcaagggcggcaaaagtggcaaaggacatctgaatttcccagctctgccagaccagccgcacgtcacctggatgcgccaccacccacgccgctaccagcgccaggagaatggcaaggattatataaaatgtcaggcgaatcattggcggacgccctccccggcagggtcggcagaacggggcgccttgggcgtggcgggcgcgggttggaacaggctttccccgataatgttttccaggttggcaagcgccgcttcggcctcaaggcggacacgcagccgatcttcccagctttcgagcgcgcgctttgcttcggcaggcaaggaaggaatcaggtcaagaatgtgttccggggttttctgcgccagggcctgttcgattttgagcagggtttcatgcacacccccctgttttggcgcgcgatcgcgaacggtgatcagaccccgaagacggctgagcaaccgatcccaccagctgccgttttccacatgggttgcagcccgcaaaaccgttgggaccagggtgtcaaatgtgcggcgcagatcatcgaggggggccacgccctcaccagcgtggcgctgaagccggtccagggcgtcctgtacggcggggagctgtgtgaggggaccctcgcccagtgcctcttgaaaatgtgtcagcgtctcctgatagggttgacctgcgagcacccggtccttcaggcgcgacaggcggaacgccagccaggtatcgctggcctcccgcgcggcagcccgctccagccgatcaagccggccttccagctgcgccagccattctgcctgggacttggtttcccgggccaggttttggcgttcttctgccgcgtcgcgggcttcgatcaaccctttgctcaatggcacaaaagaggcttcaagttgactcatacgactaagcagcatatcgatgcgggccgactgggaaagatccgtttcactttgagccggggtttcgacggccttttccagcgcttcgagacgggccagaatatcgtccaccggaatattgtccaccggaatattgtccaatggaatctcgttttggagcgtggaatctgaaacggaagaaagttgccctgcctgacttttttcttccagtgcttccagccgcaactcaagtttcccgaactggtcttgcaaggtggccagacgctgatcctgctgtgcaagtttttgccggatatcttcagcggcaagcccctgatccgtaccagcgccgccggatcgggccagccagcgatctatcacgggcagccgggcgctgatatccggcaggaaatagatggccattgccgcccccgccagaaacagcacaagaagcaaaagtcccctcagggcccagttgggacgtggtttgcgggaacggctttttgccgcaacaggagcggtttcccctttttttgcagcggtcgccgtgtccttgcccgtctccttttccttctccttcccctcgcttttctggtcgtcaggttgagcgccaaagcgaggccgtaccgggtcaccctccggtttgaggtcatcaggatcggtcatggcgaagtgtcctccttattgtcttgcctccccccgggaggagttgtttcatgggacccgtcttccatgtcgggcagccggatgttgagggtttcgaacaggctgtcctgggtcggagtccgggccaccagacaacggcgccagtgcagggactgtatcatattccgtaccgcaggactaagacaaagcgcgctgacatgccgcaaagttgtctcgtgcccggtttggcggatcagttgcgcaaaaatgcgggcggtgcggggggaatacaaggggatgatgtcaatctggtgttcttccagggcccgtaaagtcgcgggatccaactttgttgcggcttcggcatgataaagcgaccaccgttcgagccgaaatccggcttccgccaccagggccttcaagtcgccggcgacaatggtgcccgccacatgtagcagcggtccggcatcagggtttaagtgttgtttgatcgtctcagccaacttctcaacggtgccccccgaggcggtgatgcgggaaaaaccggcggcggcggcggtgcgggcggtggcgtccccgacagcaacaacaggcatgtttgtttcggtaaagtggcgtctgaaggcgcgcacgccgttggcgctggtgaaaactaaggcctgatagtcggcaggatgttcacgcgctgccaaggggagagagcgaatgttgataagagggtcgatataggccgtgtggccaagctgtttcagctgtgtggcaagtttttcgctgtcttcgcggggccgggtgagcagaaaattcatggctgtccttgacttgtcgcgctaaggagccgggcataaaattcaggacccgcctcttgtttcagctgttcccccaacgttcggccgaggggctcggcctcttcggcagggccgctcagacggccgctaaaatcctcgcgcccgtccgggctcagcagccgacccctgatcgtaagctggccgtccttcactgtagcaagtccagcaatgggggtgcggcaggacccgtccagtacagcgagaaaggccctctccgcgcttacacatacttccgtgtcctgatggttcaaaggtgccagaaggtcgcggattcgcgtattctgccgggcaatttcgatacaaatggccccttgtgcaacggcgggcagcatctgatccgtctccagcgcatggatgcggtcatccttcagaccaaggcgattgagccccgccatggccaggtaggtggcgtccacctgcccctgttccagcttgttgagccgggtttgcacattaccgcggaagggaatcactttgaggtcaggtctaagggccagggtctgggcggcgcggcgcagtgaagctgtacccaccaccgcgccggggggcagctcccgtaggctggcggcttttttgcaaataaatgcatcgcgcacatcctcgcgttccagataacaggccaggtccagttccggcggcagcactgttggcatatccttcaggctgtgcaccgcaagatcaatgctgccgtccagcaatgcggcctcaatctcttcggtaaacagccccttgccgccgatttccgccagcggccggtcgagaatacgatctcctcgggtcgagagcaccacgatctcgatctgcccggcgctcagatcctgatgtgcggcgagcaggcggttttttgtttcatgggcctgggcgagggcgagtttgctgccgcgggtcccgatgcgaagcttttcttgcacttggcggttccagatgttagaggcttttttgagtctgctttgaacgataaaccttatatagtcatttcaaggacatcatcacagtctattttttaacagccgtacagagaatgacaaccgctgatcctgaaaaaataccggacaaaccgcccctggttctaggtctggaaaccagttgtgatgaaaccgccgcggcagtggtttccggcgagggggaaattctgtccaatgtggttctttcccagctggaagaacaccgcccctatggcggggtggtgccggaaattgccgcccgcagccacattgaccaccttaatgacatcatccgtcaggctttgagcgaggcccaatgtggtttcagggatctggatgcggtagcggccaccgccggccccggcctgatcggtggggtcatggtggggctgatgaccggcaaggccattgccgccgcgcacaggctgccgtttctgggcatcaaccatttggaaggccacgccctgtccgtgcggctgtgcgaggaggtggcgtttccgtttttgttgctgctggtatccggcggccattgccagcttcttctggtgcgggaggtgggcgactaccggcggttgggcaccacgctggatgatgcggcgggggaagcctttgacaagacggcaaaaattctcaatctgggatatccgggcgggccggccgtcgaggccgccgcgaaaagcggcgatgggcaccgttttcgtctgcctcgcccccttaaaggcgcgccgggctgtgatttttccttctccggattgaagactgccgtacggcgcgaactggaaaaactggggaaccggttaacccgacaggatgttcatgatttggcggccagtttccagcaggcattgaccgaagcagtgctggaccgggtggatcacgcccttgagatttatcttgagcaatgctcggcgggatcccatgacgggccgcgttgtctggtcgtggcgggcggggtggcggccaacagccatttgaaagagggacttgcccgtctctgtcgcggccgcggggtgggcatggtggccccgcccccggcattgtgtaccgataatgccgcgatgattgcctgggcgggggtggagcgattgcggcgggggctgcgggatgatttgtcgctgggggcccgggcccgctggccgctggatccgacggccccgcgggctgccggcgctggggtgaaggcatagagtgaatagcgtataattaacccggataaggtctcggggcgtaacagcagagggtataatgacagaagagatcagaatgcagaaatttgttgtgatcgggggcggtgcctggggtacggccctggccatttccctggcccgggctggccgggaggttcggctgtgggcccgggaacaagacgtcgtgacgtcaattaacgaagcgcgggaaaatcatctgtttctgccgggagtaaagatcccggaacgggttcgtgcggtgaggcgttttgcggagattgccgataagacggatcgtccggatgccctgctgatggttgcgccggcacaatttgtgcggcctacggcggcggccctgaaggatcatgtgccggaaagtgtgcccgttgtgctgtgtgccaaaggcattgaacagtccagcggcaagctgatgagtgatgtgatggcggaggtgatgccaaagaacccgcttgcggtgctttcagggccgagttttgcccgggaggtggccgacggcttgccggcggcggtgaccattgcctccaaataccagaaactggccggtgatctggcacaggccattcgtcagcccactttccggccgtatctgtcgcgggatgttgtgggggcggaaatcggcggggcggtcaaaaatgtttttgccattgcctgtggggtggtggcgggcaagaaactcggggagaatgcccgggcggccctgatcacccgcagcctggcggaaatgatccgctttggggaaaaacgcggtgcggatccggaaaccatgatggggctgtcgggactaggtgatctgattctgacctgttcctcgccccagtcccggaacatgtccttggggctagcgctggggcaaggccagagtgtagcagatattatgaaggaccggcgcaccgtggccgaaggctatcatacctcggaaatcctgtacaaggttgccgaagaggaaaatatcgacatgcccatcgcccgggcggtttatggcttgctgcatggcggccgcggggtggatgaagtgattgacgatctgctgagccggccgatcaccaccgaagaaatgctgtaaccgcttgtgcttacggcagggcgccacagatgaaacagggaaacaccatgtattttatgatcctggcctatgacaaacccggaaacctggaagtgaggaaaaccacccgtccggcgcatctggcctatgtggccgagagcggagcggtgcggctggctgggcctcagttggatgagcaacaggagccccggggcagcctgctgatcattgaggcggcagaccgggcggcggcggagcgttttgtggaaaatgacccttatcgccaggccggcctgttcgagcgggtggagattgtgcctttcatgccggctgcgggggactggttgcccaaatagggtccatagggaaaaacatggccgagtttgatatttatctgaaggagattgccggggcgccgcccaagggcacggtgctgtgccggcttagggatattgaagacggccgggcgcgggagtttacctttggggatgccaaggcgccgttttatatgtttgtgcagcggcgcggtgcgcaggttttcgcctatgaaaatgcctgtccgcacatgtatgcgccgctcaatctcaaggaaggggtctttaccgaaaaatccgggcggtatttcctgtgcaattttcatggcgctctgtttgaggtggagactggaaaatgtgttgctgccccctgtgccggtcggtccctgcggtctgtggcggtcacgcttgagggcggcaatgtggtggtcctctgacctttgctcttcccgcgggggggtggggtggggatgttatcagagggccctaagaagatatccccgacgccttgcgacgcggggatagagctccacggatttaaaatccttatcacaacaacgcttttcacaccgatagttgtgtgtataatagttgcactacttgaccgcaagatcaagcaaaaaaacgctttccaggggggatgcatatgacaaaaatcatcggcgtggataccggcattgcttctgtcggctatgcttatattgatttgagaaaaaacgaaattcttgccagcggtgcgcggattttcgatgcggcggaacatggcaaagatggctcgtcccttgctttgccgcgccgggaaaaacggctggcgcgccgccggcttgaccgccgccgccgccgccgtatcgccgtgcgcaagttgttgcttgatcatggcttttccgaagcggatgtggctctgccggtgaaaggtcaaaaaacgggaaaaatcaccgagcctgatgtctggcaattacgcaaactgggccttgagcgtaaactgtcttcgcgggaactggcccaagtcttaatgcatatcaatcagcgccggggttttcaatccatccgtaaatccgacgtggatgaaaaaagcgaagggggcgtgatgctgagcgccgcggccaagctgcaggaaaacatgaaggcggcaggggcggaaaccattggcgcctatttggcggggcttgaaaaaaagcgcaacagaccagatagctatgagcataccgtgatccgcaatctgctgcgtcaggaagtggatattctgattgcccggcagcaggcttttggtcagccgttggccactgaggcgctccgggacgccttcaaggaaacagcttttcgtcaacgcccacttcaatccagcattgacttggtgggggtgtgtgaatttgagccgggtgaaaaacgggcgccggtgcgggcctacagtaatgagctgagaacctgctgggaacggctgaacagcttgcgcctgctcaagagcggccggggaacgccgctgacactggatcagaaacgggcgctgatcagtttggcgcaccgccaagccaacgtcacttttgcccgggcccggaaggaactgggcctgccgacggagtatacattcaatctggccagctaccgcaaaaccaaggaggaagaccaggactgggcaagtgtggtcaaaacggccgaaaaggccaccctgatcaagatggaaggctatcataaaatcaaaaaggccctggccccgtatatgtccgaaggggattggaagaattttgctgctgagccggctcatctcgataggttgacggaaattctggccttttacgaggatatccgggatatccgggacttggcgcgggacctgccgctcaccgaggaacagcttcaggccgtaatgccgctcaatctggcaggcacggcagcgctgtctttcaaggcgatctataacattctgccttatctggaacaggggctggtctattccgaagcctgtgaggcggcaggatacgatcacagcccgcgctattttggcgacaaggaccagttgccgccttttcttgccgaatatggcacggaagtgcgcaaccctgtggtgctcagggccctgagccagacccgcaaagtgattaacgcgctgatccgagaacatggcatgcccgaccggtttcatgtcgaactgtcgcgggaattgggtaggaatttcaaggaccgcaaggaccgggaacgggaaattcagaaaaggcgcgcctataacgaagagttgcgccaacatgccgaagaaatcttcggtcgtgaacccagtggagaggatttcgccaaatacaaactctggaaagaacaaaacggtatctgcgcctatagtggggaatatatcccgcctgaaaccctgaaggatcctatggcaacacaggtagatcatattttgccctatagccgttcttttgataacagctggtttaacaaggtgttatgttacgctgatgaaaaccagcataagggcaacgaaaccccggtggaatattttagccggatcgggcgcgatttggccgggcttgaggatttcgccaagcggctgggcaatgaccaaaaagcccgaaggttgttgatgcgggattttgatctggaaaagcaaaatgaatggaaaagccgtcacttgcgggataatagctatgtggcaaggcttctggtatcgcatatggaacgccatttggcgccgcgctatgaccgcacggatgacagcgggcatcccttgtttgtgcaaactcgcaacggggcgcttacgtctcacctgcgccatgcctgggggctgggtctgaaggaccgggacgaaaatgaccgccatcacggcctggatgccattattgttgccgctgcgactcaaggccatgtgcagcagatgaccctgtgggacaaacgccaccggcccaatcacccggatgatccaggtttttatccgcccaaaccctggccaacgtttcgtgaagacgcgttggaggtggtggacaagatctttgtcagccgggcccccgatcgcaaagtaaccggtgccattcatgaagataccatcaaaagcctgcggtatgacgcgcaagggcgaccttatgttgttaaacgcgtccgcttgggggatttgaaactcgcagatctgaaaaacattgtcgatgcggaggtggatgagaacggggtggcccatggccgcaatgccaccctttattatcttttgaaagatcggttggacgcccatggtggggatgccaaaaaagcttttgctgaaccggtttatatgccgaaaaagggtgggggacaggggccgctgatccgcgccgtgcggcttgtgacttccgataagtccggctttaaggtgcgtgaaggcatcgccagcaacggtgatatggcctatgtgaaggtttatgaaaaagacggtaaattttatctttgcccggtgtatgtgaaagatgtcatgacgggtcgggagcctgaccggctgattgtgcaaggtaaaatcgaagaggactggcggcaagttgatgagagttatcggttcaaattcgatctttttaagaacgactatgtggttctggaaaatcacaaagaggaacggattgagggatattatattaacacggaccgtgctacagggcaaattagactgcgcatacatgataattccggaaaagaattaagacctggcgtacaacgtatgaagtcgtttgagaaatattatgtggacgtatttggtcagcgttggaaaacttcatagaacgcctttaactccgccttaaccggttgcatgtatcataacaccctcaatcataagagaaagtatgggggttgttatgtcatggcggacggtgttgatccagaaccgctgttctctttcgttgaaaaatgcccagcttcgttgcgagcggaacgacggcgtcgtcaccattcctgtcgaggatatcacggtgctgatcctggaaacggcgcaggccacggtgaccacgtctttgctggcggcgcttcaggaccacaatgtggcggtgatcacctgtgacggccgtcatatgcccaacgggctgctcttaccgttccttcctcattcccggttgagtgaaattgccgccttgcagcgggactggagccggccgttccgcaagcgttgctggcaacggattgtgcaggccaagatcggtaatcaggccgattgtcttatgcttacgggacaggacacggggacggcgttgcggcagatggcgcggcgggtcgacagtggggataccaaaaatcgcgaggcgcaggcggcgcgggattattggaagcggcttatgccgccgggatttgtccgcggagcggcggattttgccaatgcggtgctgaattatggatatatggtggtgcgggccgcagtggcgcggtctctggtaagttatggcctgctgccctgttttggcctgcatcatgacagcaacctgaatgcctataatctggccgatgatctgttggagccgttccggccctttgtggatcgggaggtgatccggcttgtgggggatatgccgcccgcggggcgtgagctcagtcggcaagatcgtcagacccttgccgccttgcccacccgacaggtgttgatcgacggggaggtgcagaccctgaccaatgcggcggatcgggtcgccagcagtctggtccgggcgctgcgggaaaaagacagccggttgctccatctgcctttgtttgcggtgtagatcctcatgagtcggacgggagataaatatatgtggattttcgttatgtttgacttgccgaccactacaaaaaaggaacggcgccatgcgacacggttcagaaagtttctgattcgggacggatatatgatgcttcaatattcaatttatgctagaatttgcaatggtttggaacgtgttgaaaaacatatgaaacggctggagctggaattgccgcccaaaggcagcatccgcgccatgcagatcaccgaccggcagtataaaaatatcaggattttgctttcaaatgccccggaatttgacgagacccacccgaaaaacaacagcgaacagctccttttactctgagctgttcgctgtttttcctgctatatcagtcacttatctctgacctatcatagcctatcggtgtgaaaagggaagctatgactatttgtgccgattttctggcgggtaaattatcatagcctatcggtgtgaaaagggaagctatgacgaacccctgtccgaactcgacgaacttgtttatcatagcctatcggtgtgaaaagggaagctatgacaatctgcgccgatttcttagcgggtaaactatcatagcctatcggtgtgaaaagggaagctatgacagtccgctcaccctcatgacctccggaataatcatagcctatcggtgtgaaaagggaagctatgacttatgatagtacagggtgtgccctttgctgatcatagcctatcggtgtgaaaagggaagctatgacaaagagctggaggtggcacatggcgacgaaatcatagcctatcggtgtgaaaagggaagctatgacatatgaaatggcttatcgcaggactaatcgatcatagcctatcggtgtgaaaagggaagctatgaccggtttctctatcgactgcgaggcgtacttatcatagcctatcggtgtgaaaagggaagctatgacatgcccgagaaatccccgatacaggggattatcatagcctatcggtgtgaaaagggaagctatgactcttagcctcaccttccaggtttacgatcgatcatagcctatcggtgtgaaaagggaagctatgacgcagaggggattaagcgtctcgcggctgatatcatagcctatcggtgtgaaaagggaagctatgaccgatacccacatggcccggttcacgattatatcatagcctatcggtgtgaaaagggaagctatgacaagataggtataagatagataataattaggatcatagcctatcggtgtgaaaagggaagctatgacatgattattgagcatggcgcaaaattcaagatcatagcctatcggtgtgaaaagggaagctatgaccaatgatgccaatcgtccacaggggatatcatcatagcctatcggtgtgaaaagggaagctatgaccgctgcaacatccgctcaacctcaacatgatcatagcctatcggtgtgaaaagggaagctatgacgtcccctacgagtaggcgacaggccagttgatcatagcctatcggtgtgaaaagggaagctatgaccctcagcgctcaacagaacgaaggacaattatcatagcctatcggtgtgaaaagggaagctatgactgctcgatagtgcggatgttagatttgtgcatcatagcctatcggtgtgaaaagggaagctatgaccttaatcatgacggggttgatgatcctgctatcatagcctatcggtgtgaaaagggaagctatgaccgggtcatgcggcccgtttccaaacatctgatcatagcctatcggtgtgaaaagggaagctatgacgacagaccctgttttaaacgtgacatatgcatcatagcctatcggtgtgaaaagggaagctatgaccaacagatacatggggtacatgcccagaagatcatagcctatcggtgtgaaaagggaagctatgacgctatgccgcaacacccggacgccggtggagatgatcatctatcccgatgaatatcatgtcaaatggcaacctacccacaaatatctggtgtatcggcggaacctggattggttcaatttctggctgcgcgggattgaggacccggccccgaaaaaggccgcgcaatatcagcgctggcgtaaactgcgcgacttgcagccctgagtattaacccaaatatcaaccagcccccgatagagtcttctgggggctggtttggtcatcgtcgcaaggtgcgaacaggaagtccggtcagccggcgaccacgttgcgcagctgtcgggcggcaaagcccagcttggtcacgttgatctggccggtggactggaattccttgatcagtttgttgatccgggcccgggcggcctcggaattctttagccacgccttgacggaatcaatggctgcgccgttttcataggtctggatggcgtggcgggtgagcagtttctgctgatccagaaggtcgctgatcaccgcgctgaccgccagccggtcccaatggtcggccgcctctaccatttccgcctgatcgcggatccagtcgatgcccatttcatctcccatcatgaaataggcccgggccacatcaaccacatcccggttcaaatcccgggcgacctgtacaatgtcacaggcggccagtttcatttccagattggaaatatgggtggccagatcctcgctcacgctttgttcgcaatacatggcgattttggctctcaggctttcttcatgggaagaattgaccacgatgggcatatcaaacagcttgatgatgcccgggcgatactggtcgatgacttcctggagcggtttcttgggatcggtgttgttcaggaaccatatggtctgccggcgggcaaattcttccacgtccagtaacagcaggatctgaatggtggccggcacgacatagtccagactttcgatcttctgccacaggttgtccagatcgaacacctcacgggtaatgatgctggcccgggcgatttccgcggccgaagccccggtttcttccttgatggcctggatcccgccgcggttgacaatgtcgttacacagcaccttggcaatgatttcccgccgcagccggtgtttgcggatggcgtccgcataggtctggcccaggcgttccgggaaggagctgatcagatatttttccagataaggatcttccagaaaatcgcttttcagcaattcatcatacaacgccattttggcataagccaccagtaccgccagttccggccgggtcagcccctgttccttttccgcccgttcggacaattcctcgtctcctggcagaaattccagttcccggtccagattggcggatttttccagatcgttcatgaagcgcacaaaactgtccagttcccgcacgctgctggcgcgggcgatgctgatggtctgggtctgcaggtaattgtcacggagcaccagggcggccacatcatcggtcatgtcttccaacagcttgtcgcgctgtttgcgggtcagctgcccgtctgagaccaggctgttgagcagaatcttgatgttgacctcgttgtcggaacagtcaaccccggcggagttgtccaccgcgtcggtgttgatcatgccgccattcagggcgaattcgatccgtccgcgctgggtgcagcccagattgccaccttcgccaatgaccttgcagttcagttcgttgccattgacgcgtaccgcatcattggcgcggtcgccgacctggccatggctttcgtatgaggctttcacataggtgccgatgcccccgaaccacaacagatcgacctgggatttcagaatgctgcggatcagttcgttgggagtcagggttttttctgacagcggaatgtccagaagccggcaaatttccggagtgagcgtgatggacttggccttacggctgaaaatgcctccgccttttgaaatcagcttgcggtcataatcctgccagctggagcgaggcagatcgaacagccgtttgcgttccgcgtaacttttttccggatcgggatcagggtcaatgaaaatatcccgatggtcaaatgcggccaccagcttgatggcccgggaacacaacatgccgttaccgaacacatccccggacatgtcgccgatgccggcgacggtgatgttgtctttctgcacattgatgccgcgttcgcggaaatgacgctgtacggacacccaggcgccacgggcggtgatgcccattttcttgtggtcatacccttgcgatccgccggaagcaaaagcatcatccagccagaaatcatactgctgggccaggctgttggcgatgtcggagaaggtggccgtgcctttgtcggccgctaccaccagatatggatcatcgccgtcccgtcgcaccacccgcgccggcggtagcacatctgcgtccttgagattgtcggtaatgtccagaagcccggaaataaaggttttgtaacaggcgatgccttcttccaggatgtcttcccggctgccgtcggcgggcagtttcttgggcacaaatccgcccttggcgccaaccggcacaatcacggtgtttttcacttgctgggccttgaccaggccgagaatttccgtgcggtagtcttcccggcggtcggaccagcgcaagcctccccgggccaccggcccggctctgagatgcaccccttccagacgcggtgaatacacaaagatttccgcgtagggcttgggtttcggcgcctcgcgcacggcgctgctcttgattttgagggacacatagggtttcggactaccgttgtcctgatactgatagaaattggtgcgcaatgtggcagtaatcacattgagataacttctgagcatgcggtcctggtccaggctatccacattttcgagaagctcccgcacccgtccttccaatgcttcgcgttctttttcccggtcaaaatcttccggcagatccgggttaaagctgacctcaaaaagttgggccagacaataagcgatctcatgatgctgggttagcgtgtcctgcatgtaaacttcgctgtaggacaaggaaagttgtctgagatatttgctgtagattcgcagaaccagcacctgccgataatccagcccggccctgagcaccagcttgttaaagccgtcattgtccacattttccagccagaccattcgcagcgtggtttccagccgggttttgatctcggaaagatcggtccacagccgggcagtgtcttcaagatggaaatcgtgaatgacatagcggacctcttcgccgagaggatgggtaatcaggtcaaaggccacttcctcgatcaccctgaggcccatattttccagcatgggcagacagtcgctgagcgcaatggtttgctggctggtatagattttcagacgcagggtatgatccggatcctcggccagccggtacaggttaaaggcgatattattgcattcgggcagacgttccagtttttcgatgtcggtgaccgcaaaacggggatcgaaatattccttgtaggcgggggtgaaggcccggttgtatttattgtaaagattgttgccggcctcttcaccaagacggtcggtcagcacttcgtgcagataatcgttccagcgctgcgccacttcctggatgcgtttgttgatatctgccggatccggattggggacctggccgggtttggtgcggatgataaaatgccagcgggcgattctttcattgctgagttgggcatagcgggaagacagctccccgttataggcgtcacagagaatgcgttcgatcttgctgcgcagggtggaatcgtaaatgtcacggggcacgaagaccaacgcagagacataccgttcaaaacggtccttgcggataaaggcggcgcatttggggcgaacctgcagatgcagaatgcccatggaggtttccagaagctgatcctcgtcgatctggaacaactcgtcccgtggcagggtttccagaatatgcactagggaacgggcattgtggctgcccggggggaaccctgaacggatcaggatattgttgaccttgcggctgagatagggcaccgaacgggctcgctcgctataggaatcggaggtaaacaggcctacaaaacgggcttcacagatgacgttgcccgtggtgtcgtatttcttgaaaccgatataatccagatgcaccacccggtgcaccatggatttcacattggccttggtgaccatcatcacatccggctgtttcatgaaatattcgatttccgggttgatggccaccaaccctttcggccccctcagcacatgcacattcgggtcccgtaaaatgccgtatcctcggctgtcaaccgcctcttccaccacttttttgtcgggagactttttgccggaagcttttttgtcacctgtcccctcatggacatattcccggtatccgagaaaggtgaaattgtcattcatgagccagcgcataaaattctgcgcttctttcacttcgctgcgcggcagttccttgggcgcatggtccatggatttgatcagcgccttcattttgtccagcatggggtgccagtcttcgatggcggcgcggacaaaattcatcacctgcaagagcttgccttccagcgccttcagctgttttgggtcggtcatggcggtgacctcgatatgcatgaccgattcccgcactgcttccccgccggaagggaccatgcggcctttgctgtcccggtggcggctgacaatgggatggagcagcatatgaacgtcacacccctgttccagcaggttaaaggtgatggaatccagcaggaacggcatgtcttcattgatgatctggatcacggtatgagaggactgccagccatgttcttcgagggtggtgttgaacacccgaagtttggttgtgtttttgtcgcgctgatcgctgaatttccacaaagacagggcgatgccgtacaattcgtccaccggccggtccaccaggtcatccggtgagacgtttttatacaggtcgcggataaaatcgagaaagccgtcctgtttggcggttttcagtttttccgcggcaaactccacaactgagtcgatgcggatatctttttgtgcccagtaattcacggtttgtcctcttgatcctttcggattgatctgcgggtcctgctggtgaatgccggcaagacaagcttctcaatcctgttctggaaacgcctggttttggtctgttatggctttatggcttttttgaggaccggcgccaaaagcgactcatcctcatccagcagtttcacgacctcaacgacagagcctttccgtctacccaatatcaaacacagtttttgttcctgcccgttttctgcctcttccgtgcttcctggcggcccttccggaaggtgcggcgccgtcagttcaaaacgggacagaacgggcatgttattaacccttttcttgacttcttcaagtgaattattcatgcgttgcacgctccccggccgacggctttcccgttcggctttcacacagcctttaatgccgccctggaagctttcaagaaagtctggcaggctcttgcccgtatgcccttttttcagcgcatgactgagcgccgcggcatattcggtcagccgggtcttgtcaaattctcggccaaaacaaagtttcagcgttggcgtaaacggggcgcgtttttgaactttgagtccggcttcccgcaacaacgcctgataggcttcggggtgacgttgggcggtgaggtgaaaatccagaatggccgccagcgtgcggtacagggcccggcgcgaacggctgtcggtggcgtccttgcctcgggccagggcccggcagtgggccagttgttcttgcaggctgtgtttatctggcaggctgtgtttatctggcaggctgtgtttatttggtaaggggcggttgtccggttcgcggtcctccgcgggaggcggcggcgcgggaacgttttcggctggcggtaagggggcttccgtttcggaagcttgtgtcttgtgatcttcgtcggtttccgccggggccggcagcgggtcatcttcctcgaaaaccatatcatcttccgccggggccggctcgtggcgaagcggcggatgggccggcccttccggctcttcgagttcttcttccacaatccagcggatggccccgagaatgaagttaatgttttcgccatcatcgctgaacggcagcaatattccccgatacagggctttttccttgtcccgggtcgtaaattccgcgtcgaaggaaatgggggcccggttggcgaagacttccagataatggtcggtcagtcggctgagaatagtccggcgaggaatttcgctgaggggtttaagggtcagatcctcgtccagatcctgcttcagggcctgaccaatcacctgcaaagttggttccgaagatctgtccctaagatcaatcaggatcatctgatccttgtaaggctggatgtcttccggggagagttccctgagtgacggcatatcccgctccccggccagctcctgccaataatgatacagctgaaaggtgatgcgtctttcccgaccagtatgggctgacgggtccatgagtccctgcctctccatcaaatctgccgctttctgttcgtgaacgccccgatttcggttgccggctcccaaacatatgcgggaacaactccgggcttttggggacgctctacaagacaacttctactcctaaaatccttatcagaaaagagtaaatttattctgaatcaaaaatttatttcagacaacttcatatcgccgccggcgattgttcaggaaaaaaatatgaaaaatgaaattaattattttaagtctaaaatatttgcgttatgatgccttccgaaagtgacaccacagcgcaatataaaaaggttgtgctcaggcgctttggccgtgacccgaacgcattcggcgtgataggatcggcggtgacgggcagctggcctccgtaacccaatagcggccgcaagccgcagagcaggcggggggcgttcgggcccgaagcatcttgaaaccagaac

SEQ ID NO: 2700 - DNA, 22332 bp, synthetic construct
  source 1..22332: mol_type = other DNA
  misc_feature 1..22332: note = Synthetic
ttatattatagtcttacaacagagttgtcaaattattttaccgcgcacttatatcaccgccgtaaacgacggtgttttacgtgcgcttattgataaacacttaatgaaagtagcacctacagaggatgctaaagctcaatttaagaccgcacagcgccaatggattaaatatcgtgatgagatggtcaaagcttatgctaaagactttggtgatcaaggcgagagattagctgcgaccttagaagttaagcttacccgtgatcaagctaattacctgcaagaatacgcagagatttttgaaaactcagaggaatagttagattagtgaggagtgcaagaaaagcccctcctcactatgagatttaacttctattcaaagcttttaagcaacgctaaaaactcttcttcgtaaattacttttacacctagctcttgagccttagtaaacttagagccaggatcagcaccacagataactgcagtagtcttcttagaaactgagcctgaaactttagcacctagagctaaaagcttggccttagcatcatttctacccattgaatctaaggtaccggttatcacaaaagtctgatttaaaagtggctgattatcagctgtaagctcactttgctgtggaagtggagttaattcaatacctgcgctaaataagaaaccatcttcatgttttacaagtctgtcgatgatctctaaattgtgtttttccataaagaaatcgacaatatgacgggccaccacagggcctacatcaggtagatttaaaagttttgagtaagcagcatgagatagctcatctatggtcttaaagtgagatgctaaggttctagcagtagatgcgcccacctcacgaatacccaaagcatagataaagcgatttaaaggcatcacgcgtgacttatcaatagcagcaattaactttttagctaccacatgacctaggaagcgcactttcttatcatcgcctccatctaagattaaggtagctaaatcatcttctgtaagactgtataagtcagcaactgtcgaaatctttttggtagctactaattgctcaacaattctatcgccaaagccttctaagtccatcgcatcacgagaaacaaaatgaatgatagcctgggttaactgcgcagagcacaccaaaccaccagtgcaacgagcaaccgcttccccttcaactttttcaattaaagagccacagacagggcaaacttttggaaactctacatcgcgctcagtaccattacgacgctcgacaactacacctgagacttgagggatcacatcacctgctcgacgtacaattacagtgtcgccaactttaattcctaagcgcttaatctcatcttgattatgcaatgtagcacttgaaactgtagcaccaccaacatagacaggatcaagtttagcaactggggttatggcaccagtacgacctacttgaaactccacatctaaaagcttagtcatcatctcttcaggagggaacttataagcaattgcccaacgcggatttttagcagtaaagcccatgctttgctgaagatctaatgagttaacttttaaaactacaccatcgatgtcgtagtttagactttgacggcgagataagatatcttgataaaaatcttgtaggccttttaaaccttgcacgcacttaatattagggttaactggcaggccaaactttttaagctctaagaggcgatgatattgatcatgaggaagatcatagccttcaacctcacctacatagtaagcatagaaggataatgggcgcttggcggttacctttggatctaattggcgtaaagagcctgctgcagcattacgcggatttgcaaaaactttacccccgtgaaggcgcgcattttcattccatttgttaaagccatcgcgagtcatgatgacttcaccacgcacatctaagtagcttgggatactgtcacctgtaagctttaaaggaatggccttaatagtttttacattagatgtgatgttttcaccaactctaccatcaccgcgggttgctgcctggactaaatcaccgtttatatagattaaggatacagctaaaccatctaattttggctcagcgcagtactcaacgctttgatgatcagtatcgctcatcatgcggttattaaaatcgataagctcagcgtcattaaagatatcgcccatcgacattaaaggcacgcgatgctcaacttgctcaaaagaagttaaggccgcgccaccaacgcgatgagttggggagtctttggcgataatggatggatcttgagattcaataagctctaactcacgataaagtctatcgtactcagcgtcaggaactaagggattgtcatcaacataataagctttagagtaacggtttaaggtatctactaaagtgcgatattcttctaaagtagccatgacgactccttaatttctaacttaatttcagattttaaacttatggatgtgacgtaaaagcaagcttacagactactcaacgtctttatcgtagtgatataagatcttctcaattctatctaacttatctgttgatacttctttattagagttatcaacaattgagccacctaagtgctcaatgatagtgtctgctgcaatgcgcattgctttaaagtaagtatgagctttgccttttggaggtaattgcatgtagacagcaagctgcttggttgcaaagttactcatatctttagggaaagaatatggagcttcaagtgagcacagtctaaacactacattattgctacttgcactctcgtgaacaacaaagatatctttgtcatttctaaataaaccataagcattaaaaagctcttcaaggtcaaggcctttataagctcgtcccatggtagctaggatgttgagctcataggtattttgcacactttctttttgaggcattgaaaatgatggagagatatttactgtaggctcaacttttgattttgctttagagtttaaatgcggaatatctttacgtactgcagtcacatccacagggttatcaaggctctttggtctgatgatacgaaccttacctacagtgttagataaaacaatttcttgatcttcttttgaagttttattgagtttgcgattagtagaacggcctgagaaccatagaccgtgaactacaaaagctaagatcgcaatggcacctacaattaaaattaaagagcttgaatcgttaagtgtcatgtagatctccgtgtttattattttttatatttttaccaataatgcaaacttatacaaccttgctattttaaactaaatactgtctcatgtcttttcatagctcaaagtttgcactaaaaaattcaattacttaggtgaaaatgataagattgcaaattaagaactttagatgaaggcttatatatgtcagatgaaattaaagtagagcaaattaccgtatcaaaggctcttttttatttagtagatggtcttaaaatcgcattatctccaaagtgccgtgcttatgtggtcattcccatcatcgttaatatcctgctgttaattttattaggctatggcacctttacttatttaaaggctttagtgtttgaactttttgacatgttcccagcctttttagtcttctttgcctatgtaatttgcgcgctcttaggtctgactatcttctgcgtagcttgttactgtttttcaaccattgcaacaattattgcctcccctttttatggacttttagcagacaaagttgaaagtgagattaacggtactcacggtgatgatatgggagttgttgatatcatcaaagatatcccaagaattctattgcgtgaatgcaaaaagcagatgttctttttaccactagcctttatctgcttgatgatcaccattattccatttttaaatttcttatctccatttttatggtttgcgctaacctcatggatgggttgtttgcagtatgtcgattatgcctatgacaaccataaaattacttttaccatgatgcaaaaagacttgcgcaataacatgttgccaaccttcaccataggtgcaagtattgcagtgtgcttgtgtgtaccagtacttaatatcttaattccacctgctgcagtgtgcgctggtactaagtactttgttgagttgcaaaagcgctaccaaataacaaaaggttaaggagagattatgtatacattatcaggtgtagccgtaggtgctggcattggtgtagctcctgccttagtgattgctaaaaagaaaaatgaatacgcaactgatgaaaagtttgcctatgaaacagaatctgagattgatagatatttaaaaaagtcgaccttatttgctcaaaagctccgtcaaattgtcaatcctgctaaagactgcgtgcgtgatttattaggcgcagctgcaggctttttaacctcaaaagataacaactctgaggttattgatttaatcaatcaaggctacagtgcttgcatggctgcccgtaccgtactgttaggcaatcttgaggcattttataagcacaacaatgacttaaaagatgacaaagaagagctcacctctttaatgaatgagttcatccatactttagagcatgctcatggcaatgaactagagtttccaaccttaactaaagatgtcatcttaattaccaaaaatttaactccagctcagcttctatctttagagactaagcacattaaaggtgtgatcttagaaggtggtcatgatagtggtcacttaggcgtggttttacgcgagctaaatatcccatctatctttggcgtgtttgacgctaccaccattaaaaacgacactacagttttagtagatggtaactcagctgtcgtcatcgttgagccagagcaagatatcactgactcgatgttatcaagacaagatctatacgctgatcagataaacgatgactcacttttaaatatcaccattgcctgcgccgtaggtactgttggccaaagtatcaataactctttaattaccactcacggtttaggactgttacgtagcgagtttttgtttttaagttctacctatgagccaagtgaagaggagatgactgatactttctacaagatctttaaaactatcaacaaaaacgccccaattacagctagaacctttgactttgctgatgataaaaagcctttgtttaacatcaaattagatgaatcaggacctttaaaagattatggtgcttgtgtaggctcaaatctattgaaaaaggaaattagagcactactgcgtgcctgcattgggcagaagatcaccattgtctttcctttagttactaaaattactgaaaaggactatttagtatctcttgcccatcaagctattgaagagcttgaaaacgagagtattagccacggttcaatggaattatctttcatgattgaaaccccggctgctgtactatctgcacctgctattgcaaaagaaggttcgatgatgctaattggtacttcatcgcttgctgaatacgcctctgccccatgtccaccagataatgcttttactcctgtattagcaaaaatgattgtgatggcagccaaggctgcatttgaagcagggacaaccttaggtattgcaggccgctttgcctctcgcaccgagcttttaccttttttctacaagctaggtgttacatatttagtaactggtgcgtacaatatcaccaacttaaaagcacatgtggagcgcttaaacttagagcatgagattgccccacatttttcaaatgagctttatcaaaagatcatgaatatctacactggaaaagagctaactgaagttattcaaaatttatagttgcttaaaggatttaccatgggtttattttcatttttcaaacacaaagataccatcactgaagatgctaaaaacgaggcggatttagagctagtcgcccctgtaagtggctcgattattactttaaaagaagtaccagatttagtgatctctgaaaagctgatgggcgatggtgtagctatagtgcctactgataataaagttgtcgctccatgctctggcgtgatctctagatttatcgcttcaaacaatgcctttgcagtacgtaataatgaaactggtgttgaagtgtatgttacctgtggtattggcactaactcttttaacggtgtaggttttactccaaagctccacttaggcgatacagttgctaaaggcgatattgtctttactgtaaactttgatgaagtcaatgagcagttagagtctactgtcacctcaatgattgttatcaatagctcagctaaaattgctcgtgtaatttccacctcaggtgaggctacagctggtgtaagtgctatctcttgggtgattttgcagactgaaaacgaaaaaagccaggactaagcctggccttataaacttaaagacaaaagaggttaacttacgatactgtcagggctattttggcctttaaactgagctttaacctcttgctcaattttagctgcgttttgcgcgtctttggctttcattgagttgtagtcatagctgtactgagttttcttagtctcagttgcgctgctctcagttttagtagtatcagtcttagtagttgtatcgctcttttgagtagaatcaaccttagctacagtatccttgacagcatcagttttgacattagcatctttattagctgttgcatctttgtttactgtagtatcagtcttatcgctatttacagcatcactcttcttgccataacgcttggctacgtctgcttcaaaagccttttgattttctaggttctttttcttaattgcctgataatcataggtgtagccagatgagcttgaacttgctttcttatcatctgaagccacaccaaacttattgtaatcttgaagcttctttaaagactctttgctaattgaaacagtatcatctgcctcattagcaatcttcatcttctcttcaaatgcaactctatgacgagtataggttagcgcatcggtagcagctgttgatacgcgatttaccaatgaactttgattgctttgaagttgctttttataatcgttattatcttgtttagtatagctagcaatagcattattgatactagttaatgcacttgaatcgatagccatattctctccttgggtaaaacacgcttctaccctattacgtacattatcggtatttcatacccaaaactttaaaacttttttgaaaaatttttaactattttgcaaaataacgtgttttcaataagttagatttttactttgccttaacaagataagcatttgcttttaactttagacgtgtttaatagccttggttaataacaaaaaggaaaattatgaaaacaaatctaatctcaagcgcattatacgcagtaggcgcaatcacttttaccattgcatttggctctaacgcacacgctattgaaacttcatgggcagaggttcaagtaccagcaaaagattacgtacagtacgaaggatctaacccattatttaaagatggctttttaacaggttttggctcagctttggctttaaaagaagtaaaagacgatggcactgtagttttatatggcttaacagaccgtggtcctaatgctgatggtcctaacgttgttgatgaaaatggcaaagtacaagtatcaaagtatttcccaactcctaaatttaatccacaagtaggcgtgatctcctttaaagacggtttagctcatgtcgataagatcattcacctaaaaaacgctgatggtagcttaattacaggtcttcctattcatcaaggactaccaggttctactctagaacgtgctttagatgataataatcaaatgcttggctttgacgataatggcttagatactgaaggtcttgtttttgataaagatggcaatatgtggattagtgatgagtacggtccatttttaatgaagttctctcctgatggtgttcttgaggagaagtattggcctggtaatggcttacctgagattttaaaataccgtactccaaatcgtggagctgaaggtgtgtcaattcttccaaatggcaagcttgttctaatggagcaaagtgttttaaacatcaagcgtggagataagaaatctggtaacacagcttcattttgccgtgttgtgatctttgatcctttaacccatgaagttaaaactgtaggttaccctatcaataccgattacaagaaaccaggcgatgctaagcttggagacattaccgtaatcaatgatcacgagtttttaatcattgagcaggcaaaagataagaacaagaagatgcaaaaccgcatctatcgcgtggacttttctaaagctgatgatttaactaatgctttaaaagatggattagagccagaatttttcaaagacgcaggtggctttaaattagctaaaaaacaattattagttgatctgcgtgaatacggctgggatatcgaaaaggctgaaggcttagtagtactacctgatgaaaagaccttaattgttactaacgacaatgattttggtcttgagcttaaggtacatgatacagaacataagaaagctaagattaaagattacactttaaatcaagataagagctttagctttgatggtaaaaaggctgatgtaaagctagagtttacccacaacgcagatagcgaaagagttcaaaagctaatgactattaagttagatcataagctataagcgatttaccatttcgttgatattttcacattggcctcatgagagatcatggggcttttttgatttatttggtgtgagatgaaattttgaagtgtgccctgctattgcagggcgtgagtgaccaagaaggcaaagtcacagtaacgtttgttttcctgacaaaacaattacatagttattatattaaagacgttatctattttcaatattctttacttaccaaatttacatacatatttttcttttttgtatgtttattcttttaaattcataatcacttaaattctttatattgattttttatatacaacattcaaattttccgatataattaaggctcagaatttattgtacggaaccttagttttttatgaataaaatgatacttggcctagatataggtatcggctcagttggttgggctttaattgaagaaggtaaacgcatcatcggtcttggagttagaacttttgatgtctctgaagatcctgttaccaaagctacgttaaatcaagtaagagcagatgcgcgccgacaacgtcatcaaatcaagcacaaagcatcaagattaaaaggtcttttaaatcttttgctaaaacttgagcttatcaatgataaaaacattatcttacaaaatcccctccataaagatatttgggaattaagagctaaagctttaacagagaagataacctctgacgagcttgccttaatcatctatcacatatgcaatcatcgaggtttctactgggttagttcatgctctacaaataatgaagatggactaataaaaaaagccttatcttcaaatgagcaaatcatgcttgataaaggctacaaaaccatcggtcagatgatctttaatgaatttcctaatcactatcgtaacaaagatggtgactatactaagtgtatttcaagagttgaactcgataaagagcttaataccatattcacctgtcaaaagtcacttggcaacaacgatgttacagaagagctaatgactggcgttttaggtgttggtgatagaaagtcaggatttttatggcaacaaagaccatctattcaaggtgagcaaattctaaaacaagtagatcgttgcagatttgaagcaaatgagtaccgcgcgcctaaagctaactactttgcgatgcgtcatgtgtggcttacaaaattatctagattaaaagttgtagatgctgactacaaagaacgctctttaacgcattatgagttcatgtcattaaaagacataatttttgagatcaaaaacgatattacttttaaagcattagaaaacaaactcataaaatcgtacatttggtcaaaagatcagttccacctaaaaagtgctgaatttacatctaatctaactaagtctgtcaaattccatgctatggatgcgtggatcaacataagaaaagcctttgaaaaagcagatctaaaagattcttggaattatcttcttcaagatataaagcaaggcaatgttgataaatacaataaaattgtcttcattttgactgtatttaaagatgatgctgaaatcattgaacgcttaggtaagcttgatcttacacaagaagaaatagtcgctttaagtaccttgcgctttacaaagtttgcttcattttcagaaaaagctttagctaaatttataccatttatggaagaaggtctagcttatgaaactgctagcgctaaagctggctacaactatagcctaatctcccaagaacctatcatcaaacataaatatttgccttcaatatatttagaaaacaatggcaaaatcgtaaaaaattcaaagattttagatcttccagataatccaattgtcttaaaagcattaaaccaaacaagaaaagtaatcaatgccgtaatcaagaagtatgattctccagatgagatccacatcgagcttgcacgagagttatcaaaaactgctgagcaaagacttgaagaagatcataaattaaatcttctatataaaaagaactgtaaactcaaagatgagtttgtatctaagtacggtctacacaactttaatgtatctaactttgaaaaatttaaacttttcaaagagcaaaatggaataagcacttacactggagcaataattgatgaagaaagacttcttgaagacttttacgtgcaagttgatcatatcattccttattcaaaaagctttgacaattcatttaataacaaagcaattgtactttctaaagaaaacaaagataaaggaaatagaacagcgcttgaatacatttatcaagagaaccttaatatagaatcatataaacaaagagtacttggtaactcaaatttctctcgattaaaaataagtaatttaatgcttgctaattttgaaagagaagctgccacaaattttaaggcaagacacttaagagatactgcttatatctgttcgtttgcaaaaaatttcatagaatcatatcttcttttaaatgccaataaatcaaatagtaggtgcctagttgtcccaagtaacttaactagtttattaagacagcattggggaataaagaaaaatagattaaaaaatgacagacatcatgcaactgatgctgcagtgattgcaggatgctctttcagtattttaaatgcaattgaaagaatatctaaaaaaagtgatatcggaactttagaagatttttctaaggatcctcaattcacagatgaagttatatcactttctaatgtgcttaaacttccttggaagcacttttcaaatgaagttgattttagagtaaatgaggataaccgacagattctaattgatagactaagtcaattaggaacttacgattttaatgatttaaaacgagttaaaacactcaatgtttcaagagcacctaagcgattaaaacaaggtaaagctcatggcgacaccatttataaaataaaatcactagaaaatgaagaagttgtagttcgcgttcctcttaaaaaactaaacctaaagaaactagagtgcatggtagataaacagcgcaatatcaatctgtataatgtgctaaaacagaggttaatagagtttaacgatgatggagaaaaagcctttgcaacgccaatttatatgccttgtaaagatcctaaaaatgcaccactaattagaaaggtaagcattctgcagataaaatcaggaatactagttagaggaggaatagtttctaacggggacatacacagaatagatttctttaagaaaaatgacaaatactatgcaatccctgtttatgttaatcaaaaagaacttcctaataaaattgcagtaaaaggcaaaaggcaaaaagactggttaacacttgataatagctatgaattttgtctttcagtctataaaaatgacttcctagaagttgacactaaggatggcctttttagaggatattatgctgaatttgacaggcatagatgtagcattcttttaaaatcccatgatagggatgaaaaacttgagaaaagaattgcttatatgcaagtaaagagcattactaaactgcacgtagatgttcttggaaatttatatcaggcagattttatggaaaggcaagcaatttagacatttttgggtacatgagaacaacgtgatattgtaatagttttgtcaggaaaacaaaggaaactataacgatatgcccgtcgtcatctcatgtggtcagaattataaacgattatttatcattaaaaaaggcctcagttttgactgaagccttttatttacagatttgctaaaaactataagttagcaacgatgtcttcaactgtcttcttagcatcgccaaagcacattgatgtattttccttaaagaataaaggattctgcacaccagcgtagccaacgttcattgaacgcttgaatacaactacattcttagccttccaaacttcaagaacaggcatacctgcaattggtgatgaaggatcttcagatgctgcagggtttacagtatcgttagcaccgataactagaacggtatcggtgttctcgaaatcatcattgatctcatccatctcgaatacgatatcatatggaaccttagcctcagctaatagaacattcatatgacctggtagacgacctgctacagggtgaattgcaaagcgaacttcaacaccgcgagcctttaacttctcagtcattgaagcaacagctgcctgtgcttgagacacagccataccatagcctggggtgatgataacagagcttgaattctttaatagttcagcaacttctggagcctttaactcatgatactcgcccatctcttcagcatcttgcttcttagcaggagcattaccaaagccacctgcaataacagagataaatgaacgattcattgccttacacataatgtaagatagaattgcacctgatgaacctactaaagcacctgttacaattagaagatcgttttctaacatgaagccagatgcagcagcagcccaaccagagtatgagtttagcatcgaaatcacaactggcatgtccgcgccgccaatagcagccactaagtgaacaccaaatactaatgcaataattgtcattacaatcaatgggatagctggtgctgagagcttagtaacatcacctgcacctacgaaccaaatcattagtacaaatgaaactactaaagcagctaagtttagagcattaccaaatggtaaggttaaaggagctgacttaaagatacgtaacttgtaggtaccgtttaacttaccgtatgcaacgatagaaccagtgaaggttacagcaccgatgaagatacctaagaagatctcaactaactcagtattaaactctgcattagttggagcattctttacagcatcaactacagcatctttacatgctgctaaggtatttaaagcctcttcaggggttgcatcttttgctacttggcaaacagcctctggggtaatacctaagtgaatgaagctattaaaaccaactaatactgcagctaaacctacgaagctgtgtaagcaagcaattaactcaggcatctgagtcatttgtaccttacgagcaacgtagataccaattacagcaccgattagcattgcaacaataattgctgcaaagcctactgcagtaacgtgagcaaaggtagcaattaaagcaattgccatacctaccatacctgataagcagccttgctttgcagtttcctgcttagataatcctgcaagagccataatgaataatagcgctgcaaggatgtaggccatatgggttaaacctaacatttatatattctccttaaaacctactactgctgcttacggaacattgcaagcatacgacgagttaccgcgaaaccaccaaagatattgatagatactagtaacacaccgatgaaagctaaaataccaattacaattgaattggtgatctgaagcattgcacctacaatcacgataccagagatagcgttagtaactgacatcaatggagtgtgtagtgaatgagatacgttccaaactacatagtaaccaactacgcaagctaatacgaatacggtgaagtgaggtaagaacttctctggagcgtatgcgcccattagcatgaatagaacaacaagacctactaaagcgccaatcttgatagcaggatttgccttctttggctctacctttgcaggagcttctgctttcttctgctgaggagctgctgatactgaaatctttggaggtgggaaagtaacctcaccatccttagtaacagtcatgttgcgtaatacaacatcttcaaagtcaacattgatgttgccatctttgttcttgcaaagaagtttagctagatttactaagttagttgagtatagctgtgaagattgagcaggaagacgagctgctagatcagtataaccaatcatctttacgccgttttcagtggtgataacctcacctgctacggtgccttcacagttaccgccagttgcagctgctagatcaacgataacagagccagccttcattgatgcaaccatttccttagtaattaggcgaggtgccttcttgccaggaattgcagcagtggtaatgataatatcaacttctttacactgcttagcaaataactccatctcagctttgatgaactcgtctgacattaccttagcgtaaccgtctgatgagccaccttcttcattcttgaagtctaagcgtaagaactcaccgcccattgacttaatctgatctgctacttctaaacgagtatcaaatgcacgaacaatagcgcctagtgagtgagcggtaccaattgcagcaagacctgcaacaccagcaccgataaccataaccttagctggaggtactttacctgcagcagttacctgacctgtaaagaagcgaccaaatgcgtgagcagcttcaattacagcacggtaaccagaaatattagcagttgatgataaagcatctagagactgagcacgtgaaatacgtggcaccatgtccatagccatgcaagtaactttcttagcatttagcttatcaactaactcttggttttgagcaggacgaatgaaacttacaagagtctggccttcatgagttaattcgatctcagcgtcagttggagcatttagtttgaaaatgatatcagctttccaagcttccttctcatttacaaccttagcgccagctgcctcgtaagaagcatcgtcaaaacttgctagcgcaccagcaccgctttgaacagctacgtcaaagcctaattttaaaagcttagcaacggtatcaggagttgcagcaactcttgtttcacctttcaagctctctttaggaatacctattaacattgcatttccttgtttgtagtagtcgcacaatgcgaccttagaatttagtatagtttcaattcccctgctaaggcttgagccttgagaaaaggatctactccctcagaaaatcaaagacttctgtcttagtatctttcatattataggttcttatttgaattgcatatgacaaaatagtaaaaaatgagccttaacaaggtatttttcgtataatatactgatatgttattgatttataaaggattattaaattttctaggtataagttttattaaacgcattgcattgatttagtgcaatgaatttcatgtaaccgtttaaattatctagatttttttgaatttctagataaaaaaggacttttttcaaggaaggtttaaatttgtggagtgtatctagaatttacaaaatagttaaatttaaagaaattaaatcgcctcttgtaagactagttaatggcatttagcatcttttcatcgaagttaattaaagacatggtgtgagcgtcttcgcctttctccccaggatgaagtggagagtagtattctttacgtaatcctactttttcaaagccaaacttttcatataaattgatagcaataatattacttacccttacctcaagataacattcttcaacgccaatcttaattgcctctaataaggtgtcttttaaaagcttagtacctagctttttaccttgataatcaggatccacgccaatagttaaaatatctgttgtaaatttggtgttatagatgacagaaaaacctatcagtttctcatgcacctcatcaccttgggtgtttttatcaaacaatccgacaattaaatagctgtcagcaaagcactctttaattgcatcctctggccatggatctttatggcagcgaatttcaactttgatcattgaagggatcaagttaaattcagaggtagtgactactcttgtagtaaagctttgtgccatcttatttaagcctatctccaaattcttgttttaaatcttgccaaattgcttttttaccagcttgtagaatatacactgtaccttgagttactaaatcagttttatctaaaagtaaaacatctgatggtagataatgcacgctgtcatcatagtctttaacatcaagtccctttgagacaagaaagtttactaagccctctagataatcaacatcagatttcttattgataaagacatcagctcttaactttcttaatttataaggaagcgacatccacttaggaccagttggagctacagcttgagtgttgacctcaataccatcaactacggcattttgcgcacttggtacaaacttgtgctcatcaatatgctgtggctgtacttgaggtactactttagggctttcttcttgagacttctcttgcaaattagctttaagctctactttagcaagagttgttacatcaggctgtagattatcttgagaggcaggctcttctgttatgtcttgtaccttatcttgtggcttattttgtagtagaggctcagtgctattagaaataggtgaagctgtttgtaggttctgtttttcctgatcttgtagagaagtatctttacttatagcttcagagtgtgatacctcagcattattaactgcttcaacatgaggtaatgtcgctacagtattttcagttgaagtagctacttgagttgcaacttcttgattgttttgattatttacaacagggcttacttgattagaaggttgtacttgaacttgaaatgtttgctcatttgctttagcaaataaaggaaccacaccttgctttaattcccaagtcacaacttttgatttaaaaaccataatctatctttagttttaaggcacacgaaaagatacaacgatcttacaagatcttgcattgactttcaaaattgattgggagattttgagaacttaagattagtggcaggggcagtaagactcgaactcacaaccgtcggttttggagaccgctgttctaccattagaactatgcccctgcagaacgcgaaccattatctacaaaaagcccctacttgtaaagtctttttttgaaaaaagataattttttgagttaaatcacaatattttttgatttttaaatgcgcaataagtcgcattgagattgtactcaaagcattattgacaataatttgtgataggtaccgttttttgaaataaaactattgtgttagtatgttgtactatctttacattgcacataaaataacaagatataaaaaatcgcaccaaataataacaataataataaattgggaaatatcagactatgctagaaacacctcaaaaagtacgtcgtaaagatactcgtggcgacgagattgcccaaattgcctatgaaatcttctgtgaaaaaggtttcgatgctacaagctacggtgacattgctgctcgcggacagatggcccgctctactatctacttgtactataagaacaagatggatgtaattcgtgctgctattcgtgagcatgtaagacgcattggcgcaaatttgcatgtatcagaaattgaaaagctacctaagttttcagatagactaagtatggtcattgaaaatatcaatgtagttaacaatgataagaacattgcaagatttgaattagccttaattaagatcgctgctgaaaatgtagagattgctaatatctggaaagaagaagttttctctaccattcacgatatgtgggagaaggtttgcggtgatgttgcattatcagactatgataagaagtattatttaactttactttatgcaacctatacttgcacctctgttatgcaactttgctatggcgatgatgcacctacactttgctttagagatgcaatgcgcattacttgcaaccatattaagcaagatctaaaagaaacagatcaaaaataagctcatttaaaaggattaagcaatgaataaggctcctgtaaatgacaaaattcgtgagcaaaagatgcgagaaattgcagaagttgcttacgatatattctgtgaaaaaggctttgaagcaacaaagttttctgatattgcagtaagacttgagattgctcgctctacgatttatctttactacaagaataagctagagctcattcgtgcagccatgaaagtgcaatgctctaagaccttcaaagttaatatggataagatcttaaaagaaaagtcctttatcaaaagacttaaaatgttaagtgatgatgtagataagttagtaaactcacctaacattggtaagtttgcttcaacttggttgtccttagcttcagttgatccagagattgcaagaattggtcgtgaggaagtaatcgataggatcaagcaagattggtatgagatttacaaagatattcctctaactgaagagcaaaagctatactattacaccatgcattattgtatctatacaaatagaatgttcttaaatatgacttacaaggatgaacagccatttttaactttcaagcagatgtatgatacgatggtagagcacatcgaaagagatttaaaagagcaagagcaaaagaatggataaaagatacaaggttgcagttgtagtatttttgttagcagctgtaacttgtattgccattttaagcctatcccaccgctctcttggagatgacaacaaagcctacggcaatgtcgatattagacaaagtaatttaagctttgagcgccctggaaaaatccaatctcttttagtcgatgaaggcgataaagttgctaaaggagagcttttagcaactttagatacccaagatttagactatcaaattcaaatcaaacaatctcaatgtaatgaggctaaggcaagcttagattcgattactaatggctatcgcattgaagacatcgaaaaagctaaagctgttgttgatagacttactaataactttgaactttctcaaaagacctatcaaagatatctcaccttatttaagaaaaagtccgtctcggttcaagataaagatcaagcctattacactatgacacaggttaaagcgcagcttgacgaggcacaaagccaacttgaaatgctaaagcgtggtaaccgtgttgaagatattcaaaaagcaggcgctgcctataaaacctgtcaaatctcgcttgattatctaaactatcaaaagcatgaccaaagcgtaattaaagctccttttgatggaatagtaagaagtagatctgtagagataggtgacatggcatctcctagcactactgtgtttgaattatctatgaccgatttaaaacgagttaggatctacttaactgaagagcaactaccaaaagtaaagctaggatcaaaggtcatcatatctaatgctaatcaagatacagtcgagggcactgtaggctatatctctgatactgcaatgttcactccaaagaccgtacaaactgaagagctacgcgcttcattagtctatgaagtaagagttgatgtcaaagatctaaataatattctgcgcttaggtcaaagcgtcactgccacctttaattaaagctataaggtttgcgtatggacaatttaattaccatccaaaaccttttaaaaagctacaaagtaaaaggtaaaaagcccctagtagtctttgataactttaatcttgaaattgataaatctaagcacttaatctgtttaactggccctgatggtgccggtaaatctacgcttttaaaactcttatctggtgttttgaaaaaagatagtggtaagcttttacttgataatctctctcctagtacctcagatttaaatttcaatcaaaatataggttacatgtcgcagactttaggcttatacactgagcttagtgtttgggataatttagtgctgttctcatctttaaaaggacttgatactaagagcaatcaaagctatttagaagagttacttgcaaaggttgatttactgaggtttaaagatagagagtttggcgcgctctcaggtggcatgaaacaaaagctaggtcttatttgcacgattgcagctaaacctaagattttaattttagatgagcccaccgtaggtgttgatccgatctcgcgcatggacttatggcaggtagtaaatgattatttaaaaactcatgattgctactgtattttctcaactgcctatttagaagaagcgcaaaaagcagatctttgcctaatgcttgaagatggcaagattaagcttatgggtaaaagtgaagagcttatctcaaaggttcgtgacttaacctataccttaaagctaagtgatgatgactatgacacctatttaaaagatctaatgggattaaccgctcgtcatcatgaaagatctcctatgctagatgtctgcccacgccttggcaaaatcgatattcttgtaaaaagcacagaggacactgacaaagttcttccctttctagaaaacgctctgcatatcaaggcacagattaaaaaacgcaccgccattttagaagatgcttatatctatgagtctttagcccatagtcaatttgtcaaagacggtaatgaagataagccaacagactttgatcaagataaggaagtggtagttgtcgataagattaaaaagacttttggtaattttaccgcagttgaaagctcaagttttaaagttcaccaaggcgagatctttggtcttctaggacctaatggagcaggtaaaaccactacctttagaatgatctgcgcgcttttaacgccaagtgaaggtcaggtaacagttaatggctataaccttaaaaaggctaaagcagatgcgcgctcttgtataggttatgtttcacaaaagttctctttatacagaaagcttaatgtctatcaaaacttagaatactttggactaagctatggactaaagcctcaaaaattaaaaactcgcattcaagaattattagaagagtttcatcttcacaaatttgagaaaactaaaagtgaagatctaccttttggcgtgcaaagacaattatctatggcctgcgcgctcattcataaacctaagatattattcttagatgaagctacctcgggtgctgatcctctggcacgtcgcttattttgggatagggttgtcaatttatcaaaaagcggtacttgtgtaattgtcaccacgcactttatggaagaggcagagtattgtgacaatttcttaattcaagataggggcaagattttagttttaggaaagcccaaagatatctgccgtgatgaaaagacacatgagcgcattagcattgagaaaacctttatcaataaagttgaagagtttagacagagtctaaccaagggaggtactaatgtttaagtatttagtaccacttttgaaaaaagaggtgttgcagactttaaaagataagtcagtgtttatgttggtgttcttactgcctataattttggtcatcatctatggcagtgccattagaatggagatcaagcctgtaaagcttggtcttgtaagcactaacgtcagcgtccttgaaagagaaattactcaagaatttcttggatctgattattatgagctaaccgtagttcctacatttatagaaggacaaaagctcttagacgataacaaggttaaagccctagtctatgttcctcatgatttaagcacccaaattaaagtaaaaaaagcgcagatcatgatttatctaaacggcgtagagtctcaacttgctgcaatatctgaagggtacatcaaacagacactagctgcagttttac

SEQ ID NO: 2701 - DNA, 11633 bp, synthetic construct
  source 1..11633: mol_type = other DNA
  misc_feature 1..11633: note = Synthetic
agccgacgatcacaccctggtggaacaggagcaaattgttctggagggctgtgagtcctggcagacgaaaaccgccgaagctttcgccccggcggtttctttcagtccagcgatctgtcagaggccgcggcccctcattcccactcgatcgttccaggcggcttcgaggtcacgtcataggtcacccggttgatgcccttcacctcgttgatgatcctgtgcgccacatggctcaggaaggcgtggtcgaaggggtagctgtcggcggtcatgccgtcggtggaggtgacggcgcgcagcgcgcagacattgtcgtaggtgcggccgtcgcccatcacgcccaccgagcggaccggcagcagcaccgcgaaggcctgccagatcgcgtcgtaaaggccggcattgcggatctcttccagatagatccggtcggccttgcgcaggatggcgaggcggtcttcggccacggcgcccagcacgcggatggcgaggcccggtcccgggaagggatggcggccgacaaagccgtcgggcaggcccagttcgcggccgaggtcgcggacctcgtccttgaacagttcacgcagcggctcgacgagcttcatgttcatgcgctcgggcaggccgccgacattgtgatgcgacttgatggtcacgctcgggccgccggtgaacgagaccgattcgatcacgtcgggatagagcgtgccctgggccaggaacgaggcgccgccgatcttcttcgcttccgcctcgaacacgtcgatgaaggtcgcgccgatgatcttgcgcttgcgctcggggtcatccacgcccgccagcttttcaaggaagagcggaccggcatcgacatggaccagcgggatgttgaaggcgccgcggaacaggtcgaccacctgttcggcctcgcccgagcgcagcaggccggtgtcgacgaagacgcaggtcagctggtcgccgatcgcctcgtggatcagcttggccgcaaccgcgctgtcgacgccgcccgacaggccgcagatcacccgctcgcggcccacctgttcgcggatgcgcgcgatcgcgctctcgcggaaggcggccatggtccagtcgccggggcagccgcaaatgtcgcggacgaaatgaccgatcagcttcgccccatcgggggtgtgcaccacctcggggtggaactgcacgccgaagaagcggcgggtatcgtcggcgatggcggcgaagggcgcgccgtccgaggtgccgactacgcggaagccctcgggcagcgcggtcacgcggtcgccatggctcatccacacctgatggcgttcgcccggcgcccagacgctgtcgaacagcgggcaggcatcgcggacatcgacataggcgcggccgaactcgcggtgatcatcggcctccacccggccgcccagctgatcgaccatggtctgctgaccatagcagatgccgagcaccggcacgcccaggcggaagaccacgtccggcgcgcgcggcgtcgccgcctcggtcaccgatgcggggccgcccgacaggatcacgcctgcgggtgcgaaagcctcaatccacgcggaatcgacgctgaacggcttgatttcggaatagacccccgcctcgcgcacacggcgcgcgatcagctgcgtcacctggctgccgaagtcgaggatcaggatgcggtcggtcatcgcgcctcctgagggtcggggcggtgccgccggaccatcgcgccggccaccgcccggtggagcggagagaaccacgaccgggcgggtttggcaagggcgcagacggtgcgggcggcccatgcgatcagccgcggaccatctcgctctcctcgtcgcccgcgcgatccgtccgctctgcccgggtaaccgcccggcgggccatgcgcgcatgctcccacgagatcatcagcacgctggcgagcaccaccacaaagccggccagatgcaccatgcggaacggctctcccagcaggatgtaggacagcaccagtgccgacattggcatcagcgccatgaacccagccgccacggccccctgcacccgggcgagcccggcataccagagccagttgcccatggcgagggtgccggcaccgtaccagacggccgccgcccaggcctcgccccccaccgcgcgcggggtgaaatcgggcagttgccagagcgccagcggcacgaagacgatcagcgccatccaggccgacagggccgcgacgagcaccggatccacccgctgcgctgccagcttgccgagcagggtataggcgacctggcagcacacggcggcgaagaccagcagcatgccgatccagcccggcccgccactaccgccattcccgctctggccgccctggccgccaccaccggccccctcgcccgcgacgccgccggcgcccagctgcagcaccaggacgcccgccaccgccagcgccacggcaaccaccgtccgccagctcacccgatccttcaacaccagaaccgaggcgagcgccgtcaccgcgggcgtggtgctcatcaccaccgagccttcgatccctgagaccatctgcatgccgtagagcatgaagacggtaaagccgaccatgccgaccgccgaaatgaagacgatcagccaccagctccgccggtcgatcgcggccagcgccctgcgccgccggataatcaccggcagcagcagcagggcgccgatcaccgcccgcaggctgccggccacgaagaccggcattgccgcggtcacgatccgggcgaccggcgtcgccgagccgaacaggaccatcgccagggcgagttccgccagggcacgccgcgtgctgcccgatgcctcgtcaccttgcagatcggcggcgcgcacggccgccttccggccggttacctccgtcataagacctcctcgattgccgataccgggagtggtatcgggtcgggagcaacgaacggcgaaaccgagtgttccttgcggtcgatcgactacggtcgtacccgctcaggctaccccggcagcggcggccggggtgccgagaaaacctgcaagcacggcgttgaaaacctccggcgcctcgatgaacgggaaatgcgccccgccatcggcttcgtcgaggatcaccagttcggcctcgggcaggcggtcgcggatccagatctgcgagcggatgtcgacatggctgacacggccaccgatcaccagcaccggaacgtcgaaccgcgcgaacacatcgcgccagtcgatcgaacaatgatccgcgaacagcgcggcgatggtccgggcctcgggtcgaaggttctcgtccagcaggaagcgccgcagctccgacgggatcccgggcgtgatcatgccgtccagaaaggcctcccgcgccgccgcactgtcggggcccgcaagttggctcgcgatgccgatcatggtcgcggcatcgaacagggcgccggcatcggccgcctcgtcgtcggtcatgccggcctgacgcatcaccgaggcgggctcgtcgacgaagacgcagcggtcgatccgcccggtgccgaaaagatcgacataggcccagagcaccgacgcccccatcgaccagcccagaacggtcgcccgccggatgtcttcccgctcgatcagctcggccagatcggccgcaaaacggtagatgcgatgaccgtgggcgcagtcgggggatgtgccatgcccacggaaatcgggcgcgatcacccgccgggtgccggcgaactccgcgatctgatgccggaacatcgccgccgactgcgcccagccatgcagcaggatcagcacctcgccggccccctcgtcgacatagcggatggtagcgccatccgaggtgagcatggatttgtgcatggacgctcccccttctacggccgcacccggtttgcgggcgtcattcttcggatacagccgatggtaggcgccggaggaccaggcggcaagttgcgcagccgcgtgcctgaaacactgaaccccctccgcaagcgaagggggttccgggcagtcgcgacgggatgcccagcccgcacggaatgtcgcattcgttttgcctgcggcaggcgaccgttccggggtttgctacacgcaatgatcatgttcaaacttggatgcatgttcaacctgtttttggaacgccatccatgcctctgccatccgcacctttgattttcggtcttgatctcggcacgtcctcggtcggcagcgccgtgctgcggctgcacgaggatgataccccgccgacaatcctccgcctgggggtccggatcttcccgagcggccgcgatccggacagtggtgaacccctgaatgctcaacgccgccgcgcacgtttgatgcgccgccagctgcgccgcaaacgtcatcggcgacaggatgtgacccgcatcctgcacgaggcggggctgctgccggcgttcggaacagccgactggcatgtattgatgacgaaagccgatccctatcagcttcgggcccgagctccggaagacgcgctcccaccgcacgaagccgggcgggctctgtatcacctgctcaagagaagcggcttccgatcccttcgcaagccgatgtcggaagacaaggaggatgaagaggggccgatcaagaaggaaattcttgagcattcccagcgcctcggcaagcggaccctcggtcagtatcttgtggatctgcccaaacggcgcggcctgcatctctcccatgacatggtgctggccgagttcgatgcaatctggcaacggcagtccgaggctgccccgtccgttttcactgacgagctgcgggccaacctgacgacagcggcctttgcccgccggccggtcttctggcgactggatacctatgggagctgccgcttcgtgcccggggcccctctctgcgccaaaggatcatggcaggggcaggactatgtgttgctgcagacggtaaacagtctgcggttattcggcggcaatgaacggccgctcacacccgatgaacgacaccgcgtcatcgcgatgctgcgcagccaggagagcgcgaccttcggcaagcttcgcagcctgctgaagctgggtcgggatgtacgattcaatctcgaagccggtggtcgcgacaagctggccggcaacgccgtcggcgcccggctgacgaagcttctcggcaaggactggccagaccttgcggcagctccggacatccgcgaaaccctccatgaccgtttgcatgccatccattatcggcgggtcggcaaccaccggatcgaactgcgcggccccgacgaacaggctcatgagcgcgccgccttcatcgatcatgcgacatcgacctggcggctcccgcccgacacggccgcagccctggccgatctcgatctgcccgcaggctggctgcggctgtcacgggaagcggtcggccggctgctgccggcgctggagacgggtctgcgctatgacgaggcggtgcggcaggttttcggcataggccatcaggaaggcccccggtccgcccgccgtgaccggctcgattccgaccatcgcaatcttcgcaacatccgcaacccgacggtggtgcgggcgctcaacgagatgcgtaaggtcgtcaacaatctgatcgatgcacatggccggccggacgtgatccgcgtcgagctgtcccgcgatctcaagctgccacccgccgagcgcgcggaaatcgataagcgtaaccgaaagcgcgaacgggaacgcaaggcggcagagaccgatcttcggaccaagggcgtcgcggccacccccgaagcgatcgaccgctggctgttgtggaaggaatgcaaggagacctgcccctataccggcgaaaagatctcgttcgcagatcttttccacgccggccgcttcgaggtcgagcacatcatcccccgctcccgcagcctggacgacagccttgccaacaaaacgctgtgtgagcgcagcgccaaccagcgcaagggcaaccgcacgcccttcgaagccttcggccccgatgcaaacggtggcaatgcagccgtctgggaggcgaccacggcacgggtcatgtctctgctgccggtggcgaaggcgcggaaatttctcagaacctccgcccccgaagccgatgatgccttcgtcgaacgggaacttcgcgatacctcgtacatctcacgtcttgcccgggaccgcctgaaaaccctgggagacgatgtccgtgtggaaaccaccaatggccgggtaaccggtcagctccggcggctttggaatctgcgcgccattctgcccgaaccgcaggctgcgacatccggccgcaatgcccgcgacaagaaccgcgccgaccaccgccaccatgcggtcgatgccctggtcaccgccctggtgacacccgcccatgtcaagcgcctgtcggaccactaccggaaggagaggttgcatgaactccacaacctgcccctgccctggccggatatccgcagggacgccggagcgaaactcgcccggattgtggtttcacatcgcagcaatcgtaagatctctggcgaactacatgaagcgaagcggctcggcatcaccgatgtcgtcacccggcgaagcggtattgactacaccgacttcgtcatccgtattccagtcgccgacataacggcgaaaaacctcgatgccgttgtcgatgacggtgtcagagcagccctcaaccgttttcttaccgcccatggcggcagcatgccgaaagtcatgccaccctatcctaccctgccagacggtaacgcgctgcgtgagatccgtcgcgtgcgcatccgcaagcccctgcgacgcgaactggtcgtcgcggtggggcacgacggcggcatcagcttcgtggaggcaggaaaaaatcatcatcttgccctctacggccatccggatgaaccaggcgtcgttatcgccgtccaactcattgaagcggcacggcggctgtcgcgcggcgaagcgatcatccggccgtgggatgatgaaggccggccgctggtgatgagcctctgcaagggcgacatgctgatgatgccggaaccggcgccggatggctcaccagatatccgggtcgtcacaggcttcaaagccaacggtcaggtggttcttcagcatcatcgtgatgccattggcacatccgctacctatccgcgctttgcgatccttgcccgcaagggggctcagaagatctccgtcgatccgatcggccggatccgcccggccggaggctgacccatgctgagacggaccatcgccatctcctccggccctacccggctgtcggttgcccaccgccaactggtcatcgatcgtcaggatcagcctcgcgccacggtgccgatcgaggatatcggtaccgtggtggtcgaccatccggcggtcacctacacccacgacgtgctggtctcgctggccgacgccggcgccgggctggtggtctgcggccgggggcatctgccggtggcgatgctggtcgccaccgtcggccacggcacccagaccgcccggcacatcgtccaggtcgacgccacgccggggctgaaacgccggctatggggccggatcatccggaccaagattctgcttcaggcagacgtcgcacagcaggccaccgggcaggatgacgggctggccccgcttgcggcccgggtgaagcccggcgatcccgagaacctcgaagcccaggcagcccagcgctatttcaaggcggtgttcggtcagggtttcaggcgtcgtcgcgacggtgccacgcccaatgatctgctgaattacggttacgccatcatgcgatcatcggtggcgcgggccgtggtggcctcgggcctcgccccggcactcggcctgcatcatcgccaccgcaacaaccccttctgccttgcagacgacctgatcgaacccttccgaccgatgatcgaccgggtggtgttggatctctgccgggctgcgggagaggtgccggaaatcgaccggcggaccaaggaagccctgctgtccgtgctccgccacggcgtcgtactctccgacgggcgccgcacgcctgtggacctggccatccggcatgccgccgcgtcgctcggccgctcgttcgaagagcgcaaggatctgctcatcctgcccgccagcctccccgacccggatctcgacctcacggcccaggcggaggaacccgatgccccctgacgatcccgaccccgtccggccgcaaccggcctggcccagtggatggaagaccgtgtggctgctctcgctcttcgacctgccgaccgagaccaaggcgcagaggcgggcctatgcccgcttccgcaaggatctgctcaacgacggcttcaccatgatgcagtactcggtctatcagcgccattgtgccagcccggagaatgccgaactgcatctccagcgcatcgccgccgtgctgcccccggaaggcgaggtccggttcctcgtcatcaccgacaagcagttcggtcgcatcagaaccttctggggatcccggcgcaaacccgcagagaaaaccccggcccagctggaatttttctagccgaaccggggattctcatcggtatatcaggcagatgctccggggctagtgtagcaaacccgggaacggccgcgaaccgcagccccgaggaagcagacatcgtgcgccgcatcagtgtagcaaacccgggaacggccgcgaaccgcagcctctcttgagagggactgtaggtgtatgcgagtgtagcaaacccgggaacggccgcgaaccgcagcggcgccggctcagtcctgcgctcgcgcgccagtgtagcaaacccgggaacggccgcgaaccgcagccggactcaatgcaggagcggaggacaagaaagtgtagcaaacccgggaacggccgcgaaccgcagcgcaaaggcgcagaggctgaaggcccgcggcagtgtagcaaacccgggaacggccgcgaaccgcagctggcgcccggtcgatccggtcacggtcaagagtgtagcaaacccgggaacggccgcgaaccgcagcagggggaccgcctgcaagaagttgactgcaagtgtagcaaacccgggaacggccgcgaaccgcagccacgcgggccagatccttcgggaatgcgacagtgtagcaaacccgggaacggccgcgaaccgcagccgttcacgccacccggtccttcccagccggagtgtagcaaacccgggaacggccgcgaaccgcagcgacgccaaggctgcggcgatagctcgcccgagtgtagcaaacccgggaacggccgcgaaccgcagcagcgacgcgatatcgtcgtacagctccggcagtgtagcaaacccgggaacggccgcgaaccgcagcaacggggccagcgccgccgcccccggcgcgagtgtagcaaacccgggaacggccgcgaaccgcagctgccgaccctgtcggacgacgacgacgccgagtgtagcaaacccgggaacggccgcgaaccgcagccggtcgccgacatgtcgcgcgattgcaccaagtgtagcaaacccgggaacggccgcgaaccgcagctctttcatccacgggctcgtccatgaagcaaatgtagcacgcgtgcggcgagcgtggatcttcttccttatcgccgccggaccgacgtcccgaccctcactgttccacgacgcacaggatttcatgccggccgtcgggcaggcgtcggcggaccagccggtcggcgaggcgtgtcatcagcgccagcacgacgccgttcatcactccgtcttcgtcgacatgatcctcgaggctcggctgtggtccgggttcgagcgccgttcccgtccagctcagcgacacttccaggcggtattcatccatgcgcgtggtcaccgcgaccgggcttgcgccggcgagcgccggggctgcatggctgaattcgtcggccagctggacgagccgcagcatggcatcggcgcgcacgccgccggcctcgccgctttcgcgcagaaaatcacgcagcggcgcgaagccgtcggcgggccgccaggcgaattgccgggtcgtccggctgccgatccgcagggccgcattcaacaccagcgcggtcagcaggccgagcaccagggaggaggtcaccaccggctgcaagatctcgggcagattgtcggcatagaagccgggcatctgatcgaacgagacccagagcagcaggccgatgccgatgacgagggtccgccgggcgtccagcatgcgctggcccaggatggagatccccgccaggaccacgaagcacgaggcaaagagaagcgccgcccccagcacgccgggcggaatcgccagaacgaaggtggcggagccgggcaggaaggcgagcagcacccagcccgcccccgcggcgacggcaacccggcgcgcccgaatgccggtgacgaccgaaaggccgacgctggcggaataggtattggttccaagtgtcccgatcagcccggcaaacacgctgccgatgccgtcggccagaacgccggcttcgatattgggatagtcgggccgcttccagtcgcgatccccggccttctggctggcgacgatgtcaccgaacgccctgagcgtacaggcgagcgcaccgaccagaaagcccggcagggccgtgatctcgaaatcgggcacgaccagcggccagcgaatgacctcaaacggggccaccccgtcaaccagcggcagccccatgatccagctggcgccgaaataggccatggttccgacagcgagcccgatcagcacggccagattgcggagacgtgcgccgccccagaccgacaaccccaccatcaccgccagccccagaaccgccgtgccggtgccgcgcggttcaagcggttgcggccggccgatcccggtcatcagcttgaacgcaacgatgcccagaatgatgccgatcatgaacaccaccaggcccacgatctcgatcgagagatagggccgcagacggccgatcaggcggctgagcacgatctgggcgaggcccgcggcaatcgtgagcccggcaaccgcttcgagcccgccgacgcgcgccgcctgaagcgccggcggcagataggcggccgcgaacaccgccggcagcagaaagccgctgccgatcccggtccgcccgaacagcttcccgccccaggcctggatcagggtcgccacccccatcgccagcatgcagagctgcatgtaatggccctgcatcgcggcatcggcccccgccgcccgggcgaccagcagcggaaaaaccagcgtgacggccatcagccccatatgctgggcagcggcggccaggaccactggcagcggcggttttgcaagccggtcatagaccatgggaccggccctcccccgcttccgcccgccgcgcggcttcggttgcccgcgaggtttcgtttgcccaccgccggccatcccggtttcgttgccggatccggaccatttgccaccccctgatcattttttaccagaagatcgggagtcggcacggctggcaagccccggaagaccgccgggcaacggatgtcgaggggtgtcggcgcgctattgttcttccttgtcgctgccggggatgaatctggacaggatccggaccagggtcacgatcaccacccccagccccacgccgacggcaaccagtcgcatctgccccgcgcccgaggcaatgcc

SEQ ID NO: 2702 - DNA, 23294 bp, synthetic construct
  misc_feature 1..23294: note = Synthetic
  source 1..23294: mol_type = other DNA
acgcgggcgcgggcgatgtaggcggcgggaccgaagtgttcgctgtaattcacgccgtggtaagacacgtcgggcgtggtcagcactttgaagcggtcgcctttggtccaatcgaatttgccgccatcgataatcgcgccgccgatgctggtgccgtggccgccgatgtatttagtgagggattccaccacgatgtcggcaccgagttcaatcgggcggcacagggcgggcgaggcgacggtgttgtccaccaccagcggcaagccttgcgcgtgggtggcttcggcaaaggcgcgcaggtcaaccacgttgatggcggggttgccgatgctttcgcagtaaacgagcttggtgcgcgcatcggttttggcggcgatttcttcgggtttggccgggtcgataaagcgtacttcgatgccttgcttgggcagggtgtgggcaaacaggttgaaggtgccgccgtagagggttttggtggcgatgatgttgtcgcccgcctcggcgatggtttgaatggcgtaggtaatcgccgccatgccgctggccacgcacaatgcggcgatgccgccttcgatggcggccaaacgctcttccaaaacggcggtggtggggttcatgatgcgggtgtagatgttgccggccacgttgaggttaaacaaatcggcgccgtattgggtgttgtcaaacgcgtagctggtggtttgataaatcggcacggctgcggctttggtggtgggttcgggtttgtagccgacgtgaatggcttgggtttcgagtttcatatttgctccgttgtattgtgcgagtgcataaagccgctattgtacatgatgaaaaatagttaaggccgtctgaaagcgagcctgagaattttgctaaaacaatgcggcaaatccgtttcacaatagcatgtgcgtcatgcttgagcgtcacatctgtcacatttgtcttgtcacaccggcctgatgttactgtcacatcgggccgtctgaacaatccaacaaataaatctttccataaaaatcatctggttatctttaaattttcagacaggcacatgaattgctttgcttattttaaaaacaagatctgcaaggagaaaaaccatgtctgccaccgttcgcgtcggcattattgccaaccccgtttccgcccgcgatatacgccgcattatttcccatgcgtcggggctgccgctgggcgagcgtgtgaatatgttggtccgcattttgtctgcgctggcggcgtgcggtgtggacgaggtgctgctgatgccggaaatggaaggcttgcgcatgctgctggaacggcggctgctggccgtggtcagcgcgctggaatatccgctgccgcgcctgcgctggctggatatggcggtgaacaacaacaccggcgattcggtggcagcggccgagatgatgcgtgaagaaggtgtgtcggcgattttggtgttgggcggcgacggtacgcaccgtgcggtggtgaaaggctgcggcgacattcccatcgcgggcatttccaccggcaccaacaatgcgtttccgccgatgcgcgaagtaaccatcacggcgtgggcggtgggcttgtatgcggttgaaaacgtgccgcgcgaacattctctgcgcgccaataaatgcctgcatatccgcaaatacgacgcggcaggaaaggaaatactgcatgaaattgcgctgattgacgcggctgttttgaacgagggcattctgggttcgaaagccatcagcgaaacggatacgctgcgcacgtttatcactacgcaggcttcggttgaggcggtggggctgtcggctgtggcggcggctttggagccggtcggccgctatgaagccggcggattgctggtggagctggtgccgtcttacggttcgcatgcgccggcggataaagcattttccgttcaggccgtgctcacgccgggcatgatcgaatacatcaacatcggttcttaccgccgctttttcgagggcgacgaataccgcctgagcgggcaaaccggcttggtggccttggacggcgaacgggaaatcgtgttccgcgaagaggaaagcattgccatcactttgcaggaaggcgcgttttacacgttggatgtgcctgcggtattgcaatttgtcaacgcgcaaaggcgcggccaacggtaaataaatgctttcagacaggcatagcaggccgtctgaaacagtatattttaaaacagtcaaacggcgggcaaggatgcccgccctacggcacacaaccgcacaccccataaaacaaaaccaaaaaggccgtctgaaaacgcaatatgtagggcgggcatccctgcccgccgccctaaaacccgttgaataaggagaaacccaatgagcatcaaactgcctttagaaaaaaaccaactgctcgaagtctaccgccgcatgaaaacgatacgcgaatttgaagagcggttgcatatcgacttctcgcgcggcgacattcccggcttcgtacatctttacgcaggcgaagaagccaccggcgtgggcgtgattttccacttgaacgacaacgaccacatcgccagcacccaccgcgggcacggccactgcatcgccaaaggtgtggacgtgatcggcatgatgaaagaaatctacggcaagcgcgacggtgtgtgccgcggcaaaggcggctcgatgcacatcgccgatttgtcaaaaggcatgatgggggcgaacggcattgtcggggcgggcgcgccgctggcctgcggtgctgcgttggcagccaaatttcagggcaaaggcggcgtggccatcaccttctgcggcgacggcgcggccaaccaaggcaccgtgttggaaagcctgaacttagcggccatttggaatctgccggtgatttttgtgattgaaaacaacggctacgccgaatccaccgcacgcgattacggcaccgccgccaacagcttcgccgaccgcggcatcggtttcggcatccccggcgtggtagtggacggcaacgactttttcgccgtgtacgaagctgccggcgaagtgatccggcgcgcccgcaacggcggcggcccggcattgctcgaatgcaaaaccaaccgtttcttcggccactttgaaggcgacgcgcaaacctaccgcccgaaaggcgaagtcgacaacctgcgcgcccaccacgactgcctgaaaatcttccgccaacgcgttaccgaagccggcgtgattaccgatgccgaattggacgccatcgacaaagaagtgctcgagttaatcgaacgctcggtacaggaagctaaagccgcgccggtgccgacgccggaagatttgctgactgacgtttatgtaagctattaaaaaccaaaaaacaggagaaacagatcatgtcccgccaattaaccatgaaattagcgcttaacgaagccatcgatcaggaaatgagccgcgatcccaccgtgattatgatgggtgaagacatcatcggcggcgcaggcgccagcggcgaacgcgacgcttggggcggcgtactcggcctctccaaagggctgtatgccaaacacggcgaccgcctgatggacacgccgctttccgaagccgcctacataggcgcggccatcggcgccgccacttgcggcctacgtccgattgccgaattgatgtttatcgactttatgggcgtgtgtttcgaccaaattctcaaccaagccgccaagttccgctatatgttcggcggcaaagcagaaacccccgtcgttatccgcgcgatggtcggcggcggcttcagcgcagcggcgcagcacagccaaatgctcacgcccatgtttgcccatgtgccgggcttgaaagtggtgtgcccgtccaatccttatgacgccaaaggcttgctggttcaggccattcgcgacaacgaccccgtgattttctgcgaacacaaaagcctgtacggcgtaaaaggcgacgtgccggaagagctgtataccctccccttcggccaagccaacgtcgtgcgcgagggcaaagatgccaccatcgtcgcctacggcatgatggttcagcgcagcatggatgccgccaaactgttggaaaaagaaggcattgaagtcgaaatcatcgacctgcgtaccctctctccgctcgacatcgacaccgtgttgaattccgtagaaaaaaccggccgcttggtcgtggtggacgaagccagcccgcgctgcaacatcgccaccgacatttccgcccaagtatgccagcacatgttcggcgcgctcaaagcaggcatccgaatggtgtcgccgccgcacacgcccgtgccgttctccaacgtattggaaaaactgtatctgcccggcggcaaacaaatcgccgacgccgtgcgcaaaaccttaggtaaggttgaggccgtctgaaaaccatgatcaaagcaacggcgggcaaacatgcccgccctgccgaagccatacctgaacccgctgaaatcttgttcagacggcatttaccataaacaaaggagacaaccatgagtaacatcaaacccgtcatcatccccaaatggggtctgaccatggaagaaggcaccatcaacgaatggctgattgaagtcggcacacccgtgagcgtcggcatggaaatcctcaacatcgacaccgacaaactcaccaacgccgtcgaagccaccgactcaggcgtattgcggcgcatcctccacggtgcaggcgaaaccctgccggtcaaaaccctgatcggcatcctcgccgatgccgacacctccgaagccgacatcgacgcctttatcgccaactgggtgccgccgtctgccgacgaagtggatgaataaactaaattaaaaacgagccataaccatgcctgtctgaaacaccatccctatttttcagacaggtgtaaccaacaaaggagaaacaacatgtcccgacaaaaaaccgccgtgatcaccggctccgccgacggcttgggcaaaggcatagccgaacgccttgcacaagacggcttcaacatcgtgctatccgacatcaacgccgacacactcgcacaaacagagcaggaatttaaaagccgcaaccaacccgcagcctcatttgtcggcaacgttgccaagcgcgaagaccagtttgccctggtaaaacacgctgtcgataccttcggcagcatagacgtattcatcaacaacgcaggcatcgaagaagtgatgctgctggaagaagtgggcgaagccgacatcgaccgcgtgttcgacatcaacgtcaaaggcgtgattttcggtacacaggccgccgccgaacaaatgaaaaaacaaggcggcaaccgcgtatacaaaatcatcaacgcctgcagcatcgccggccatgaatcattcgaccttttgggcgtatattgcgccagcaaattcgccgtacgcgcaatcaccatcgccgccgccaaagaactggccaaatacaaaattaccgtcaacggctactgccccggcgtggcaggcaccaaaatgtgggaccgcatcgacgccgaaatgggcaaatacctcggcctcaaaccgggagaagcatttgaaaaattctcaaccggcatcctgatggggcgcacgcaaaagccggaagacgtggccgcattagtacactatctcgcttcggaagattccgattatatgaccgggcaatcgctgattatcgacggcggtatggtgtatcgttaaactcagaaaaggccgtctgaaatcaaaacgcgcatcatcccagattgttgtaaagaatgcctgtctgaaacccaatttaacgtttcaggcaggcatctgaaactcattgagctatttttacaatccgcaacaatttcggcacaaataaaaaacaaccttacacaaagcctgtttgctttaacatcatgcttgctacaattttaagcacctgtgtcaattttgatgaagcaggtaaatgggcatatccgctcataatcaaatcaactcaagacaagaaaggtttccgcatgaaacatcaatctgcacgtttggctgcctttatggtggcagctttgggagcatcgttttctaccgctgcaatggccgatgaagtaaccggcccctacattcaaggcgatatcggcttggccaatataaaagtagatgatgacgaaaaattcaaagtgcgcgacacattcaaaagcttgaaaaactcttacaaagattcaggctttatgccccgtgtaagcgccggttatgatttcggcgacgtgcgcgtagccggtgattatacccactacaaaaacatgaatgacagcgccaaaaaaggcgatgagcagctggacgttaaagtaaaagcccgaggtatgggcgcatccgtgatttacgatattccgctgcaatcgaacttccaaccctacgttggcgcacgcttgtcggccaaccggttgaagtatgaatcgcatggcgtttcagccggcacccgctcccatacttccgaaagcaaaaccaaagtaggctacggcgcaatggccggtgtgggctacaaattcagcaacaatctggccgccgatgtgggctaccgctacaaccgtttggattcagacctgaaagcgcatgaagtatccgccggtgtgcgctacacattcaactgatgcaaagcctttgaaggctgacatataaaaagcgtactgcttcggcggtacgctttttttacatcatatagacaatcaacttaagaaaaagcacacacgtcatactcgggcttgacccgagtatcttgagtttcagtaaatttggggatactcgggtcaagcccgagtatgacggtactattatccaaatggtttaactatatgcctgtctgaaaacgcgtttttctttttcaggcaggcatttcctctttatcttctaatcggcatgccaaccgccgcccaacgccttatacaaaccaatcagcatccgcgcgcgcgccagttgtgattgaatcaggttttcctgcatcgcttcttcgttcaggcgtgcggtgagggcgttatcgagtgttttttggccgtatttaaacagtttttcggcatcgcccgcctgttttgccgcctgtttgtgtgcggtaacgagcaaggtgttttggcgggtaagcgcgccgtgtgcctgatatgcgctgtccacttcgccgagagctttgaggatgttttggtcgtattgcaataaggccgtctgaagccgtgcatcggcagcggcgatgttggctttgatgcgcccgttggtgaaaatcggcactgtgatgcctgctttgattaagctgccccagccttttaaatcgctgtcgctgtcgatactgatggtgcctctgcccaaaaattcgatggtaaaccgcggcaataagtcggctttggcactggcgagcttggcggcataggcgttcacttgcgcggcatgggcgcggatgtcggggcggcgctcaagcaggccttgcggggtttggccgctcggggcggcgggttgcgcgcttaagatgttgacgctgctttccggcagggcaaatgtttgcggggtttggccggtaagcacggcgatgctgcgcacatgggcggcgtattccgattcgatggtgctttgtttggcgcgcaaggcggtgagcttgctggcgacttcgtccacttcataagcggtaacgtggcctgctttgaaacggccttgtacatatttcgccagccgctcgacggtggcgatattgcggtttaccgatttcaaacgcgcttgggcggcgcgggcttgcaggtaatgctcggcaattgcgccgccgatcagcacttgcgtgccgtacacttcttcctgcctgccgagtgcggcataagcggcggcatcggcatcgctgcgtttctgcccgaaaatatccggctcccacgacgaggaaaagccacccgtaagactgttgcctttcaacgtgaaacgctctcccgccaaatcggcagcctgcggaatccttccgagcacggcgcgggcttcgtcgctcagcgggttgctgatgcgggcgttgaggcgtgatgcttccgcgcccgcgccgatcgtcgggcctttatcggcatcggccaagcgctcaatggcacgcgcttcgttcaaacggctgcgggcaatttggatatcgtggttttgctgcaaaccttgttcgattaagcggctgagtacggggtcgttccaatgctgccaccagcggccgatttccgcgctgccgcgcgccgcttccgcttggctgaaggcttgcggaatatcgattttgcttttgagcggcacaacggtgcttttacaggcggcgagcatcagtgccaacatcaggctgcttgcaacggggttcaaacggggtttcatggcttttccttatctttattttcagacaggcatgtaggccgtctgaaagcaaactttgtgagtttcgctaaaacgtttgtgcagattgtttcggtcatgcggcttacacatacttctccgcctcgcggatactgagtttcgccatacggctgcggtaccgttcgataaatgcccgcacccattcggggttggttttactgtaatcgcgcaacgcccaaccgatggctttgttgatgaaaaattctttttgctccagattgttgcagataatttgctccagcagcgcggtgtcggttttgtctttgcgcaaaagctggtggtcgatggcgacgcgccgcagccagatattgccgctgttgctccaatccagcagcacggcattggtttcggggtaaaccaaagcgatgccgccgacaatgcggtcgagcacgtccgccgtatcccaccacgatttttcggtaatcagctttttcaggtgcggaatgtctagcggcgtgagctttttctgcatggttttcagatactcaagcgcacagtattgcagctcgcgatgcggattagcccaacattgttcgacaaaccgccagtcaacttcttctgccgccgcatttttaaacaacggcttgcagatttgagccaaacgcggcttgctgatgccgagatagtcgaaacggtgtttcatataggctttcatcggcacggcgcgttcggggtcggcttcgcgggtaaggatagcgagcagttcttcgtaattcatcgtatgcacctttttcagacggccaacaatgccattcgagcctgcaaattattctttaagctgcacaaaagaaatgccgttgccttccggatcggccacatcgcaagccagcaccacttcccaatcgacaatttcccccgcctcgatgcctgcccgaataagcgcttcgcggcaagcggccacgtcgtccacaccgataaccaccaccgccttaccgcccgtctccgcaccggcgagttgcagccaagcatggtcggcaatacgccattccgccatgccttccatcggcacctcgtccggctcactcagccatgtttgataccacgccagcgcggtttcataatccgccacattgataacggaaaccaaatcgttggttttaaacagtttcatgcttttctcctgcgtgtagaagattgtgattgtttttcagacaggcattgcgccttgccgttccaacaatgttttttactccgccactgccacatcaagatccacagtttggtatttcggatattttaggcttagggagtttggttatctaagaataccgcacctttgatatcaattggaaggttcctgactttggaacagttgattgttttcagacggcctgctcgggcttgccccgagtatgacgagcgtactatttttatctttaagttgattcaccataacaggctttttcagatattaataaagacgatgcccctgtttaagcggacttaaacaggggctcaactcatttctgaatctttacgtcgcggcacgtcttttcagacggccttattgtagcaacggctctcatctcgtagtgcaacaataaatttgattctaatgatgatgaaaacacttgtcaaatatttatttctttactataaataagcgtatgtatttttttgtaaatcaagatgaaaaggggaagaaatgaaaaaacagccgcaacgctatattttgggtttggatttgggtattgcttcagtaggctgggccttgatcttagtggatggagcggaaaatcccgtcggcctgctggattgcggggtacgcacgtttgaacgggcggaagtgccgaaaacaggcgattctttagccttggcccgcaggcaggcgcgcagtgtgcgccgcttaatccgccgccgcgcccaccgtttactgcggttgcgccgcctgctcaagcgcgaaggtattttgagtgctgccgactttaattcagacggcctgcctaatctgccgattgatgcttggcagttgcgtgtggcgggcttggagcgaaaactgacaaatcaagagtgggcggcggtattgctgcatttggtcaaacaccgcggttatctgtcgcaacgaaaaagcgaaacccaaacggaaaacaaagaattaggccgtctccttgccggcgtggccgaaaacagcaaactgctgtcagaaagctccgaacaataccgcacgcctgccgaattggcggttaaattatttgcggaacaatcggggcatttgcgcaataaaggcggcgaatacacccacactttcaaccgcttggatttacagaaagagctgcatttgctgttcgagcggcaatatgcgctcggaaacccgtttgcttcggcagagttgcaaagcaaagttgatgaattactgatgacgcagcgcagtgccttacagggtgaagcagtgttgaaaatgctgggtaaatgcacatttgagccttccgaatacaaagcggctaaaaatacttattctgccgagcggtttatttggctgaccaaactaaacaacctgcggattctgtacaacggcgaagagcgggctttggatgaaggcgatcgcaaaaagctgttggacgagccgtataaaaaagccaaactaacatataaacaggtgcgctcaatattgaatctgcctgaaagcgcagtattcaaagggctgcgttacggaaaagattcagacggcctcaaggcggaaaacggcacattaatggaaatgaaggcctaccacaaaatccgcacgatattggacaaagcaggtttgaaaggcgaatgggaaaaccgcatccgcaatcccgaaatactggataaaatcggcacggcattttcactgtataaaaccgacgaggatattcaagcagccttggccgatttaaggctacctgaaaacgtgttggacgcgctgctggcaggtttgaacttcgataagtttatccaactttcgctgaaagccttaaggaatattctgcctttaatggaacgcggcatacgctatgacgaagcctgcaaagaagtttacggcgatcaccgcgccttggcagaatcgaaaaatcaagtgctgctgccacccattcccgccgacgaaatccgcaatcctgtggtactgcgcacactcacgcaagcacgcaaagtgattaacgcgattatccgccgctacggttcgccgcagcgggtgcatatcgaaaccgcacgcgagttgggcaaatccaaacaagaaagagataaaatcgacagaaaaaataaagaaaatcaaaatgatagaaatcgattggctagtgatatacgcaagcattttaattttgaaccaacgcctaaagatattttgaaattaaggttatatgagcagcaacatggaaaatgtctgtattccgatttaagagaagaaaaaggggaatgtctatatacagggaatgttattgaactgcacagattgtttgaggatggttatgtcgaaatagatcatgctttacctttgagtagaacatgggataacagtttgaataataaagttttggttttgaaatcatctaatcaaaataaaggtaataagacaccttatgaatggttggatggtgcaaataacagcagacgttggcgtgagtttcaggcacgggtgcagggttgtcatttcccttacgttaaaaaacagcgtattcagacggccaaattggacagtaaagccgaacaaggctttttggaacgtaacctgaacgatacccgttatatctcaaaattcatgtgtcagtttattacggcgaatttaaggctagctgagacatcgaatgctttgatggaagaggtcgctggcgagaatccatattggaaagaaagaaaacgccaacgtgtttttgctccaagcggatcgattattgccctgctgcgcggtttgtggggcttgaaaaaagtaagggaagacaacgaccgccaccacgcactcgatgccatcgtggtcgcctgctccaccgtttccatgcagcagaaaatcaccaaagccatgcagcgacgtgaaactttggaaaccgtggatagcgaaaccggcgaagtcaaaacccgcattccgcagccgtgggatttcttccgccaagaagtgatgatacgggtattcagcgactctccccgtgaagagctggcagagaaattaaacagccggcctgaagcattgcatgattttgtatcgcctttatttgtctcacgcgcgcccaaccgcaagatgacggggcaagggcatcttgaaaccgtcaaatccgccaaacgcctgtctgaaaacatcagcgtggtgagaaagccgctcacagcgttaaaactgaaggatattgaaaatatcgtcggctatcccgaccgcgagcctgctttatatcaagctttgcgggaacggttgctggcgcataaagacgatcccgttaaagcgtttgccgataaaccgttttacaagcctgcgaaagatggcgggcaagggtcattggtcaaagctgttcgaattattgaaaataccaaacatggtttaaaaatacgtaacggcattaccgatactaacggtgatatggttcggacggatgtctatcaaaaaacagataaaaaagggaaaagacaatatttcattgttcccgtatatgcttggcaagttgaaaaaaatgagctgccgacagttgattgtaaaggatatgaaattgatgacaattatgaattttgttttagtttatataaatatgaccttattgaaatccaaaaccctaacgacataaatcaagaacttcgggcttactatattaattgtgacagctcggatggcagattttggctggcatatcatgataaaagtgctaaagaacaacagttccggatcagtacgcaaaatcagccgatcataaaaaaatatcaggtcgatactttgggtaaagaaatccgcctttgcaaagcagaaaaacgcactgcattgaatggcaaaaagaaaaaataacccttagcggctgcaccttcaatggtgtagccgttttactgtataacccatttaaaaaagactacttacggagaaaatcaaatgacttggcgcagcattttaatcagccgccctgcacgcctgtcgctacaacaaagccacctgctgattcaacaggacgaagccatacctataccgctggaagacatcgccgtgattgtagtcgaagcacgggaagtggtactaaccgcacccttgctatctgcactggcacaatacggcatcaccctgcttacctgcgacgaacaatttttgccctgcggccaatggctgccgtttgcacaataccaccgcagtctgaaagtgctcaaacaacaaatcaatatgacagaaccgcaaaaaaagcagctatggcaacagattgtgaaacagaaaatccgcaatcaggcttggctgctcgattacagcggccacgatattgccgcaagccgtctgaatgccttggccgacagcgtaaaatccggcgataaaaacttcgccgaaagccaagctgccgctttgtatttccgcgtactgttcggggaacaatttgcccgcagtcatgaaaacagcgtaaatgcccatttgaattacggttacagcattctgcgttcggccgttgcccgtgcacttgtgcaatacggctttctacctgcacttgggctgcaccaccgcaacgaactcaatcctttcaatttggccgacgactttatcgaaccatatcgtcccattgcggatttatgggtttacgacaagatgctttccaacagtctgccagaggagctggcacccgcaagcaaacaacaactaatctctttgttatgctgccaagcagctttggacggaaacaaatatagtgtattggctgccatagaccgcaccatacaatcttttcagacggccatcagccaaaacaaacccaaacttttaaaactgccacaaatgctgcgcttaaaggtacatgattatgagtgaggccaaatttatgcgcttaatcgttttctttgacttgcctgtaaccaccgctgccaaaagaaaagcagccaaccaattccgtaaatttctacagaaagacggttatcacatgctgcaattatcggtttattcacgcattgtaaaaggacgcgactcgttgcagaaacaccacaaaagactgttagtacatttgcccgaagaaggccaagtccgctatttggaggtaacagaaaaacaatatgcaagcatggttatgcttattggagagccaaaaccccgcgaaaaaaaggtcaatgccgaccaacttttacttttttaaagtcgtttttttaaccaaaataaaacagggaagccttattttataaggcttccctgttgaagtattgtagcactacgagatgagagaggaagctacaactgtttctgcctatataatgttttcaggtctattgtagcactacgagatgagagaggaagctacaacattccggttattcaggattttcaaattcaaattgtagcactacgagatgagagaggaagctacaacaatgtgtagaccagcctgataacgttgctaattgtagcactacgagatgagagaggaagctacaacaaaaacccgaatatcgcagacgctctcaatattgtagcactacgagatgagagaggaagctacaacacaggtgctgaatcatcactttggaaaccgattgtagcactacgagatgagagaggaagctacaacccaagtcgcggtcgagcaagggttcaagggattgtagcactacgagatgagagaggaagctacaaccccttcgatccgtttaggcagcccccgcaaattgtagcactacgagatgagagaggaagctacaacgacacagccactgtaaataacatccacataattgtagcactacgagatgagagaggaagctacaacccgggcaataggctttagcgacgataagctattgtagcactacgagatgagagaggaagctacaacgcagggggaggaactacgacagcacctgccattgtagcactacgagatgagagaggaagctacaacgttttcagcgtactcccgccgggcagataaattgtagcactacgagatgagagaggaagctacaactccgtgtcgcctctatcttccatcgctttgattgtagcactacgagatgagagaggaagctacaacgcaaaaagcgaagcatacgaacatttcgtaattgtagcactacgagatgagagaggaagctacaacgcaatccggctgccatttgcgcacccgccaattgtagcactacgagatgagagaggaagctacaacaattgtgaagaacattatgatggggaatttattgtagcactacgagatgagagaggaagctacaactcgcttgagccgcatatgtttaccggtgccattgtagcactacgagatgagagaggaagctacaacccgctgcgcgtcctatgggtgtattcgggaattgtagcactacgagatgagagaggaagctacaacggcgccatggtgcgtacggtcaaaagctataattgtagcactacgagatgagagaggaagctacaacccgctggtggatacggaggggttgcgagaaattgtagcactacgagatgagagaggaagctacaactggcaatccaaacaatggaaacaatggctgattgtagcactacgagatgagagaggaagctacaactataaacaaaagcttcagcatcgctatcaaaattgtagcactacgagatgagagaggaagctacaaccttcacatcgtgaggcagcttcattttgtcattgtagcactacgagatgagagaggaagctacaactttttacaccacgcctgtgcagtctgccgaattgtagcactacgagatgagagaggaagctacaacgagggcttactgatgtacgccatgttgggtattgtagcactacgagatgagagaggaagctacaacaaaaaaagatgtggatgtatatacagaaggattgtagcactacgagatgagagaggaagctacaaccgtcctctcccacgagggcggctatgtcaaattgtagcactacgagatgagagaggaagctacaacaggacatctcggccgagcagacatcctctcattgtagcactacgagatgagagaggaagctacaactattttgccgcctatctcgtagtttatttcattgtagcactacgagatgagagaggaagctacaaccacacttgaaattttattttcttcttttcaccgtcacgaccatatcaatttccatcttatctttatttcagacaggcattgcgccttccaattccaacaacgccttcttccgcgcaaggccgctgccgtagccggttaagtcgccgttgctgccgatcacgcggtggcacggtatcaggatggaaattttgttctgcccgttggcggcggctacggcgcgcacggcctgcggtttgccgatgcgttccgcctgctgcttgtagctgcgggtttcgccgtagggaatgctttgcaatgagcgccaaacttgccgctgaaagagtgtgccgaccgggtcgagcggcgtggcgaagtttttcagacggccttcaaaatacagattcaactcttgctgtaaagtttggctgtgcgctgtgtcgcgccacacaaaatccgcctgaaatgctttttgcacggccaagagttcgctctctattattttgcgctcgggaaactccagcaggcacaagccttgtgtgctgaatacggccaacatctgccctaacggggtggcgtgcacagaaaccgtcagctcgttgtcgtgtttgctgttgcgttgtgccagcaggtgtgtgatgcgtttcaggcggatgtactgcccgagcgatatgccgacgtgccgctcgaaatcttttttcagcataaccggttcgtctgccgattcgagcgggtggtcgcggtaggattcgggcggattttcccgtgcggccagccatgcggcataagcccgccaccgtgcgggaagcaaggtttgcggatcgggcagccggcggatatccattgtgtttcctttcttttttcagacaggcattattcgccacccgatatttatcttgcaaacccatcataaaaatataggcaatagctgccgcaaatatctataccgccaagccggcttcaagctctaatatcgcgtgagcaatgataatagaaacaacaatataaaccatttcattaccttatcctttacatagagggcactgtaagtaagaatgcataacctactacgcgcttgaagcatttatgaatacagtcactttattctactttttcctctccagcatcctgattgccgccttgcccgggccggcgatgatgttggtgattcaaggtgcggtaaaagatggttggcgcgcaggcttggcagttactttgggcattttggcggctgatgcggtgttgctggcagcggtttgcgtgggtttgggcgggctgatggcggcttcgcccaaaattttgtttgccatgaacgcagcggcggctttatatctgctttatctgggcgcgcgttctttgtatgaaatccgcagtatccgcggcggtttggttgaaagcggcggcaacacgggctggaaaaccggctttttcgttaccatcatcaacccgaaaaccattatttttctattagcttattttccccaattcatcgacgcctccgccccgctttccgaaacggcacagcttttggtgctttccgctttgtttctgctggccgttgcggtggtcatgctggtgtacacacaggcggctcatgtggcgcggaattatctggcccggccgattgcccgccgtgtgatggctttggtgtttggtttgctgctggtttatatcggggcggaaggcttgatcagcctttttgtgtaaagttttcagacaggcatagctttgcacaatgcctgtctgaaaaggcgcattgttcatcaacttgaaaactacgtctatcacgcaccaaacaacgcggccttgccttctgcgccggacacatccagcacttcgatattttccccgtccaatactgcctgcgtgagcatggccacgccgccggaggggccgatttccaaaatgcggcggacgcccagctctgccatgcggcggcattcttccacccaatcgaccggatcgaccaacacagtttgcgcaatgctgcgcgcctgttctgcgtccaaaccgcaggccgccgcccattcgtccacttgcgccacggcgggtgccagcgcgggatggtggaagccgacttccacttcaagcggcacgagcagcgattcgggggtgaggccgtctgaatcttttattgtggtcgaaagttcttcacacacgcgctgcaccgattccggctgcccgcttactacaaaggcttcttggctgttgcgcaggccgatgcacgggcaggcggctggatcggttggggcggcggggaacaggctgtccaccatgtcggcaagctgcgctcggctcacgccctgcaccatcaccatcgcatggccgccgtcgtgcatgtacatgccggtttttctgccttgcaaagtagcggccgcgccgatcagttcggccaatgccagaatttcggcggcgcgctgcggttcgctaaccagataacgcccgagtatgccttgcgaatgcccgatcacgcccgccgctttgccgatgtccagtccgcgtgctttcaaggtgtgcagattggcgatttgcgagaggaaaatgccgggcacgctcacgccagcacgcaccaagtcaatttcgctgttgccgtctgcccacgcaatcggttcaaaaccctgcgggcgggcggcggcaagctgctccgccacgggcgcaaccatgcgggcggcggcagcggcaatcttgccggtttcctcccgcgcaccttcggccaaagcctctcgcaacatacttatccaatcaaacccttgcccggaaaaacacaatgcaaacggttcggcatgtacacgctcaagcaggcgtttttgttcggtttcacccattgtctcactccttgtatgatggttttcagacggcctcagcggcctttgaccgcatcctcaacactcagccatgctgctccagcatttttctaaaccgcatcagcgcaaatgccaaaaacagcaggccggtcaaagccattgccaaaagctgcggccacacgatgctcaagccggcattgcgaaacagcacgctttgggcaaaccggataaactgcgtgctcggccaatattcgctgatccattgcgccgctgcgggcatattgttgcgcggcgaggccacgccggaaaacagcagcagcaccatatacagcggaatcatcaagagtccgaactgcgccatgctcggcgcaatcgtggcaagcatcactgccagcgcggcaatagaaaacagatacacggccacgccgaagccgtagagcagaagggagccgtaaaccggcacgccgagtatcccctttaccaccaaccacatcgacagcatactcaccagcaaaatcaccgcactgttggccagcactttcgccagcatgatttcggcggcgtttaccggcatcaccagcagatgctcgatggtgccgtgttcgcgttcgcggatcaccgccgcgcccaccaaaatcagcgccaacaccatcaccatattgcccaactccatcggcggcccgtaatagctgccttcggcattggcgttgaagtgcgaacggatcaccggcttcacgggcagccatttctccgccgactgctgccgtgcaaactccgccgtttcgcgctccagaatgcgggtcagataagccgcgcccaaaccggcctgcgacatggcggtggcgtccacttgcagcagcaattcggggctgcgccccatcagcacgtcgcgctcgaagttcggcggaatttccaaagtaaaaatgtacccgcccttgtccatcgcctcattcaccgcttccgccgccacttcctgcggcggccggaaaaacggctcgcgcacggcatcgcgcaggcggtaggaaagcgccgaacggtcgccgtccaccaccgccacggcagcgtttctcactccggggtcgatttcagctgcggacaaaaccgttaccgtaaacataaacacaatcaacaccatcagcaccaagtcggaaaacaggctgcggagttctttttgtgctaagtagaagatgtttttaatgctgcgcatgggcttgccttgggggtttcagacaggcatttcacaccgattcggcggttgcatcggtaaattcggccagtgtctgcaaaaatcgttcggggctttctttttgcggccagtgcttgtgctcttcaaacacttccagccgcgcctgcggcatgatggtggcggccgcttcggcatcggccagcggcacggccgggtctttgctgccgtgaaccagcagcacggggcagtcgattttcggcagctccggcagcaggcggcctgtgggtttgccgccgtaggtttcgctgagctggaaagattggaacgctttgccggcatcttctgccaaggcggcagtgcgcacttcgtccaccagttcggtgctgattttgccggcatcgccgaatagtgtggcggcaatcaggcggcgggtcagcaggcggctggcgcataggcggtaggccggcaggttccagcgcgagcgggcataccagccgcccaaccgcggccacggtagctcggtgctgatgccccacggtgccaccaacaccagccgcttgagcaggtgggggtagcgcaaagcaaactgcaaagccacgctgccgccgagcgacaggccgcataagttgatacgctgcaggcccagcgttttccaaagcgtgtagagaagctcggtgtaaaaatccagcgtgtagtcaatatcgggtttgctgctttggccgtagccgggcaggtcgggggcaaccaggtattcgttgcccggccactgcgttatgatttcgcgccacgacaacatagccgaatccaaaccgccgccgtgcagaaataaccaggcttcttcttggggccggcctgcggtgtggcaggcgaccgaaaggtcgtcagacagggtgaaagtatgtgtttcgatagtgttcataatgcatcttttccaaaatatgaagcgcgtttatattttcagccaacccgtttggattcagtatctcaatattcgggccggcttatagaatggctgtatagccttttcagacaggcattccctcaaacccaacgccgaaccctacggcaataggccaaataaggcgcaccgaatttttgcgccagcacgcgctcttcgtggcggatttgaaagcggttcatgcctgcgacaaacaacggcagcccgagccaagacaggacatgccccagccacaacgcccaagccgcgagcatcagcaataagcccaaatacatcgggttgcgcgtaaaacggtaaacgccgctgctcaccaaacgggaggctttgtcgagatgaacggggtttatcgtggtttgcgcctgccttaaagccgccacgcccgccgcgccgacggccaagcctgccgccgcaggcagcaaggcccaaactccggcagacggccattgccaagccgccaaaggtatgtctgccagcagccgcatcaatacagcgcaggcaatcaattgcagcaccggcgggattttcaggttgtccatatcgcctccttttgcccgatacgttcagacaggcattatttttcctgcttcttcaaaatccagcaggccgaagtgaaatacaccacataaaacgccagcagcaccagcatttcgcggctcaggtcgtgcccgcccaagcctttggcgaagctgccgatgctgatgttgagataccacgacgcgggcatcagcttgcccatccagtacgccccgccttccatcgacgagagcgggtgcagaaagccggaatagttgaaggtcgggatcataatcacaatcgcggtgaggctgatggccgccatttgcgagcgcacaaccgtggaagccagcaaacccagcgcggtggacacgaacagcagaatcagcgtgcccgccgtcagcaccagcagcgaacctttcaccggcacgccgaagccgaacaccatcatcgccgtgagcaccacataattcaccatgcccaccgcaatatacggcagctgcttgccgagcagaaactgcggcacggtggcgggcgaggtgtagaaattggaaatcgaaccgatttcgcgttcacgcaccaccccgaccaccgacatcattgccggaatcagcatcagcaccaacatcaacacgcccggcgcgatggcgaaaatgctttcaaaatcctgattatacataaaccgctgctcgattttggccgcgggcggcggcagcgtcagccccgtttcgcgcgccaaatcctgcccgtacagtgcaaaaatgccgccgatatagccttggatgttgctggcgttgaacggcatcgcgccgtcgacataaaacgccgcctccggccgcctgcccgccagcatatcgcgcccgaagccttcgggaatctcaattaccaagcgcgtttgcgccgactgcaaggcggtgtcgatatcgcttggcgacgagagcggcggctgttgctgaaaatagcgcgaaccggaaaaatattcggtgaggcggcggctttcggtggtttggtcgcggtcgagcacggtaaacgtgaggtctttcacgtcgaacgacacgctccacgacaaagccaccatcaaaatcaccggccccgccaatgcgaaaaacagccgcaccttgtcgcgcagcaattctttggtttcacgcaaagcaaacgtgcgcacgcttgccagccagtatttcaaggtgtcggtcggcggtgtgttttcagacggcctgttgcctgtttgcgcatccgaaacctgattttcctgcgcactccttgtggcaacttgaggcacgctttcggtttcaggtagcc

SEQ ID NO: 2703 - DNA, 23285 bp, synthetic construct
  source 1..23285: mol_type = other DNA
  misc_feature 1..23285: note = Synthetic
atttaacgagttttcaacatctcacaaaaaatcatcaactgctttggaaatgaacgtacgtcaatttattaaaacatccggccttttccatttgatcgaatcctaaacccaaacacccaagttttcagcgcaatccgtttctttctcggtgaaggaatggcgattttgtatttcaacacattctgtgcgccgtctcgttcgatttcatttagtaaagcataataaatcgcggccatcaccaagccgactttttgattttttttgtcggcggcgggcagtagggcaagcgcttggcggtaggtgttgcgcgcgcgttggatttgaaagcccataagttcggcaaattcgggcgtgggctgatattgcatgatggcggcggcgggtacgttgaagcgttgcagctcttccatcggcaggtagatgcggccgttgcgggcatcttcgccgacatcgcggatgatgttggttaattgcagcgccaagcccatttggtcggcgtaatcaagggtttgggggttggtgaagcctaaaatgcgggcaatcaggcagccgactacaccggcggcgcggcggcagtaaagtttgagttcctcaaacgtggcgtagcgggcttgatccaaatccatctgcatgccgtctatgagttcgatcaattcgctttgcggcagattgaaggtgcgggcaacgggctgaagggcttggttgaccgggtgttcgggcaggccgtctgaaaaggcgcgtgccaagtcgaggcgccaccagttgagcgtggtttgggcgatgtttttgtcgctgcaatcatcgactgcatcgtcgagctcgcggcaaaaagcgtataacaccgtcattgcatcacgccggtgttcgggcaggaatttgaagcccgataaaaagctggaaccgctttcggcggctttttggcggcagtattcgatgggttgcacggcgtgtcctgtgggtcgattatgatgattgtgacggaattgtatagcgatttggggttgaactgaaggccgtctgaaaaaattgtgtttttcagacggcctgagatttttgtcaaattcaatttgaatcaggagatgtatgcttgtcattccctcccgggcgggaatccggaaattaaaattaccgtcgtagctcaatattcctgaagccggtaggtccggaccccgtccgtgcgagaatgacggctaaagatttctgaaaatctatgcgttttccaaaggttccgaccttcgataccgtgcagggctgaaaagcccattgagattggctattattcccgactaaaccactcaactatcggcgtcaaatctgttagaatacggccgatgacacaataaaaccaaaaggcacaccaaccatggcacttttgcaaatttccgaacccggcatgtctgccgcaccgcatcaacaccgtttggccgtgggcatcgatctgggcaccaccaacagcctggtcgctaccgtgcgtagcggcagcgctgtttgtctgtctgacgagcacggccgcaaaacttttccttctgtcgtgcgctattgcgaagacggccgtgtggaagtcggcgcggatgccctgaaagcgcaaaaaatcgatccgattaataccatcagttcggccaagcgtttaatcggccgcactttggccgacttatcgaaagaaacgcattacctgccttaccgcttcggcaacaacgaacgcgtgattgaattgaacacgcggcagggtgcgaaaacgccgattgaagtgtcggcggaaattctgaaagttttgaaaacgcacgccgaagagagcttgggcggcgatttggtgggggcggtgattactgtgccggcgtattttgacgatgcgcaacgccaagccactaaagatgcggcgcgtttggccggattaaacgtgttgcgtctgctcaacgagccgaccgccgcggcgattgcctacggtttggataatggctcggaaggcacgtttgtggtgtacgatttgggcggcggcacctttgatgtgtcagtgttgcagttgaccgaaggtttgttccaagtgaaggccacgggcggcaattccgctttaggcggcgatgatttcgaccatcgtttgttctgccatattttggaacgcgccgatttgtcgaaactcaatgagcaagacagccaattattgctggccttgacccgcaaagccaaagaaaccttgaccaccgaaaccggcgcggccgtgcaggccacgctttcagacggccataaggttgatgtgaccattacgcgccaagagtttcatcaattgacacagcatttggtgcaaaaaaccatcgaaccggtgaagcaggcattgaaagatgcaggtgtgaccaagaccgatattaagggtgtgattatggtgggcggttcgacgcgtatgctgcacgtgcagcaagcggtggcaaccttcttcggccaaacaccattgaataatctgaatcctgatgaagtggtggcgctgggcgcggcgatgcaggccaatgtgttggccggcaataaaaccgacggcgaatggctgctgctcgatgtgacacctttgtcgctcggtttggaaacctacggcggcttggcggaaaaaatcattccgcgcaacagcaccttgccggtggcgcgcgcgcaagagttcaccacgtttaaagacggccaaaccgcgatgacgattcatgtggtgcagggtgaacgcgagctggtatccgattgccgcagcttggcaaaattcaccttgcgcggcattccgccgatggtggccggtgcggcgcgtatccgcgtgattttccaagtggatgccgatggtttgctgtctgtatcggcgcaagagcaaaccgtcggcgtaagcgcgcaaatcgaagtgaagccgtcttacggtttggacgacgataccatcacgcaaatgctgaaagaaggtatgagtaacgccgccgacgataaagccgcgcgtgcacgcgccgaagccacagtagaagccgaaagcctgatggatgccgtcaaggccgcgcttgagctcgacagcgatttgcttgaagctgaagagttggccaaaatcgaagccggcatcaccgctttgcaggaccatgtgcaaaatggcagcgccgatgagattcgcaccgccgtgactgcgttgagccgcagtaccgacggtttcgccgccaagcgcatgaaccgcaacatccggcgcgcgctgatggggcagagcgtggacaatatttaagcagtttcagacggccttctttcttcaaggccgtctgaaaaaagaaagccgatatggaatcactcaatcaagatttatacgaacgaatcagcgcattgtgcgatcaaggcgatgagttggcggatgaaggccggtttgacgaagcggttaagcaatataaagaagcatggaggctgctgcccgagccgaaatcacagtgggaagcagcaacatggattttggccgcgatgggcgacacgcattttttaaacggcaaataccgccaagccgtaaaaaatttgaccgaagcattggcctacatcaatgcgctggataatccgtttatctatctgcgcttaggacaaagccggtttgaattgggcgaagaaaaagccgcgctagaagccttacagacggcctatgacttgggcgatgaagaattgtgggaaggtgaagatgaaaaatacctgcaatttttggcggccaaagtggatagtattgtcatatcctgatatttaggccgagacttttgcaaaatttgtaaattcccgaaatttttaagccgtcattcccgcgtagacgggaatgacgagcatagctttttgattcaaattagggtttgcaaatatttcaggccgtctgaaagattacgaaaaaaatcatgcgcttgtggcagaatctttaattggccaattgccgtgccggcagctttgggccgataccgtgaacgtgctgctttgcgtgcgcaggttggggcggccgtatgcgacggcggatgatgtgtttagccgtctgccgtataagctttttcagtatcatgtgctgattatgcaggaaatgtaccggtggttatcggcctgatgaagcgtggttcgaccgctgtatcgcggcaaaccgaaccgccttatgccgatcacacgccattgtcggccggcaacccgatttatctcccgagcatgtgcggattatctgcaagagtgcttggacaatttaaagcaaaaaggcatcgtgttacgcatgcccgacacaaaccattgacatcaacgagaacataaaaatgccgaaaattaccgtattaccacacgcaacattgtgccctgaaggcgcggttatcgataacgcaccggaaggcaaaaccgtattggacattttgttggattacaacatcgaagtcgatcatgcctgtgaaaaatcctgcgcctgcaccacttgtcacgtgattatccgcaaaggtttcgacagtttggaagagccgactgaaatcgaagaagacttgctcgaccaagcatggggcttggaagccgattcacgcttgagctgccaagcggtggtggctgatgaggatttggtggtggaaattccgaaatacactattaatcatgcgcgcgaagatcattgattaaccaaaaggccgtctgaaaccatcatttgatttcagacggccttgagcacgaaattgaatataccaaaattatttctgtttataaccgccaaagctgaaacgggaaaccttaatggactgagctttgggcaggtttgcttgcgctgcggcatagttttccgttttcggttgggtgttaatccggcttaaactcttaccgagtgacgagataatgcttggcgcttccggtagagaataagcagaagattcgttgggtaattgggcaaaggcattgtttgcggggagggtggaaagcgctggttcatcggcggtcaaaccaaagccatcaatcatttgcagcacaatgtcttcgcaataagcttgctcaatggcaccttttactttcacattcgccaatgataccgatatttggccgcagccgagcacttgttctgcaatgcgctgatagagattccagcgtttcaaacgaatcacggccgaattggcattcagcggaatcggttgtaggcgcacttgcccttgcttgctaccgcaatggatgcgcaaagtgacttgggtcaggccgtgttgttcgtccaaggtatggtagatatggcggatgagcagaatcagacggtcaagcgggtgtgctttggcaaaataatcaggctctttgggcacggagccgtaaaccaatttagacagcttggcattcagcgcattgttcatcggcgattccttaattaattactgctggaaatagaatttaagagccttttgcgctgatttagttgcatggccgaatgtaaattagagtatattagccattgccgaacctgatttgaccgcagcaattgtttgctttacattaaaatggtttcagacggcccaagccgctacgcatcgaaaggaaacactcatgaaatggaccgatacccaacgcatcgccgaagaattgtatgacgcacacggcgacatcgacccgaaaaccatccgctttacccgcttgcgcgaattgattatggctttgcctgattttgatgacgaaccggcacattgcggcgagcgcattctcgaagccgtgcaacaggcttggattgaagaagccgaataatgggtttacaggctgtatgttcgcgctgcgcatggtttgggcggtgcggcagattgccaaagaagacacgccgtctgaaaaaattgcagacggtgtgttggatgaaatgccgccgtttttccgatggtgcagcgttacgctgcagcatggagcaggatgagggtaattttgatgccgctgtttgtttgccatgtgaaatcagctgtcaggtgttggcgcatcccgggcatggccgtatcacacccgagcgtaaacgctttactgattcgtgccgccattgttttggttgaaaatgcagaagcaggattaagattggatgacaggccgtctgaaagctaatactttcagacggcctatttatttttgatgaacaaaattcatatttgattatcggtattccaagtattttctgccggattgttctggctggccatgaactttttgaacaggccgtctgaaaaagaaaacgctctttttcaggcggcctttttcatatttttctgaattatagtgagtccattttaaaatagtacggcgttggctcgcctagccgtattatctatactgtcttcggcccgccgccttgtcctatttttaaagtgaacccactataaaaagaattatgaaaagataattaaagtgctgatattctatattattaaaataattcatgattaatttgaaaattttgaaattgactcatggtaaagaagaaaataagatggcgttaacaggaatacagcaccattgcacaagaggtaaaagcatgagttacgcaaaagaaatcaatgcactgaacaacagtttgtgtgatttaaaaggcgatatcaacgtatcgtttgaatttttcccgccgaaaaacgagcaaatggaaaccatgctgtgggattcgattcaccgcctgaaaaaactgcatcccaaatttgtttcagtgacctatggtgccaattcgggcgagcgcgaccgcacgcacggcatcgtgaaaaacatcaagcagcaaaccggtttggatgctgcgccgcatttgaccggtattgatgcatcgcctgaagaattgaaacaaatcgcgcaagattattgggacagcggtatccgccgcattgtggcgctgcgcggtgatgaaccggcaggttatgcgaaaaagcctttttatgccgaagatttagtgaaagtattgcgctcggtggccgacttcgatatttccgtggcggcttatccggaagtacaccccgaagccaaatcggcgcaggcggatttgattaatctgaagcgcaaaatcgatgccggtgccaatcatgtgattacccagtttttctttgatgttgaaagttatctgcgtttccgcgaccgctgcgtgatggtcggtattgacgctgaaatcgtgccgggtattttgccggtaaccaatttcaagcagttgggcaagatggcgcaagtaaccaatgttaaaattccgaactggctggcaagaatgtacgacggtttggacgatgaccaaggcacccgcaatctggttgccgccagtatcgccatcgatatggtgaaggtattgtcgcgtgagggcgtgaaggatttccatttttatacgctcaaccgcagcgagctgacttatgcaatctgccatactttgggcgtgcgtccgattagtgcatcataatgttttaagttttagattttaattttaatcatttatccaacaggagagtcaatatggccacattacatttttcaggtttcccgcgtgtgggtgccttccgtgaattgaaattcgcccaagaaaaatactggcgcaaagaaatcagcgaacaagagctgcttgacgttgccaaagatttgcgtgaaaaaaactggaaacaccaagctgcggcggatgccgatttcgtggcggttgccgatttcactttctacgaccatattttggatctgcaagtggctaccggtgcgattccggcacgtttcggcttcgacagccaaaacctgactttggaacaatatttccaactggcacgcggcaataaagaccagttcgctattgaaatgaccaaatggttcgacaccaactatcactatctggtgcctgagttccacgccgataccgaatttaaagccaacgctgcacattatctgcaacaattgaaagaagcccaagcgttgggtttgaaagccaaaccgaccatcgtcggcccgctgactttcctgtgggtaggtaaagaaaaaggcgcagccgcattcaaccgtttggatttgctgccgaaactgctgccggtttatgtagagctgctgactgaattggcacaagccggtgccgaatggattcaaatcgacgagcctgctttggcggttgatttgcctaaagaatgggttgccgcctaccaagaagtgtatgccgaattgagcaaagtaaatgccaaaattctgttgagcacgtacttcggttcggttgccgaacacgctgctttgctgaaatccctgccggttgacggtctgcatatcgacctgattcgtgcgcccgaacaattggctgcatttgccgattacgacaaagtattgtctgccggtgtgattgacggccgcaacatctggcgtgccaacctcaaccaagtattggaaaccgtagagccgctgaaagccaaattgggcgaccgtttgtggatttccagctcatgctcgctgctgcacacgccttacgatttgtcggtcgaagaaaaactgaaagccaacaaacccgatttgtactcatggttggcattcaccctgcaaaaaacccaagagttgcgtgtgttgaaaaccgcattgaaccaaggtcgcgaagccgttgccgaagagttggcagccagtcaggctgctgccgattcccgtgccaacagcagcgaaatccaccgtgcggacgttgccaaacgtttggcagacctgcctgccgatgccgacaaacgcaaatcaccgtttgccgaccgcatcaaagcccaacaggcatggttgaacctgccgctgctgccgacaaccaatatcggttcgttcccgcaaaccaccgaaatccgccaagcccgtgccgccttcaaaaaaggcgaactgtctgccgccgattacgaagctgcgatgaaaaaagaaatcgctttggtagttgaagagcaggaaaaactgaatttggacgtgttggtacacggcgaagccgagcgtaacgatatggtggaatatttcggcgaattgctgagcggctttgccttcacccaatacggttgggtacaaagctacggttcgcgctgcgtgaaaccgcctgtgattttcggcgacgtaagccgtccgaacgccatgaccgttgcttggtcaacctatgcccaaaccctgaccaaacgtccgatgaaaggtatgctgaccggtccggtaaccattctgcaatggtcgttcgtgcgcaacgatattccacgttcgaccgtgtgcaaacaaatcgcactggcactgaacgacgaagtattggatctggaaaaagccggcatcaaggtcatccaaatcgacgaacccgccatccgcgaaggtctgccgctgaaacgtgccgactgggacgcatatctggattgggcgggcgaatccttccgcctgtcatccgccggctgcgaagacagcacccaaatccacacccatatgtgctactccgagttcaacgacattctgcctgcgattgccgctatggatgccgacgtaatcaccatcgaaacctcacgttccgatatggaattgctgactgccttcggcgagttcaaatacccgaacgacatcggcccgggcgtgtatgacattcacagcccgcgtgtaccgactgaagcagaagtcgaacacctactgcgcaaagctgccgaagtagtgccggtggaacgtctgtgggtaaacccggactgcggtctgaaaacccgtggttggaaagaaaccatcgagcagctgcaagtgatgatgaacgttacccaaaaactgcgtgccgaattggtttgattttgagctgattttaattaagtaacaaaggccgtctgaaagaggaaatctttcagacggcctttttatagtgaatccactatatatttggtttgtttagcacaaaaaaacgatgtcccttaaggccgaagccttaagggacagagcgttgcggcacacctttcggtggccttattgtagcaacgtttctcatttcgcagtgcaacaatggaatcaattttacgttggaaaaatagttttgtcaataaattaaaaattaattgcataaaaatactcggatgagttatatttaacatttacatacaaagggttaacgatgattatcgcaagattgaaaacgatgaattatattttgggtctggatatcggcattgcttcagtcggttgggctgtgattgaaattgatgagcaggaaatgccgaagcgtttaatagacgtgggcgtgcgggtatttgaaaaggctgaaacggctaaagaaggggaatctttaaataaagtccgccgtgaagcgcgtagtcagagacgtattatccgccgccgtgctcatcgattgttgcgcgcgcgacggctgttaaagcgcgaaggggttttgcaggcggaagattttgatgaagcaggcttggtcatcggcttgcccaatatgccttggcaattgcgcgtggctgcgcttgatcggaaattgatgccgaaagagtgggcggcggtgttgctgcatatgattaaacaccggggctatctatcgcagcggaaaaatgaggagcaaaaagcggcaagcgaaggcgataaggaagcaggtgcgttgctcaaaggagtaaaggccaatcataacgccttaaaagacaaaaaattccgcacacctgctgaattagccgtgaaaaaattcgagcaggaaaccggtcatatccgtaatcagcgcggtgattattcgcatacgtttaaccgtaaagatttattggccgaattggatttattatttgaaaagcaaaaagaatacggcaatcctcatgttttagacggcctgaaaaaagcagttgaagatttgctgatggttcaacggcctgcgctttccggtaatgcggtgcaggaaatgttggggcattgtacttttgaaactgctgaatataaggctgctaaaaatacttacaccgccgagcgttttgtttggctgacgaagctgaataatttgcggattttggaaaatggcacagagcgggcactaacggatagcgagcgcagccaactgattgatttgccgtatcaaaaatctaagttgacttatgtacaagtgcgtaagaaattggaattgaatgaaaccgcttattttaaggggttgcggtatggcaaagacaatgctgaaaatggcatattgatggaaatgaaagcctatcatgccatcaaccgggctttggaaaaagaaggtttgaaagataagacatcgcctttggtatacagccctgaattgcaagatgaaatcggaacggcattttcactgtataaaaccgatgatgatattcgaggccgtttgaacggattattgccggaagcagagttaaatgcgctgctttttcatttaaatttcgagaaatttattcaaatttcgcttaaagcgttgcgtaaagttctgccattgatggagcaagggcagcgttatgatgaggcttgtcggtcggtttacggtgatcattatggtcagaaagaaaagcgtgaagaaatgtatttgccgccgattccggctgaccaaattcgtaatccggtagtgttgcgcgccttgtcgcaggcacgaaaaatcattaatgccgtggtgcgcagatatggatcgccaatgaggattcatatcgagacagcgcgtgaagtcggtaaatcttataaagaccgcaaagatattgaaaaacgccaagaagaaaaccgccgtgatagagaaagagcggtggtggagtttaaaaaacgtttcccaaattttgccggtgaacccaaagccaaagatattttgaaaatgcgtttgtatgagcagcagcatgggcaatgcttgtattcaggtaaaaaaattgatttagaccgtctgaatgagaaaggctatgtcgaaattgaccatgcgttgccattttcccgaacatgggacgacagctttaataataaagtgctggtgttgggcagtgaaaaccaaaacaagcgtaatcaaaccccatacgaatattttaacggtaaagaaaatagccgtgaatggcggggatttgttgcgcgtgtacaaacctgccgttttccatacagtaaaaaacaaaaaattttgctgcaaaaaattgatgaagaaggttttagagaacgcaatcttaacgatacccgctatgtgaatcgtttcctgtgtgaatttgtagccgataatatgatgttgaaaggcaaaggcaagcgtcgcgtgtttgcctctaatggccaaattaccaatcttctacgcggcttctggggtttgcataaagtacgttccgataatgaccgccatcatgccttggatgccgttgtggtggcttgttcaacggctgctatgcagcagaaaatcaccaattatgtgcgttatcgtgaaatgaatgcatttaatggggaaataatcgataaatcaaccggcgaagtcacacgattaagcttcccacagccttgggattttttccgccaagaagtaatgattcgtgtatttggccgtccggaaggtgacccgcaatttgagatagctgatacggtagaggatttaaaagctttgttggcagataaattgtcttcacggcctgatgcagtacatgaatatgtgacaccgctgtttgtttctcgtgcgccaaataggaagatgagcggtgcacataaagatactttaaggtctgccaaacgatttgttttacaaaatgaaaaaatcagcgttaaaagagagtggttaaccgatattacattcaaggatttggagaatatggttaattataaaaatgggcgagaaatagagctttataaggaacttaaagcacgtttggaggagtatggcggtaatgctaaaaaagcatttgacccaaaggaaaacccgttttataaaaagggagggcaacaggttaaagctatccgcattgaaaagactcaggaaagtggtgttttgttaaataaaaaacatgcatataccatggctgataatggcgacattgcgcgggtagatatattcagtaaaaccaataagaaaagcaaaaagcagtattttgttgttcctgtctatgcttggcaggtttcggaaggtattttaccgaatatagattgcaaaggttatgaaatcgatgatagttatacattctgttttactttgcaatcaggagatttaattgctgttccaaatccaattgatggaaaagaaaaaatatttgcttattatatttcttgtgatagttccaatggaagattaattttgatgttgccagataagtcagtctgtcctgatggttacccaaaatttaaagatggtaagcaattccgtattagttcgcaaaatagttcatttattgaaaaatacactgttgatgaattaggtcaagaaatcagaccatgccgtctgagaaaacgcccaccggttcgttaatttatttattccctgtttcaggccgtctgaaacagggatttttcgtctttaatgataggtttaggggattatcatgacttggaggagcttactcattcaaaacagcagcaagttatctttgcaacgtaaacaactcaatatccaacaagaaggagaaagttataccgtacctttagaagacattgcagtcatcgtggttgaaaaccgtgaaacagtgattaccacgccgctattatcggccttggcagaacatggcgtaactttgctgacctgtaacgagcagtttttaccttgcgggcagtggttgccattttcacaatatcaccgccaactgaaaaccttgaaactgcaaatacatgcgggagagccaattaaaaaacagctttggcaaaaaattgtgaaacaaaaaattctcaatcaggctttttgtgtggatgaaaccgggaacgatattgcagctaaacgtttgcgtatattggcttctgaagtgaaatcaggagacaacggcaatcgggaagcacaagcagcagcattatattttcaggtactgtttggcgaacggtttacccgcacagaagacaatcaaatcaatgcgcatttaaattatgcctatgccgtattgcgtgcagcagtcgcgcgcagcctaaccttatatggatggttgcctgcattgggtttattccacaaaagcgagctaaatccttttaatttagctgatgattttatcgaaccgcttcgtccactagttgatttaatggtgactcaattaaaagaaaaaggccgtctgaaagaacaattagacacaatggcaaagcagcagcttatcagcgtgttgcaccatcaaatgatgattgaggagcaaagtttcagcacattagcagccattgataaaatgatttcatcgtttcagacggccttgagtcaaaaaaatgctcgttttttgaaattacctgagttacaaacattaaaggcatatcaatatgagtgaggcgaaatttatgagaattatcgtttttttcgatttgccggttaccactgcagccaagcgaaaagtggccaaccaattccgacattttttgctcaaagatggttaccaaatgctgcaattatccgtttacagccgaattgtaaaaggtagagattcgttgcaaaaataccacaataggttgtgtgcgaacttgcctgaagaaggttctgtacgctgtttagaggtgacagaaaagcaatttgccggtatgaaattgcttttgggagagttaaaagtacaagaaaaaaaggtcaatgcagaccaattattgttgttttaagaagattttaaattagaaaaaccaagcggaaagtcttatcaaataaggcttttcgcttggtttattgtagcactgcgaaatgagaaagggagctacaactaccgtcgcatactgcgacgagctgaatatattgtagcactgcgaaatgagaaagggagctacaacatctgctatttgataagtggttgattatttattgtagcactgcgaaatgagaaagggagctacaacaaaaagcaaacggttgatacgctgaatatgattgtagcactgcgaaatgagaaagggagctacaacgaataacgacactgccgccgaatgtacaaaattgtagcactgcgaaatgagaaagggagctacaacgagagcatagtagtatgaacggcgggcgcaattgtagcactgcgaaatgagaaagggagctacaacctggcattcagacaccgtgcacgtgcacaaattgtagcactgcgaaatgagaaagggagctacaacgccagcctgattatcacaccgaaagaaacaattgtagcactgcgaaatgagaaagggagctacaacccgctgggcctgctacaccgccaaagcctaattgtagcactgcgaaatgagaaagggagctacaacgaaaggggcttccaatcctccaagccaaacattgtagcactgcgaaatgagaaagggagctacaacgccgacgcgacaatatgggcattaaattagattgtagcactgcgaaatgagaaagggagctacaactaaatattatccgacagggcacacgcaggtattgtagcactgcgaaatgagaaagggagctacaacagcatcgcacgcttggttaaactcatgttcattgtagcactgcgaaatgagaaagggagctacaacctcggccgtgaagtattaccagctttcggcattgtagcactgcgaaatgagaaagggagctacaactaagttggtgcgttgacggcagatggcacgattgtagcactgcgaaatgagaaagggagctacaaccccgcgcgttgtacaataggcgaagttttaattgtagcactgcgaaatgagaaagggagctacaacgattctacacggccttcgacggtaggaataattgtagcactgcgaaatgagaaagggagctacaacaattatgcaaaaacaagcgtttttgaagaaattgtagcactgcgaaatgagaaagggagctacaactgaatttagacgacgtaaaattattgggtaattgtagcactgcgaaatgagaaagggagctacaactcaataagttcataactgaatttgaaagcaattgtagcactgcgaaatgagaaagggagctacaacttgaaaaagaattggaaatccatcgtgctgattgtagcactgcgaaatgagaaagggagctacaacacaaaatgaataccacacttaaagaatttgattgtagcactgcgaaatgagaaagggagctacaaccgaactccgctttcagtgccttgcgcttgcattgtagcactgcgaaatgagaaagggagctacaaccggggggctgggggggtatgtgggtgtggaattgtagcactgcgaaatgagaaagggagctacaaccccgaccaagaactacaagcactaccgcaaattgtagcactgcgaaatgagaaagggagctacaacatccatacctcaaactatgtagaggatttgattgtagcactgcgaaatgagaaagggagctacaacttaatctttttaactcccaccgatagttatattgtagcactgcgaaatgagaaagggagctacaactagacttcatacacagctcgtccgtcttagattgtagcactgcgaaatgagaaagggagctacaacgttcaatccctacatgttcgtattggatttattgtagcactgcgaaatgagaaagggagctacaacatccaacacgctgggggcggatttaggtgcattgtagcactgcgaaatgagaaagggagctacaacgttcaatccctacatgttcgtattggatttattgtagcactgcgaaatgagaaagggagctacaactccatacctcaaactatgtagaggatttgcattgtagcactgcgaaatgagaaagggagctacaacttggcgttctcgtggcgactggggcgagttattgtagcactgcgaaatgagaaagggagctacaaccatgaacgcttgtgtaataacgtaaaccgtattgtagcactgcgaaatgagaaagggagctacaacgcgagcataacagtatggacggcggacgtaattgtagcactgcgaaatgagaaagggagctacaacgtagcagcgtctgtattatgtggtacggatattgtagcactgcgaaatgagaaagggagctacaacccgcgccacccgtaataccgccctgactagattgtagcactgcgaaatgagaaagggagctacaacgtatgccgccgcgcgggcagaaaacaggaaattgtagcactgcgaaatgagaaagggagctacaactcatctcgtcgtcagggacgtattgtcgcaattgtagcactgcgaaatgagaaagggagctacaaccttacatatcaacttgagcgagggctacctattgtagcactgcgaaatgagaaagggagctacaacttgaccaaccaagatatgcacgataggtggattgtagcactgcgaaatgagaaagggagctacaactcttcctttcgttttatgttagtcgagttaattgtagcactgcgaaatgagaaagggagctacaacggataccggagaaaccggacatatccgagcattgtagcactgcgaaatgagaaagggagctacaacgtgggatgcgtattgtcaaaaaactgcacgattgtagcactgcgaaatgagaaagggagctacaacgtttcggcagacatgaaccctccagcggcaattgtagcactgcgaaatgagaaagggagctacaacgtttttacctctctgtttccgattgccagaattgtagcactgcgaaatgagaaagggagctacaacagcaaagcacaagaacaggccgtccacgttattgtagcactgcgaaatgaaaaaaaaggcttaagcaattctaatcaataatcaagcataaagccgtctgaaaactttcagacggccttttttctatgcacatccgttatttctaatttatcataataaaaactattacaagagaaataatttatgttacgttatgtattgccgtgttgggtgttcggggtattggtgtcattcctgctgcctgtggtgccgccgctatggctttggcttgcggtgtttggggtaattttattggcggcttggtattggaaaccattggcagtgttgttatgtgtgttgtttggtatggcttatggggtatggcgcacggaatcggcgttggggcggcaatggccgctggagcggccggaggatgtggcgttgacggtggtggtggacgatttgccgcgtcgtgatgagcggcgggtacagtttgcggcgaaggtgtgggataaagatggcggcgaatatcggctgatgttgtcggattatcagttgcgtgattggccggtgggcagccgctggcaggtgtcggcgcgggtacggccggtggtgggtgaggtgaatctgcgagggttgaaccgtgaggcgtgggcgctggccaatggtgtgggcggcatgggttcgttgggtaggggcagggtattgctgggggaatcgggcgggctgaatttgacgctttggcgtgaacgcattagccgtcattggcagcaggcgaatcttggcgggcatgagttttcagacggcattggcttgatgcgggcattggggattggtgaacaatcggctttgcgggcgaaattgtggcaggcgttccggcctttgggtttgacgcatttggtgagcatttcgggtctgcatgtgacgatggtggcggtgtggttcggttttttgacgaaactgttgctacgggtgctgcctgtgccgaagcggccgagattgtgggtgttgacgggcggtgtgctgggcgcgctgctgtatgcgggtttggcgggctttggtgtgccgacgcagcgcagtgtgctgatgttggctgggtttgcttatgtgtggtggcgcggcagtggctcatcaccgtggacggggtggtggcaggctttggcgctggtgttgctgtttgatcctttggcggcattgggtgtgggtttgtggctgtcgttcggtttggtggcggcgttgatttggtcgtcggccggtcgtctgaacgagcgcggccggtggctggctatgcgtgggcaatgggcggcaactttgttgtcagtcgtgttgctgggttatatgtttgcgtcgttgccgctgctgagcccgttggtgaatttgctggcgattccgtggttttcttgggtgttgacgccgctggctttgctcgggtcggctgtgccgtttgcaccgttgcaatggttggcggcggctttgggagaatacacgctgcggtttttagtatggttggcagcgtattcgcctgagtttgcggtagcggctgcgccgtggccgttgatggcgtcggcagtattggctgcgttgattttattgctaccacgcggtacggccttgaaaccatgggcttggttggtgttgattggatttgtgttttatcgtattcagcctttaccggaaggccgtctgaaagtatgggtatgggatgcggggcaaggtttgtcggtattgatgcagacacgtgaacgtcgtttgttgttcgataccggtacggcgcatgcggcaggtgcgggcattgtgccgagcttgaatgcgctgggtatccgccggctggataagctggtattgtcgcatcatgatattgatcacgacggcggctatccggcaatcaagcgcacccaaccgccggaaaagctgctggccggtcagcccgggttttatccgcaagctgagttttgtgatgaatcgcgatggatgtgggatggtgtggcatttgagtttttaaggccgtccgaacattattctggtaaggatgataatgatgaaagctgcgtgctgcgtgtggtggctgacgggcaggcgctgttgattaccggcgatatggggcagaagggtgagatggatttggtgcaaaaatacggcgatgcgctgtacagccaagtattggttttgggacatcacggcagcaataccgccagcgcgggcgcgtttttgaacgcggtgtcgcccaaatatgcggtggcatcgagcggctatgccaatagctacggccatccgaccaaggcggtgcaaaacaaagttgcggcgcatggggcgatattgttgcgcacggatttgtcgggtgcgctggtgtttgagttgggcagtggaacagaaatctttcaaggccgtctgaaacagaaaaagttttattggcagaaaaagccgtttgattgaatgaacgcaatggaaaaatgcgttcagacggcctgagtacaaacttaacaaaagtatagttatccttgctttgtgtgaatcctgctgtggataataaggtttgtggattgaaaattaaagagaaaatataattgtttaaaaaataggcaaagtgatttttatgcaaaaagcgttgaatccgtcaagcggaatgtgttttttcagacggcattttgttgcaaattatagtgaatccactttaaagtagtacggtgttggttcgcttggccgtattatctatactgtcttcggcttaccgccttgtcctattttaaagtgaatccactatacagatgatttgggaatactcattaggagataaatcgggccgatatgcgtgattaaggtgtgcgatggtgtgtgaatcatgtggataactggctttgttggttgaattttaataagaaaaaatttctgcttaaaatttaatcaataatagataggccgtctgaaaaccattttttcagacggcctgataatttgatagatgatgttagggcaacagtttgcccggattcataatattgtgcggatccaattgtgctttaatggcgcgcattaaggcgatttcggctgcatcccgcacacgggggagccaatggcttttgatttcgccaatgccgtgttcggcagcgatggtgccttgatgttttaagatatgctcgtaaacaatggtgttgatgatttcttcgtatacatacacttcgttgctcataatgtcgggcaggaaggtgttgtaatgcaggctgccgtcgcccaagtggccgaaacagacgatttggatatcggcaaagcgcgcttttaaggcggcagcgcattcggtcacaaaatcagctgcattcgcaatcggggtagcaatgtcgtgtttgatgctggtgcctaaattgcgctgcgaagcagagatgttttcgcgtaaagcccacaattcttggcgttcttgctcggattgcgccaatacgctgttttcataaccttgagcgtaaaggtattcggccaattgcctggccaagtcggtatcgggaacggaatcggccagttccatcaaaatatgccaatcggcattggtaggcttagttaatttactgaattcagacgataaatccaaggcaaaacggctaattagttcgaagctgcataagcgttcggcaaaatggccttggattttggtgagcagcgtcactgcttcatcgatgccgggtaagcctatccatgcggtggcggtagtttgagggcgggcaaagagttttagggttgcggcggtaattacgccgagtgtaccttcactgccgatgaataaatggcgcaagtcgtaaccggtggtgtttttatgcaaaggttgcaggtgcgaaatcaattcgccgttgggtaaaacgatttccaagcctaagaccaaatcgcgcatagcgccgtagcgcaacacattcaacccgccggcattgcaggcgatgttgccaccgatttggcaggagcctttactggccaaatttaagggaaacaagcggccggcattggcggcggcttcttgcgcatgttgcaaaatcatgccggcttcgacggtcatgctgttgtcggacagattgatttcgcgcagtttgttgagtttggaaaggttgagcaacacgccttggcgggcaactgccgcgccgcataaaccggtattgccgccttgcggggtgacagtgatgcggttctcatgacaaaagcgcaggattttttgcacgctttcaacggaatggggttgcaggataatatccggtgtggaagtaaagcggcggcgttggtcgatgatgagtgaggcagccggctcaagtatttctgaaggggcgagaaatgattgaaaggaggtgagtaggtcggtgtgcatgctgtgtctgatgattggttttgtttttaatgaatcaagattatagcgcaaatctgcaaataagccgggctacaagcaaaagggtataaaaggccgtctgaaaaacaaaaagcaggatactttagaaaagtatcctgcttttttattctgaaacagaatattagttggcggcagaagcagcggcttcagaagcagcatcggcagcagaagcagcttcagttgcagaagcagcggcagaagcggcttcggtagcggcagcagaagcttcagaagcagcttcggtagccgcttcggtagcggcagaagcagcttcggtagcagcagaagcggcagcgtcaacagcagaagcagcagcgtcggtagcaacagaagcggcagaagcggcttcagcagcagcgtctttagccggctcagaaccaccgcaagcggccaaagtcaaagacaacaaagcagcagcgaacaatgaatttttcattttataaccttcttttttaaatcgatttaaagtaaaaactaaaaaacggccgcatagcggcctctacaaatagaaattcattactgaattttcttaattatgccccaccgtataagccattgcaacggcgcggaattaagagagagcgcagaatgaattacttagtttggtaaaataacaaaatagttccgaatttttagaaattttgtaatgattcttccgtaaaattctggctaaatatttttgaattcaaccgtttattatcttgattgaaggtgtttgtgacaagcgcgtgaaaattttggcgaagcgttagtttttgcaatttggttgtggaaaaacaacaataaatattaattttgtgaaaagccggggtttaatttgcaagtggcaaaagacggtgcttaccggcttttgccggtgccgtcagaatgacacacttcaagcagcggctctgtgttagaatgcagcctgtatcaacgtggtaacaattaacaaggacgacaaaatggcgattgctaaaaattcagtagtatccctgcattacgaaatgtacgatgccaacaaccaattattggacaaaaccgaagaacctattgagtatctgcatggcggttacgatggtatttttccattggttgaagaagcattacacggcaaaaatgtcggtgagaccgtagaagtggcattgtcgcctgatgatgcgtttggcgaacaagatccggaattggtgcgcattgaagatgtcggtgtatttccggttgaagttgaagtgggtatgatgtttgaagccgacgatccggaaaccggtgaagtgttgatttaccgtgtaac

SEQ ID NO: 2704 - DNA, 23252 bp, synthetic construct
  misc_feature 1..23252: note = Synthetic
  source 1..23252: mol_type = other DNA
tttaacgagttttcaacatctcacaaaaaatcatcaaccgctttggaaatgaacgtacgtcaatttattaaaacatccggccttttccatttgatcgaatcctaaacccaaacacccaagttttcagcgcaatccgtttctttctcggtgaaggaatggcgattttgtatttcaacacattctgtgcgccgtcgcgttcgatttcgtttaataaggcataataaatcgcagccatcaccaagccgactttttggttttttttgtcggcggcgggcaatagggcgagggcttggcggtaggtgtcgcgcgcgcgttggatttgaaagcccataagttcgccgaattcgggcgtgggctgatattgcatgatggcggcggcgggtacgttgaagcgttgcagctcttccatcggcaggtagatgcggccgttgcgggcatcttcgccgacatcgcggatgatgttggtcagttgcagcgccaagcccatttggtcggcgtaatcaagggtttgtgggttagtaaagcctaaaatgcgggcaatcaggcagccgactacaccggcggcgcggcggcagtaaagtttgagttcctcaaacgtggcgtagcgggcttgatccaaatccatctgcatgccgtcgatgagttcgacaaattcgctttgcggcagattgaaggtgcgggcaacgggctgtaaggcttggttgaccgggtgttcgggcaggccgtctgaaaaggcgcgcgccaagtcgaggcgccaccagttgagcgtggtttgggcgatgtttttgtcgctgcaatcatcgactgcatcgtcgagctcgcggcaaaaagcgtataacgccgtcattgcatcgcgcctgtgttcgggcaggaatttgaagcccgataaaaagctggaaccgctttcggcggctttttggcggcagtattcgatgggttgcacggcgtgtcctgtgggtcgattatgatgattgtgacggaattgtatagcgatttggggttgaactgaaggccgtctgaaaaaattgtgtttttcagacggcctgagatttttgtcaaattcaatttgaatcaggagatgtatgcttgtcattccctcccgggcgggaatccggaaattaaaattaccgtcgtagctcaatattcctgaaaccggtaggtccggaccccgtccgtgcgagaatgacggctaaagatttctgaaaatctatgcgttttccaaaggttccgaccttcgataccgtgcagggctgaaaagcccattgagattggctattattcccgactaaaccactcaactatcggcgtcaaatctgttagaatacggccgatgacacaataaaaccaaaaggcacaccaaccatggcacttttgcaaatttccgaacccggcatgtctgccgcaccgcatcaacaccgtttggccgtgggcatcgatctcggcaccaccaacagcctggtcgctaccgtgcgtagcggcagcgctgtttgtctgtctgacgagcacggccgcaaaacttttccttctgtcgtgcgctattgcgaagacggccgtgtggaagtcggcgcggatgccctgaaagcgcaaaaaatcgatccgattaataccatcagttcggccaagcgtttaatcggccgcactttggccgacttatcgaaagaaacgcattacctgccttaccgcttcggcaacaacgaacgcgtgattgaattgaacacgcggcagggtgcgaaaacgccgattgaagtgtcggcggaaattctgaaagttttgaaaacgcacgccgaagagagcttgggcggcgatttggtgggggcggtgattactgtgccggcgtattttgacgatgcgcaacgccaagccactaaagatgcggcgcgtttggccggattaaacgtgttgcgtctgctcaacgagccgaccgccgcggcgattgcctacggtttggacaacggctcggaaggcacgtttgtggtgtacgatttgggcggcggcacctttgatgtgtcagtgttgcagttgaccgaaggtttgttccaagtgaaggccacgggcggcaattccgctttaggcggcgatgatttcgaccatcgtttgttctgccatattttggaacgcgccgatttgtcgaaactcaatgagcaagacagccaattattgctggccttgacccgcaaagccaaagaaaccttgaccaccgaaaccggcgcggccgtgcaggccacgctttcagacggccataaggttgatgtgaccattacgcgccaagagtttcatcaattgacacagcatttggtgcaaaaaaccatcgaaccggtgaagcaggcattgaaagatgcaggtgtgaccaagaccgatattaagggtgtgattatggtgggcggttcgacgcgtatgctgcacgtgcagcaagcggtggcaaccttcttcggccaaacaccattgaataatctgaatcctgatgaagtggtggcgctgggcgcggcgatgcaggccaatgtgttggccggcaataaaaccgacggcgaatggctgctgctcgatgtgacgcctttgtcgctcggtttggaaacctacggcggcttggcggaaaaaatcattccgcgcaacagcaccttgccggtggcgcgcgcgcaagagttcaccacgtttaaagacggccaaaccgcgatgacgattcatgtggtgcagggtgaacgcgagctggtatccgattgccgcagcttggcaaaattcaccttgcgcggcattccgccgatggtggccggtgcggcgcgtatccgcgtgattttccaagtggatgccgatggtttgctgtctgtatcggcgcaagagcaaaccgtcggcgtaagcgcgcaaatcgaagtgaagccgtcttacggtttggacgacgataccatcacgcaaatgctgaaagaaggtatgagtaacgccgccgacgataaagccgcgcgtgcgcgcgccgaagccacagtcgaagccgaaagcctgatggatgccgtcaaggccgcgcttgagctcgacagcgatttgcttgaagctgaagagttggccaaaatcgaagccggcatcaccgctttgcaggaccatgtgcaaaatggcagcgccgatgagattcgcaccgccgtgactgcgttgagccgcagtaccgacggtttcgccgccaagcgcatgaaccgcaacatccggcgcgcgctgatggggcagagcgtggacaatatttaagcagtttcagacggccttctttcttcaaggccgtctgaaaaaagaaagccgatatggaatcactcaatcaagatttatacgaacgaatcagcgcattgtgcgatcaaggcgatgagttggcggatgaaggccggtttgacgaagcggttaagcaatataaagaagcatggaggctgctgcccgagccgaaatcacagtgggaagcagcaacatggattttggccgcgatgggcgacacgcattttttaaacggcaaataccgccaagccgtaaaaaatttgaccgaagcattggcctacatcaatgcgctggataatccgtttatctatctgcgcttaggacaaagccggtttgaattgggcgaagaaaaagccgcgctcgaagccttacagacggcctatgacttgggcgatgaagaattgtgggaaggtgaagatgaaaaatacctgcaatttttggcggccaaagtggatagtattgtcatatcctgatatttaggccgagacttttgcaaaatttgtaaattcctgaaatttttaagccgtcattcccgcgtagacgggaatgacgagcatagctttttgactcaaattagggttgcaaatatttcaggccgtctgaaagattacgaaaaaaatcatgcgcttgtggcagaatctttaattggccaattgccgtgccggcagctttgggcccgataccgtgaacgtgctgctttgcgtgcgcaggttggggcggccgcatgcgacggcggatgatgtgtttagccatctgccgtataagctttttcagtatcatgtgctgattatgcaggaaatgtaccggtggttatcggcctgatgaagcgtggttcgacccgctgtatcgcggcaaaccgaaccgccttatgccgatcacacgccattgtcggccggcaacccaatttatctccgagcatgtgcggattatctgcaagagtgcttggacaatttaaagcaaaaaggcatcgtgttacgcatgcccgacacaaaccattgacatcaacgagaacataaaaatgccgaaaattaccgtattaccacacgcaacattgtgccctgaaggcgcggttatcgataacgcaccggaaggcaaaactgtattggacattttgttggattacaacatcgaagtcgatcatgcctgtgaaaaatcctgcgcctgcaccacttgtcacgtgattatccgcaaaggtttcgacagtttggaagagccgactgaaatcgaagaagacttgctcgaccaagcatggggcttggaagccgattcgcgcttgagctgccaagcggtggtggctgatgaggatttggtggtggaaattccgaaatacactattaatcatgcgcgcgaagatcattgattaaccaaaaggccgtctgaaaccatcatttgatttcagacggccttgagcacgaaattgaatataccaaaattatttctgtttataaccgccaaagctgaaacgggaaaccttaatggactgagctttgggcaggtttgcttgcgctgcggcatagttttccgttttcggttgggtgttaatccggcttaaactcttaccgagtgacgagataatgcttggcgcttccggtagagaataagcagaagattcgttgggtaattgggcaaaggcattgtttgcagggagggtggaaagcgctggttcatcggctgtcaaaccaaagccattaatcatttgcagcacaatgtcttcgcaataagcttgctcaatggcaccttttactttcacattcgccaatgataccgatatttggccgcagccgagcacttgttctgcaatgcgccgatagagattccagcgtttcaaacgaatcacggccgaattggcattcagcggaatcggttgcaggcgcacttgcccttgcttgctaccgcaatggatgcgcaaagtgacttgggtcaggccgtgttgttcgtccaaggtatggtagatatggcggatgagcagaatcagacggtcaagcgggtgtgctttggcaaaataatcaggctctttgggcacggagccgtaaaccaatttagacagcttggcattcagcgcattgttcatcggcgattccttattaattactgctggaaatagaatttaagagcattttgcgctgatttagttgcatggccgaatgtaaattagagtatattagccattgccgaacctgatttgaccgcggcaattgtttgctttacattaaaatggtttcagacggcccaagccgctacgcatcgaaaggaaatactcatgaaatggaccgatacccaacgcatcgccgaagaattgtatgacgcacacggcgacatcgacccgaaaaccatccgctttacccgcttgcgcgaattgattatggctttgcctgattttgatgacgaaccggcacattgcggcgagcgcattctcgaagccgtgcaacaggcttggattgaagaagccgaataatgggtttacaggctgtatgttcgcgctgcgcatggtttgggcggcgcggcagattgccaaagaagacacgccgtctgaaaaaattgcagacggtgtgttggatgaaatgccgccgttttgccgatggcgcagtgttgcgctgcagcatggagcaggatgagggcaattttgatgccgctgtttgtttgccgtgtgaaatcagctgtcaggtgttggcgcatcccgggcatggccgtatcacacccgagcgtaaacgctttactgattcgtgccgccattgttttggttgaaaatgcagaagcaggattaagattggatgacaggccgtctgaaagctaatactttcagacggcctatttatttttgatgaacaaaattcatatttgattatcggtattccaagtattttctgccggattgttctggctggccatgaaccttttgaacaggccgtctgaaaaagaaaacgctctttttcaggcggcctttttcatatttttctgaattatagtgagtccattttaaaatagtacggcgttggctcgcctagccgtattatctatactgtcttcggcccgccgccttgtcctattttaaagtgaatccactataaaaagaattatgaaaagataattaaagtgctgattttctatattattaaaataattcatgattaatttgaaaattttgaaattgactcatggtaaagaagaaaataagatggcgttaacaggaacacagcaccattgcacaagaggtaaaagcatgagttacgcaaaagaaatcaatgcactgaacaacagtttgtgtgatttaaaaggcgatatcaacgtatcgtttgaatttttcccgccgaaaaacgagcaaatggaaaccatgctgtgggattcgattcaccgcctgaaaaaactgcatcccaaatttgtttcagtgacctatggtgccaattcgggcgagcgcgaccgcacgcacggcatcgtgaaaaacatcaagcagcaaaccggcttggatgctgcgccgcatttgaccggcattgatgcatcgcctgaagaattgaaacaaatcgcgcaagattattgggacagcggtatccgccgcattgtggcgctgcgcggtgatgaaccggcaggttatgcgaaaaagcctttttatgccgaagatttagtgaaagtattgcgctcggtggccgacttcgatatttccgtggcggcttatccggaagtacaccccgaagccaaatcggcgcaggcggatttgattaatctgaagcgcaaaatcgatgccggtgccaatcatgtgattacccagtttttctttgatgtcgaaagctatctgcgtttccgcgaccgctgcgtgatggtcggtattgacgctgaaatcgtgccgggtattttgccggtaaccaatttcaagcagttgggcaagatggcgcaagtaaccaatgttaaaattccgaactggctggcaagaatgtacgacggtttggacaacgaccaaggcacccgcaatctggttgccgccagcattgccatcgatatggtgaaagtgttgtcgcgcgagggcgtgaaggatttccatttttatacgctcaaccgcagcgagctgacttatgcaatctgccatactttgggcgtgcgtccgattagtgcatcataatgttttaagttttagattttaattttaatcatttatccaacaggagagtcaatatggccacattacatttttcaggtttcccgcgtgtgggtgccttccgtgaattgaaattcgcccaagaaaaatactggcgcaaagaaatcagcgaacaagagctgcttgacgttgccaaagatttgcgtgaaaaaaactggaaacaccaagctgcggcggatgccgatttcgtggcggttgccgatttcactttctacgaccatattttggatttgcaagtggctaccggtgcgattccggcacgtttcggcttcgacagccaaaacctgactttggaacaatatttccaactggcacgcggcaataaagaccagttcgccatcgaaatgaccaaatggttcgacaccaactatcactatttagtacccgaattccacgccgataccgaatttaaagccaacgctgcacactatctgcaacaattgaaagaagcccaagcgttgggcttgaaagccaaaccgaccatcgtcggcccgctgactttcctgtgggtaggtaaagaaaaaggcgcagccgcattcaaccgtttggatttgttgccgaaactgctgccggtttatgtagagctgctgactgaattggcgcaagccggtgccgagtggattcaaatcgacgagcctgctttggcggttgatttgcctaaagaatgggttgccgcttaccaagaagtgtatgccgagttgagcaaagtaaatgccaaaatcctgttgagcacgtacttcggttcggttgccgaacacgccgctttgctgaaatccctgccggttgacggtctgcatatcgacctgattcgtgcgcccgaacaattggctgcatttgccgattacgacaaagtattgtctgccggtgtgattgacggccgtaacatctggcgtgccaacctcaaccaagtattggaaaccgtagagccgctgaaagccaaattgggcgaccgtttgtggatttccagctcatgctcgctgctgcacacgccttacgatttgtcggtcgaagaaaaactgaaagccaacaaacccgatttgtactcatggttggcattcaccctgcaaaaaacccaagagttgcgtgtgttgaaaaccgcattgaaccaaggtcgcgaagccgttgccgaagagttggcagccagtcaggctgctgccgattcccgtgccaacagcagcgaaatccaccgtgcggacgttgccaaacgtttggcagacctgcctgccgatgccgacaaacgcaaatcaccgtttgccgaccgcatcaaagcccaacaggcatggttgaacctgccgctgctgccgacaaccaatatcggttcattcccgcaaaccaccgaaatccgccaagcccgtgccgccttcaaaaaaggcgaactgtctgccgccgattacgaagctgcgatgaaaaaagaaatcgctttggtagttgaagagcaggaaaaattggatttggacgtgttggtacacggcgaagccgagcgtaacgacatggtggaatacttcggcgaattgctgagcggctttgccttcacccaatacggttgggtacaaagctacggttcgcgttgcgtgaaaccgcctgtgattttcggcgacgtaagccgtccgaacgccatgaccgttgcttggtcaacctatgcccaaaccctgaccaaacgtccgatgaaaggtatgctgaccggtccggtaaccattctgcaatggtctttcgtgcgcaacgatattccacgttcgaccgtgtgcaaacaaatcgcactggcgctgaacgacgaagttttggatctggaaaaagccggtatcaaaattatccaaatcgacgaaccggccatccgtgaaggtctgccgctgaaacgtgccgactgggacgcatatctggattgggcgggcgaatctttccgcctgtcatcaaccggttgcgaagacagcacccaaatccacacccatatgtgctactcagagttcaacgacattctgcctgcgattgccgctatggatgccgacgtaatcaccatcgaaacttcacgttccgatatggaattgctgacagccttcggcgagttcaaatacccgaacgacatcggcccgggcgtgtacgacattcacagcccgcgtgtaccgaccgaagcagaagtcgaacacctgctgcgtaaagccatcgaagtagtgccggtagaacgtctgtgggtgaacccggactgcggtctgaaaacccgtggttggaaagaaaccatcgagcagctgcaagtgatgatgaacgttacccaaaaactgcgtgccgaattggtttgattttgagctgattttaattaagtaacaaaggccgtctgaaagaggaaatctttcagacggcctttttatagtgaatccactatatatttggtttgtttagcacaaaaaaaacgatgtcccttaaggccgaagctttaagggacagagcgttgcggcacacctttcggtggccttattgtagcaacgtttctcatttcgcagtgcaacaatggagctgattctacgttgggaaaatagctttgtcaataataatttaattgcataaaaatacccggatgaggtatatttatatttaacatttctatacaaagggttaacgatgattaccgcaagattgaaaccgatgaattatattttgggcctggatatcggcattgcttcagtcggttgggctgtgattgaaattgatgagcaggaaatgccgaagcgtttaatagacgtgggcgtgcgggtatttgaaaaggctgaaacggctaaagaaggggaatctttaaataaagtccgccgtgaagcgcgtagtcagagacgtattatccgccgccgtgctcatcgtttgttgcgcgcgcgacggctgttaaagcgcgaaggggttttgcaggcggaagattttgatgaagcaggcttggtcatcggcttgcccaatatgccttggcaattgcgcgtggctgcgcttgatcggaaattgatgccgaaagagtgggcggcggtgttgctgcatatgattaaacaccggggctatctatcgcagcggaaaaatgaggagcaaaaagcggcaagcgaaggcgataaggaagcaggtgcgttgctcaaaggagtaaaggccaatcataacgccttaaaagacaaaaaattccgtacacctgctgaattggccgtgaaaaaattcgagcaggaaaccggtcatatccgtaatcagcgcggtgattattcgcatacgtttaaccgaaaagatttgctcgccgaattggatttattgtttgaaaaacaaaaagaatacggcaactctcatgtttcagacggcctgaaaaaagcagttgaagatttgctgatggttcaacggcctgctctttccggcaatgcggtgcaggaaatgttgggacattgtacttttgaaactgctgaatataaggccgctaaaaatacttacaccgccgagcgttttgtttggttgacgaagctgaataatttgcggattttggaaaatggcacagagcgggcactaacggatagcgagcgcagccaactgattgatttgccgtatcaaaaatctaagttgacttatgtgcaagtgcgtaagaaattggaattgaatgaaaccgcttattttaaggggttgcggtatggcaaagacaatgctgaaaatggcatattgatggaaatgaaagcctatcatgccatcagccgggctttggaaaaagaaggtttgaaagataagacatcgcctttggtatacagccctgaattgcaagatgaaatcggaacggcattttcactgtataaaaccgatgatgatattcgagaccgtttgaacggattattgccggaagcagagttaaatgcgctgctttttcatttaaatttcgagaaatttattcaaatttcgcttaaagcgttgcgtaaagttctgccattgatggagcaagggcagcgttatgatgaggcttgtcggtcggtttacggtgatcattatggtcagaaagaaaagcgtgaagaaatgtatttgccgccgattccggctgaccaaattcgtaatccggtagtgttgcgcgccttgtcgcaggcacgaaaaatcattaatgccgtggtgcgcagatatggatcgccaatgaggattcatatcgagacagcgcgtgaagtcggtaaatcttataaagaccgcaaagatattgaaaaacgccaagaagaaaaccgccgtgatagagaaagagcggtggcggagtttaaaaaacgtttcccaaattttgccggtgaacccaaagccaaagatattttgaaaatgcgtttgtatgagcagcagcatgggcaatgcttgtattcaggtaaaaaaattgatttagaccgtctgaatgagaaaggctatgtcgaaattgaccatgcgttgccattttcacgaacatgggatgacagctttaataataaagtgctggtattgggcagtgaaaaccaaaataagggcaatcaaacgccatacgaatattttgatggcaaggaaaatagccgtgaatggcggggatttgttgcgcgtgtacaaacctgccgttttccatacagtaaaaaacaaagaattttgctacaaaaaattgatgaagaaggttttagagaacgcaatcttaacgatacccgctatgtgaatcgtttcctgtgtgaatttgtagccgataatatgatgttgaaaggcaaaggcaagcgtcgcgtgtttgcctctaatggccaaattaccaatcttctacgcggcttctggggtttgcataaagtacgttccgataatgaccgccatcatgccttggatgccgttgtggtggcttgttcaacggctgctatgcagcagaaaatcaccaattatgtgcgttatcgtgaaatgaatgcatttaatggtgagatgattgataaaacaaccggtgaagtaacacgattaagttttccgcagccttgggatttcttccgccaagaagtaatgattcgtgtatttggccgtccggaaggtgacccgcaatttgagatagctgatacggcagaggatttaaaagctttgttggcagataaattgtcttcacggcctgatgcagtacatgaatatgtgacaccgctgtttgtttctcgtgcgccaaataggaagatgagcgggcaggggcacttggaaaccattaaatcgtctaaacgtttagctgaaggtatcagtgtcttacgtgtgcctttaatgcagttaaaactttcggatttagagagaatggtcaaccgcgaccgtgaacctaaagtatatgaagctctgaaagcgcgtttggaaaactatggaaatgaccctgctaaagcctttgcagagccattttacaaattagataaaaatggtcttcctacccagcaagttaaagctgtgcgtgtcgagcaagtgcaaaaatcaggggtgcttgtacgagaagaaaacggcgtagctgataatgccacaatggtcagagtagatgtatttgagaaaggtggcaaatatttcttagtacctatttatagctggcaggttgccaaaggaattttgccggatagggcgattgtggctttaaaagatgagtcagagtgggaaaaagttgatgacagctttacttatcagttcacgctttatgctaatgatttaatcaagataggattaaaaaagggtacattctttggttattacattggtcttgatagaacaactggtgctattgcgattagagagcatgatctagacaaaagtaaaggaaaagacggtatttaccgtatcggtgtcaagacggctctttcgttccaaaagcttcaagtagatgagcttggcaaagacattaccccatgtcgtcctaaaaaacgtccaccggttcgttaatttatttattccctgtttcaggccgtctgaaacagggatttttcgtctttaatgataggtttaggggattatcatgacttggaggagcttactcattcaaaacagcagcaagttatctttgcaacgtaaacaacttaatatccaacaagaaggagaaagttataccgtacctttagaagacattgccatcatcgtggttgaaaaccgtgaaacagtgattaccacgccgctattatcggccttggcagaaaatggcgtaactctgctgacctgtgacgaacagtttttgccttgcgggcaatggttgccattttcgcaatatcaccgccaactgaaaaccttgaaactgcaaatacatgcgggcgagccgattaaaaagcagctttggcaaaaaattgtgaaacaaaaaattctcaatcaggctttttgtgtggatgaaaccgggaacgatattgcagctaaacgtttgcgtatattggcttctgaagtgaaatcaggagacaacggcaatcgggaagcacaagcagcagcattatattttcaggtactgtttggcgaacggtttacccgcacagaagacaatcaaatcaatgcgcatttaaattatgcctatgccgtattgcgtgcagcagtcgcacgcagcctaaccttatatggatggttgcctgcattgggtttattccacaaaagcgagctaaatccttttaatttagctgatgattttatcgaaccgcttcgtccactagttgatttaatggtgactcaattaaaagaaaaaggccgtctgaaagaacaattagacacaatggcaaagcagcagcttatcagcgtgttgcaccatcaaatgatgattgagaagcaaagtttcagcacattagcagccattgataaaatgatttcatcgtttcagacggccttgagtcaaaaaaatgctcgttttttgaaattacctgagttacaaacattaaaggcatatcaatatgagtgaggcgaaatttatgagaattatcgtttttttcgatttgccggttaccactgcagccaagcgaaaagtggccaaccaattccgacattttttgctcaaagatggttaccaaatgctgcaattatccgtttacagccgaattgtaaaaggtagagattcgttgcaaaaataccacaataggttgtgtgcgaacttgcctgaagaaggttctgtacgctgtttagaggtgacagaaaagcaatttgccggtatgaaattgcttttgggagagttaaaagtacaagaaaaaaaggtcaatgcagaccaattattgttgttttaagaagattttaaattagaaaaaccaagcggaaagtcttatcaaataaggcttttcgcttggtttaattgtagcactgcgaaatgagaaagggagctacaacaatgcggtcagagcagttaaaaatactgttattgtagcactgcgaaatgagaaagggagctacaaccgaagaatgcatcgtataaaccttttacatattgtagcactgcgaaatgagaaagggagctacaacctgctggctgatgggtactgctgatgtactattgtagcactgcgaaatgagaaagggagctacaacgcgaaaggtccgaataggtaaatctgattgattgtagcactgcgaaatgagaaagggagctacaactgaagccttaataggtataagcatagcagcattgtagcactgcgaaatgagaaagggagctacaacatatccccattcacttcaggaatgccgtctattgtagcactgcgaaatgagaaagggagctacaacctatctagggcaaaaagcccgaattcataaattgtagcactgcgaaatgagaaagggagctacaactcggtgagtccgcccaaatgctgcttgaaaattgtagcactgcgaaatgagaaagggagctacaacggataatctttctgtaaccgccgttgtcggattgtagcactgcgaaatgagaaagggagctacaacttgacaggacagatgttgcgttgatagctaattgtagcactgcgaaatgagaaagggagctacaaccgtggcatacgctcggggttaatcagtttaattgtagcactgcgaaatgagaaagggagctacaaccctacaagcaatactgtaagacagacaccgattgtagcactgcgaaatgagaaagggagctacaaccaacttcaggtgctgctttgcggcatttgaattgtagcactgcgaaatgagaaagggagctacaactacattaatgccgccgttgacggtaatttgattgtagcactgcgaaatgagaaagggagctacaacttttgaatcggctgaacgggaattgaagcaattgtagcactgcgaaatgagaaagggagctacaacgatgattattaaagagcgtaagcaagacgaattgtagcactgcgaaatgagaaagggagctacaactcggcacattcgcctttgtaacatccttgaattgtagcactgcgaaatgagaaagggagctacaacaaaacggccaaagtaaaaaaactgtgtctcattgtagcactgcgaaatgagaaagggagctacaactgtgtcctatgccgcccggaaatggcacaaattgtagcactgcgaaatgagaaagggagctacaaccaaaacaattcaaaggcgaaatcgatggtaattgtagcactgcgaaatgagaaagggagctacaacaagaactttctcgatacctagaccacctgaattgtagcactgcgaaatgagaaagggagctacaacatcgcccggctgcttcggccaatcctgataattgtagcactgcgaaatgagaaagggagctacaactccttacgactacttttgcaacatcgcccgattgtagcactgcgaaatgagaaagggagctacaactttgtttagtggtatccccagaggtgtagcattgtagcactgcgaaatgagaaagggagctacaacccttcgacaccttttataagctcatcaacaattgtagcactgcgaaatgagaaagggagctacaacgggcgatattgaagattttgccaacctctgattgtagcactgcgaaatgagaaagggagctacaacccgactcgaacgggtacgatacgtttttcaattgtagcactgcgaaatgagaaagggagctacaactcttcgcagacgacatgcaagacgatttgtattgtagcactgcgaaatgagaaagggagctacaacccggcgcggttgtcaactgataatgctaaaattgtagcactgcgaaatgagaaagggagctacaaccgattcgctccccattgccacggtagaaccattgtagcactgcgaaatgagaaagggagctacaacatgaagatttcgtccgtgccgcttctatgcattgtagcactgcgaaatgagaaagggagctacaacaaatatggtacatcaaaaaagccaaaatatattgtagcactgcgaaatgaaaaaaaggcttaagcaattctaatcaataatcaagcataaagccgtctgaaaactttcagacggccttttttctatgcacattcgttatttctaatttatcataataaaaactattacaagagaaataatttatgttacgttatgtattgccgtgttgggtgttcggggtattggtgtcattcctgctgcctgtggtgccgccgctatggctttggcttgcggtgtttggggtaattttattggcggcttggtattggaaaccattggcagtgttgttatgtgtgttgtctggtatggcttatggggtatggcgcacggaatcggcgttggggcggcaatggccgctggagcgggcggaggatgtggcgttgacggtggtggtggacgatttgccgcgtcgtgatgagcggcgggtacagtttgcggcgaaggtgtgggataaagatggcggcgaatatcggctgatgttgtcggattatcagttgcgtgattggccggtgggcagccgctggcaggtgtcggcgcgggtacggccggtggtgggtgaggtgaatctgcgtgggttgaaccgtgaggcgtgggcgctggccaatggtgtgggcggcatgggttcgttgggtaggggcagggtattgctgggggaatcgggcgggctgaatttgacgctttggcgtgaacgcattagccgtcattggcagcaggcgaatcttggcgggcatgagttttcagacggcattggcttgatgcgggcattggggattggtgaacaatcggctttgcgggcggaattgtggcaggcgttccggcctttgggtttgacgcatttggtgagcatttcgggtctgcatgtgacgatggtggcggtgtggttcggttttttgacgaaactgttgctgcgggtgctgcctgtgccgaagcggccgagattgtgggtgttgacgggcggtgtgctgggcgcgctgctgtatgcgggtttggcgggctttggtgtgccgacgcagcgcagtgtgctgatgttggctgggtttgcttatgtgtggtggcgcggcagcggctcatcaccgtggacggggtggtggcaggctttggcgctggtgttgctgtttgatcctttggcggcattgggtgtgggtttgtggctgtcgttcggtttggtggcggcgttgatttggtcgtcggccggccgtctgaacgagcgcggccggtggctggctatgcgtgggcaatgggcggcaactttgttgtcagtcgtgttgctgggttatatgtttgcgtcgttgccgctgctgagcccgttggtgaatttgctggcgattccgtggttttcttgggtgttgacgccgctggctttgctcgggtcggctgtgccgtttgcaccgttgcaatggttggcggcggctttgggggaatacacgctgcggtttttagtatggttggcagtgtattcgcctgagtttgcggtagcggctgcgccgtggccgttgatggcgtcggcagtattggctgcgttgattttattgctaccacgcggtacggccttgaaaccatgggcttggttggtgttggttggatttgtgttttatcgtattcagcctttgccggaaggccgtctgaaagtatgggtatgggatgcggggcaaggtttgtcggtattgatgcagacacgtgaacgccgtttgttgttcgataccggcacggcgtatgcggcaggtgcgggcattgtgccgagcttgaatgcgctgggtatccgacggctggataagctggtgttgtcgcatcatgatatcgatcacgacggcggctatccggcaatcaagcgcacccaaccgccggaaaagctgctggccggtcagcccgggttttatccgcaagctgagttttgtgatgaatcgcgatggatgtgggatggtgtggtatttgagtttttaaggccgtccgaacattattctggcaaggatgataatgatgaaagctgcgtgctgcgtgtagtggctgacgggcaggcgctgttgattaccggcgatatggggcagaagggtgagatggatttggtgcaaaaatacggcgatgcgctgtacagccaagtattggttttgggacatcacggcagcaataccgccagcgcgggcgcgtttttgaacgcggtgtcgcccaaatatgcggtggcatcaagcggctatgccaatagctacggccatccgaccaaggcggtgcaaaacaaagttgcggcgcatggggcgatattgttgcgcacggatttgtcgggtgcgctggtgtttgagttgggcagtggaacagaaatctttcaaggccgtctgaaacagaaaaagttttattggcagaaaaagccgtttgattgattgaatgaacgcaatggaaaaatgcgttcagacggcctgagtacaaacttaacaaaagtatagttatccttgctttgtgtgaatcctgctgtggataataaggtttgtggattgaaaattaaagagaaaatataattgtttaaaaaataggcaaagtgatttttatgcaaaaagcgttgaatccgtcaagcggaatgtgttttttcagacggcattttgttgcaaattatagtgaatccactttaaagtagtacggtgttggttcgcttggccgtattatctatactgtcttcggcttaccgccttgtcctattttaaagtgaatccactatacaggtgatttgggagtactcattaggagataaatcgggccgatatgcgtgattaaggtgtgcgatggtgtgtgaatcatgtggataactggctttgttggttgaattttaataagaaaaaatttctgcttaaaatttaatcaataatagataggccgtctgaaaaccattttttcagacggcctgataatttgatagatgatgttagggcaacagtttgcccggattcataatattgtgcggatccaattgtgctttaatggcgcgcattaaggcgatttcggctgcatcccgcacacgggggagccaatggcttttgatttcgccaatgccgtgttcggcagcgatggtgccttgatgttttaagacatgctcgtaaacaatggtgttgatgatttcttcgtatacatacacttcgttgctcataatgtcgggcaggaaggtgttgtaatgcaggctgccgtcgcccaagtggccgaaacagacgatttggatatcggcaaagcgcgcttttaaggcggcagcgcattcggtcacaaaatcagctgcattcgcaatcggggtagcaatgtcgtgtttgatgctggtgcctaaattgcgctgcgaagcagagatgttttcgcgtaaagcccacaattcttggcgttcttgctcggattgcgccaatacgctgttttcataaccttgagcgtaaaggtattcggccaattgcccggccaagtcggtatcgggaacggaatcggccagttccatcaaaatgtgccaatcggcattggtaggcttagttaatttactgaattcagacgataaatccaaggcaaaacggctaattagttcgaagctgcataagcgttcggcaaaatggccttggattttggtgagcagcgtcactgcttcatcgatgccgggtaagcctatccatgcggtggcggtagtttgagggcgggcaaagagttttagggttgcggcggtaattacgccgagtgtaccttcactgccgatgaataaatggcgcaagtcgtaaccggtggtgtttttatgcaaaggttgcaggtgcgaaatcaattcgccgttgggtaaaacgatttccaagcctaagaccaaatcgcgcatagcaccgtagcgcaacacattcaacccgccggcattgcaggcgatgttgccaccgatttggcaagagcctttactggccaaatttaagggaaacaagcggccggcattggcggcggcttcttgcgcatgttgcaaaatcatgccggcttcgacggtcatgctgttgtcggacagattgatttcgcgcagtttgttgagtttggaaaggttgagcaacacgccttggcgggcaactgccgcgccgcataaaccggtattgccgccttgcggggtgacagtgatgcggttctcatgacaaaagcgcaggattttttgcacgctttcaacggaatggggttgcaggataatatccggtgtggaagtaaagcggcggcgttggtcgatgatgagtgaggcagccggctcaagtatttccgaaggagcgagaaatgattgaaaggaggtgagtaggtcggtgtgcatgctgtgtctgatgattggttttgtttttaatgaatcaagattatagcgcaaatctgcaaataagccgggctacaagcaaaagggtataaaaggccgtctgaaaaacaaaaagcaggatactttagaaaagtatcctgcttttttattctgaaacagaatattagttggcggcagaagcagcggcttcagaagcagcatcggcagcagaagcagcttcagttgcagaagcggcggcagaagcggcttcggtagcggcagcagaagcttcagaagcagcttcggtagccgcttcggtagcggcagaagcagcttcggtagcagcagaagcggcagcgtcaacagcagaagcagcagcgtcggtagcaacagaagcggcagaagcggcttcagcagcagcgtctttagccggctcagaaccaccgcaagcggccaaagtcaaagacaacaaagcagcagcgaacaatgaatttttcattttataaccttcttttttaaatcgatttaaagtaaaaactaaaaaacggccgcatagcggcctctacaaatagaaattcattactgaattttcttaattatgccccaccgtataagccattgcaacggcgcggaattaagagagagcgcagaatgaattacttagtttggtaaaataacaaaatagttccgaatttttggaaattttgtaatgattcttccgtaaaattctggctaaatatttttgaattcaaccgtttattatcttaattgaaggcgtttgtgacaagcgcgtgaaaattttgacgaagcgttagtttttgcaatttggttgtggaaaaacaacaataaatattaattttgtgaaaagccggggtttaatttgcaagtggcaaaagacggtgcttaccggtttttgccggtgccgtcagaatgacacacttcaagcagcggctctgtgttagaatgcagcctgtatcaacgtggtaacaattaacaaggacgacaaaatggcgattgctaaaaattcagtagtatccctgcattatgaaatgtacgatgccaacaaccaattattggacaaaaccgaagaacctattgagtatctgcatggcggttacgatggtatttttccattggttgaagaagcattacacggcaaaaatgtcggtgagaccgtagaagtggcattgtcgcctgatgatgcgtttggcgaacaagatccggaattggtgcgcattgaagatgtcggtgtatttccggttgaagttgaagtgggtatgatgtttgaagccgacgatccggaaaccggtgaagtgttgatttaccgtgtaaccgatgtggccgacggtaaggccgtggttgacggcaaccatcctttagccggtatgaaagtgctgtttaaagcgactgtcgacggtatccgtgaagcatctgccgaagaaatcgaacacggccatgtacatggtccgcatggccaccaccattaatttgtgatcggatgataaaaggccgtctgaaaagttttgacctgtgcgtcgaactcttcagacggcctttggtctgattggttcattcgggcaattgattgaaaagattgccaaatcttggcttaaatcaaatcaaaccgagaaaaatacgctttagcagcggcttacatcgaattacatatttgataccgcgcaatctatattaagattagttttcccgcacctttaactgcaacggcagatttacgcgatgaattcattagaaacacaagccggcgaacacggcatcgatttaggcttttacgacatcggcggcgtttaccacgaaaccatgcccgaagtcttacaggccattcttcaatccttacagcaaaccgatgtttcagacagcctgtttgccgataccttggtggctcgcgagcaggaagtgcaaaatttaggtttgccttcggcatttcattcagccgcacaataccgtttggaaaacgaagtcggagaaatctgggttttaaatgcctatgacgacaacggtaacacgcgggtagccttgcccgaattggccgccggctattatgtgttgtcagcagaaaccgatggtgcggcggtgaaactgcgtttgattgtggcgccgaaatcggtttatcagcccaaagcgctttcagacggcctgagaatgaacggcctgaccacgcatctttacagcttgcgttccgaacgaaactggggtattggtgatttcaccgatttgaccgatttaatggccttt

SEQ ID NO: 2705 - DNA, 23237 bp, synthetic construct
  source 1..23237: mol_type = other DNA
  misc_feature 1..23237: note = Synthetic
cacttgatcccagtcttcatcttcaaaagcagggaacgcattgtcgcgcgttaaaccggcattcagcaccacgccgtaataagcgccgttggcttcgatatcggccgtcaggatttcccgcgcctgttggcggtcggatacgtcgaactgcaatacgcgtgcttgtctgcccaatgcgcgtatttcttcggcaacagcttctgcttcttcgcgacggctgcggcagtgcaccacaatatcgtagccgtcttcagccagccccaaggcaacggccttgcctatgccgcggttggagccggtaattaaaatgttttcgctcatgcgttttcctgtgtgggaagtcgagtgttttgattaagatgcgaattgtaacaggaatgcccgaaagcgtgagtatggtgttggcgtgatgtgggaatttgaggccgtctgaaagcaaactatgtgagcttcgctaaaacgagcttcgcgagtttcgctaaagcgaactgtgtgagcttcacccaaacccgccaagcaggtttcgctaaaatgtattttgctgttttcagttataatacacacctgtttgatttctccgcccgtgcttttacgaggccgtctgaataactgtgaaagctgtccgacaataccgccgctggtggcgttaccacaccctgcaacgtcatatggccctccccgcccatacgctcgactgccccgaatgcgggcagcgtatggaattgccgcgtttgcatcaggggcaggaagcgcattgccccaattgcggctatgaggtggtggaagtggagaaaaacccgtatatcgcgcctttggcctatgcaacggcttctttggtgttgatgggtttcgtttacacgatgatgtttgttacggttacgatggcgggcgtaacgtctatccagtcactgccgtcgatgatgaaaaagctgattctgcttgatttcggtttcttggcggaagtgatgtttgtgctcacattcggcacgccgctgctttttttactgttgtgtctttatgtgtacacggctttgtggcaagacaaggcttatccgggattgcgcacggcaacgcgcactttggtgcgtttaaggcactggattatggtggacgtatttttcatttctacgctggtggcacacatcaaactttcttctgttgcagaagtcgaatacggtgcggcgttttatttgatgttcggcttggccgtgctgctgatccgcacttccgtgtcgattccacaacattgggtatattataaaatccaccgcattttaggcagaaacaccattcagacggcctcggaagagcgggtgtgttgcagccgctgtctttatttccgcaaccgcgaagagcctacctgcggcgtgtgcggtgccgatctgtatgagcgccgccccaaaagcattgccgtgtcgatggctttcttaatggccgccgtcgtgctgtatattccggccaaccttctgccgattatgatttcatccaatcccaccacggtgcagatcaacaccattctcaacggcatcgtgtatatgtgggacgaaggcgacaaactgattgccgcgattatcttcagtgccagcattttggtacccggtgcgaaaatcgttttgctgctggttttgaacctgagtgcacgctacggcctgcctgccggtgccaaaaccatgctgcggatttaccgctttaccgaatccatcggcaaatggtcgatgattgatattttcgtcatcattattttaatgagttctttccacacccatgtggcacgggttgtgccggggccggccgcagtatatttctgtttggttgtgctgctgaccatgctttccgcttattttttcgacccgcgtttattgtgggacaaagcccgtaaccaccaagccaacatcaagaggccgtctgaaaagctgacggtaaaacacgccgaatatgaataaccaccatcaaaacgaatataaacccgtgcctgccgtggtgcgcaaaaccaatgtatttacctctgttatctggctgatacccttaatcgcctttttggtaggcggttggctgctgatgaaggaaatccgtaacagagggcctgaagtgacgctgctgatggacagtgcggacggcatcgaagtcaacaatacggttgttaaagtattgagcgtggaagtcggccgcgtaacccgcatcggtctgcaacacgaccgcaaaggcgtagaagttaccgtacgtttaaccgccgatgccaaagacatgatgcgcaaagacacccaattttgggtggtaaaaccgcgcatcgacgaaagcggtatttccgggttaaccacgctggtgtccggctcttacattgccttcacccccggtaaaagcgaagaaacgcaataccgcttcgaagtgtcggacattccgccgattaccgccatcggccagcacggcctgcgcctgaaactggtgggcaaaaacgacaaaatgatcagcgtaggcagccctgttttgtatgaagacttcagcgtcggcgtagtggaaagcgcatcgttcgaccccaacgaacaaaccgtcaactacaccatattcatcaccagccccaacgacaaactggtcggcaaaaacagccaattctggctgcaaagcggcatcaatatcgaagcaaccggcggcggtgtgcgtatagaatccgccccgattccggctctgctttccggagcgattgccttctcaaggcctgtgggcggtgaaaaagggcagcccccctcgaatggagacactttcacggtatacagcaaccgcagcgaagtagacaaccttcccggcgagcgcgctttatattacaccgccttcttcaaacaaagcgtgcgcgggctgagttcaggctcgccggtagaatacaaaggcatcaatatcggcgccgtagccgatgtgccttatttcgctcccaacgacagcctgaaactgtttgataacggttggattcccgtacgcatccgcatcgaacccgaccgcttggaaatcaatgccgatgcgcaaagcaaagaatattggcgcaaccgttttcagacggccttaaacaaagggctgaccgccaccctgtcttcagacaatctgctcaccggcagtaaaatgatcgaactcgacgacagcccgtcaaacggccccaaactcaaacctgtggccgattacaacggaaatgtcgtgatagccagccgcaacggcggtttggacaatctgcaagaccaactcggcaacttattggaaaaattcaacaaattgccgcttgacaaaaccgtgggcgaattaaacggatctttgcgcgaattgagagcaacgctcaactcggccaacgcactactcggcaaaccgcaaacccaaaatattcccaacgaattgaataaaaccctgcacgaactgcgccaaacccttaaaggcatatcgccgcaatcgcctttatacagcgacgttcaaaccaccctgcaaagcatagataaaacattgaaagatgcccaaccggtgatcaataccttaaaagaaaaacccaactctttaattttcaacagcaatgttaaagaccccataccgaaaggaagccgctgatgcgtaaactcaccataaccggcgccctactcgccctgagtgcatgcgccacttccgtgccgctatatttcaccttgcccgacagccaatacagccatccgggcagaagcctgaacgaagttgccgtgcgcgtttaccttgccgaaccgctcaataacggcggtttggtttaccaaaccgatgcctaccatgttaacttcgcccgcaaccatttatgggcaggtgcgctcgataatgctttagcttcgggattcagcaacaaaatgaacaggctcaacccgcgttatacgtttgtgcccgcggcacgaagcaacagttcgcagatactgaaaatttacatagaggcatttcaaggcagctatgaaggcaaaacattggtcagcggttatgcactgtggcccaacggcgaaagccgcccgtttcatgttgaaaccgagcagcaaggcgacggctacacggctatggttgaatctttaaaccgcggtttggagcaagcatcgcaagcagtcgcccgttaagcttttttcagacggcctgaatgctgcattattcctactcttacgggcacgaatccaataaaatatgcaaaatatttgaaacgggccggcaaacaatcgcctaatcccgtttcaaccgaacaatttgaagtgaataaacagaatcttgataaggtttggtttaccaacttattgtgtagcaataattaatttagacagagtccaatgaaatcaattatccaagacctccaatcccgcggtttaatcgcgcaaaccaccgatgccgaagccttagacgctttattaaacgaacaaaaaatcgctttgtattgcggtttcgaccctactgccgacagcctgcatatcggccacttgctgccggtattggctttgcgccgtttccaacaggccggccatacgccggtggctttggtgggcggtgcaaccggcatgatcggcgatccgagtttcaaagcggttgagcgcagtttgaatacggctgaaaccgtggcgggttgggtggaaaaaatccgtaaccagctcaagccgtttttgagtttcgagggcgacaatgccgcgatcatggccaacaaccacgattggttcggcggcatgaactgcttggatttcctgcgcgacatcggcaagcatttttctgtgaatgcgatgttgaacaaagaatcggtgaagcagcgtatcgagcgcgacgacgtgggcatttcgtttaccgaatttgcttacgcgctgctgcaaggctatgactttgccgaattgaacaaacgccacggcacggtgctgcaaatcggcggctccgaccaatggggcaacatcaccggcggtattgatttgtgccgtcgcctcaacaaggtaacggcttacggcctgactttgccgttggtaacgaaatcagacggcacgaaattcggcaaaaccgaaggcggcgcggtgtggttggatgcgcaaaaaacttcgccttaccagttttaccaattctggctgaaagtagccgatgctgatgtgtataaattcttgaaatacttcacgttcttgtcggttgaagaaattgatgccatcgaagcgaaagacaaagccagcggtgtgaaaccggaggcgcagcgtattctggcggaagaaatgacccgcctgattcacggcgaagaggctttggaagcggcacaacgcatttctgccagcttgttttccggcgacgaaagcagcttaaccgaaagcgactacgcacagctcgctttggacggcttgcccgcgtttgaggtatcaggccgtctgaatgtggtggaagccttgattactgcgggtttggccaagtcaaacaaagaagcgcgcgagtttgtgaaaaacaaagcggttttgctcaacggagaaacggccgcgttcaacaaccccgaacacgccgcagaaaaacccgatgatgcctacctgattaccgacgaacacaaacgtttcggcaaatacacgattatccgccgtggcaaacgcaatcatgctttgttggtgtggaaataaaccgtattaaccgataacaggccgtctgaaaacagcatgaatgatttttcagacggcctgcaaacttttgtttgctttaaatatgattcttcatccccgtcaaccgcttcttttatgaaagcctgccatgcctgaattacccgaagttgaaaccacgctgcgcggcatccgctcccatatcgaaaaccaaaccgttgccgatgttgtggtgcgccaagccaaactgcgtttgccggtaacgcctgatttggccggtattcttcatgcgcaaaaagtattaagctgcacccggcgtgcaaaatatttgctgattcattttcccgcaggcatattgctgattcacttgggtatgtcgggcagtttgcgtattttcacggcggaacatccccttatcgaacatgcgggcaagcatgatcatgtggatatcaggtttgaaaacggcacggttcttcgctatcacgatccgcgccgtttcggtatggtggtatggtttgccagcgccgccgagcaccatccgttattggcatcgctcgggcccgagccgttggaaagcggattcgatgcggcttatctgcacgcaaaactgagtacgcaaaaacgcgccgtgaaactggccttgatggacaatgccgtggtggtaggcgtgggtaatatttatgcaaacgaaagccttttcaaatcaggcatttcgcccaaacgcccagccaaccgagtgtctgaagaagaatgcgtcgagctggtggataacatacgggcggtgctgatgcgggccatcgaaaccggcggcagcacgctgcgcgattttgtcgacagtgaaggcaagagcggttacttccagcaggaatacacggtttacggccgccacaaccaagcttgcgtaaggtgcggcggtttgattatgaaagaaaccatcggccaacgcggtacgttttattgcccgaattgccaaaagtaatttcagacggcatcacatataaaatcccggccgtttatcaaccgatcaactgatttttacaatatttttttctctcatcaaactgcttctcacatcaggcgggaaacagcagcaactgttatatagtcaatccacttatcgggtttgacttgagcatcttgagtttcagcaagtttgggagatactcgggccaagcccgagtatgacgtatgtcctatttttaagtggattgactatacccgccctgctcccagccgccgcccaacgccttatacaaaccgatcagcatccgagcgcgtgccagttgcgattgaatcaggttttcccgcatcgcttcttcgttcaggcgtgcggtgagggcgttatcgagcgttttctggccgtatttaaacagtttttcggcatcgcccgcctgttttgccgcctgtttgtgcgcggtaaccagcaaggtgttttggcgggtgagcgcgctgtgtgcttgatatgcgctgtccacttcgccgagggctttgaggatgttttggtcgtattgcaataaggccgtctgaagccgtgcatcggcggcggcgatattggctttgatgcgtccgttggtgaaaatcggcactttgatgcctgctttgattaagctgccccagccttttaaatcgctgtcgctgtcgatactgatggtgcccctgcccaaaaattcgatggtaaaacgcggcagcaaatcggctttggcgctggcgagcttggcggcgtaggcgttcacttgtgcggcatgggcgcggatgtcgggacggcgttcgagcagcccttgcggggtttggccgctcggggcggcgggttgcgtgattaagatgttgacgctgctttcaggcagggcaaatgtttgcggggtttggccggtaagcacggcgatactgcgcacatgggcggcgtattccgattcgatggtgctttgtttggcgcgtaaagcagtaagtcgggtggccacttcgtccacttcataagcggtaacgtggcctgctttgaaacggccttgcacatatttcgccagccgctccacggtggcgatactgcggttgactgatttcaaacgctcttgggcggagcgggcttgcagataatgctcggcaatttcgccaccgatcagcacttgcgtgccgtacacttcttcctgcctgccgagtgcggcataagcggcggcatcggcatcgctgcgtttctgcccgaaaatatccggctcccacgacgcggaaaaaccgcccgtaagactgttgcctttcaaggtaaaacgctcgcccgccaaatcggcagcctgcggaatcctgtccaacaaggagcgcgcttcgtcgctcagcgggttgctgatgcgggcgttgagacgcgatgcttccgcgcccgcgccgaccgtcgggcctttgtcggcatcggccaagcgctcaatggcgcgcgcttcgttcaaacggctgcgggcgatttggatatcgtggttttgctgcaaaccttgttcgattaagcggctgagtacggggtcgttccaatgctgccaccaacggccgatttccgcgctgccgcgcgccgcttccgcttggctgaaggcttgcggaatatcgattttgctgtcgagcggcacaacggtgcttttgcaggcggcgagcatcaaagccgctgacatactgacgtaaaaatgtttcaggctgatattcataaaggctttctttaaaagtttcggcaggcattctatatcgaggccgtctgaaaagccggctgcctgcgtgtttccatccaatcttcattgaaagaatatttcaatcaatcgtttagtgatattgatataaaacaaatatcatcagcttaccgcttcttcacagaaactaaataacggcttttgccgtcttgttgagcagacggctgcattttgcatgttgccgctttcgcgctgttttacgtctaacctactcaaggaaaggaagaaaacatggcccgcacactctgctcttctaaggtcaaccgtaaagtgattctatggactaccctcatcggcggttttttcagctcgctggtgaaatggggttccgaagtgaatatgccgccgcgtatgccgggagaaatttctccgccgggtgccaatatcgacgcatggctgggttggctcggcttcaaccagcactctcttgattatatgtatcaaggcaacagcgtgttgggggcggtaacgctttaccactggctgtttagttttgtgtttgcttttgtgtatgtgtgggtttcggcttattggccgaaaatccgcctgtggtatggcgcgttttacggcatcatcattaccgttgtcatgcactggctgctgattcccatgttcggtttccgcaatcctgcctatgccgacggcgcaacgggttgggcgtggaacctcaatgcggcggaacacatcagcgaaattctcggccatgtgtattggtcggtgtctatcgaagtgtgcatgattgccgtgctcgcttattacgcacgcccgattaaaggcgattgggttgaacgctgattcacctgtttcaaatgatcaggcagatattccaatctgcctgattttttgtttgagatgatttttatcagttatgttcagacggcatcttagcccacagcttgcgcaaaaaagattttatggttgtcggggtctgtaatgccgcaagtcagcaccacttcccaatcgttaatgtctccggcttcaataccgacaccgagcaacgctttgcggcaggcggcgatatcgtccacgccgataatcacttctgcctcagcaatcgtaccggagtctgttagttgcagccacgcattatcggcaatacgccattccgccatattttccatcggcaccacatccggctcgcccaaccatgttcgataccacgccaatgaggtttgaaagtcagatgcgttgattacggaaaccaaactgctggttttgaaaagtttcatgctttgttcctgtgttatagaaaattgcgattgtttttcagacaggcattgcgccttcccgttccaacaatgtgttttactccgtcaaactgccatattaagcctcacaatttgatattttgaacttagagcgtttagttatataagaatgccgtactttgaatgtaagttggaaggttcccggctttgatgcagttgattattttcagacggcctgcttcattgtatggtttttggaggttataaaaagacgatgcccctgtttaagcgtacttaaacaggggctcaattcatttctgaatctttacgtcgcggcacgtcttttcagacggccttattgtagcaacggctctcatctcgtagtgcaacaatgaagctgattctaagtgatgataaaaacacttgtcaaatatttatttctttactataaataagcgtatgtatttttttataaatcaagatgaaacgggagggggaagcaatgaaacaacagccgcaacgctatattttgggtttggatttaggtattgcttcagtaggctgggccttaattttagtagatgaagagggaaatcccatcggcctgctggattgtggggtgcgcacgtttgaacgggcggaagtgccgaaaacaggcgattctttagccttggcccgcaggcaagcacgcagtgtgcgccgcctaattcgccgtcgcgcccaccgtttgttgcgtttacgccgcctgctaaaacgcgaaggtgttttgagtgctgccgacttcaattcagacggcctgcccaatctgccaatcgatacttggcaattgcgtgtagcgggtttagagagaaaactcacaaatcaagaatgggcggcggtattactgcatttggtcaaacaccgcggttatctgtcgcaacgaaaaagcgaaacccaaacggaaaataaggaattaggatgtcttcttgccagtgtggctaaaaacagcaaattattatcagagaatgccaatcaataccgcacacctgccgaattggcggtcagattatttgcagaacaatcggggcatttacgcaataaaggcggcgactacacccacactttcaaccgcttagatttacagaaagagctgcatttactgtttgagcaacaacgtacattcggaaatccgtttgcttcggcagagttgcaaagcaaggttgatggattgctaatgatgcagcgcagtgccttgcagggtgaagccgtgttgaaaatgctagggaaatgcacgtttgagccttccgaatacaaggcggcgaagcatacttattctgccgaaagattcatctggctgaccaaactcaataatctgcgtatcttagaaaacggcacagaacgcgctttaaacgaagccgaacgtaaattattgttggacgagccgtataaaaaagccaagctgacttattcgcaagcgcgcaaattgctggatatgtctcacgatgccacattcaaaggattgcgttacggcaaagattcagaaggcctcaacgcggaaaacggcgcgttaatggaaatgaaagcctaccacaaaatccgcacggtattggacaaagccggtttaaaaggtgaatgggaaaaccgtatccgcaatcccgaaatactggataaaatcggcacggcattttcactctacaaaaccgacgaagatattcaagcggccttagccgatttaaggctacctgaaaacgtgttgaacgcactattggcaggtttgaattttgataagtttatccaactttcgctgaaagccttaagcaatattatgcctttgatggagcgcggcatacgctatgacgaagcctgcaaagaagtttacggcgatcaccgcgccttggcagaatcgaaaaaccaaatgctgttgccgcctattcctgccaatgaaatccgcaaccctgtggtactgcgcacactcacgcaaacacgcaaagtgattaacgcgattatccgccgctacggttcgccacagcgggtgcatatcgaaaccgcacgcgagttgggcaaatcgtttaaagaccgcaaagaaatcgaaaaacgtcaggaagaaaaccgtaaagaacgcgaacgtgcggcggaacattttaaagaattgtttccacattttgccggggaacccaaaggcggcgatattctgaaactgcgcctgtatgaacagcaacaaggtaaatgcctgtattccagcataccgatagacttaggccgtctgaacgaaaaaggctatgtggaaatcgaccacgccctgcctttttctcgcacttgggatgacagctttaacaacaaagtgctggtactgggcagcgaaaatcaaaaaaaacgtaaccaaacaccttacgaatatcttgacggagcgagcaacagccaacgctggcgcgaatttcaggcgcggctacaaggctgtcgtttttcttatgcgaaaaaacagcgtattcagacggccaagttggacagcaaaaccgaacagggctttttggaacgcaacctgaacgacacccgttatattgcccgctttttatgcggctttattgaagaaaacctacatctgcaaggagagggaaaacggcgtgtgtttgcatcgaacggccaaatcaccgccctgctgcgcggtttatggggcttgaaaaaagtacgggaagaaaacgaccgccatcatgcgctcgatgccatcgtagtcgcctgctcaaccgtttccatgcagcagaaaatcaccaaagctatgcagcggcgtgaaactttggaaactgtggacaccgaaaccggcgaagtcaaaacccgtattccgcagccgtgggatttctttcgtcaagaagtgatgatgcgggtgttcagcgatacgccgcatgaagagctggcagagaaattaagtggccgacctgaagcattgcatgatttcgtatcccctttatttgtctcacgcgcccccaaccgcaagatgacgggacaagggcatttggaaaccgtcaaatccgccaaacgcctgtctgaaaacatcagcgtggtgagaaagccgttgacagcgttaaaattgaaggacattgaaaacatcgtcggctatcccgaccgcgagcctgctttataccaagctttgcgggaacggttacaggcgtataaagacgatccggttaaagcgtttgccgagccgttttacaagcctgcaaaaaatggcgggcaagggtcattggtcaaagccgtgcgggtgaaagatgtacagaaaaccggcgtaatggtaagaaaagatcgtggcggtatagcacgcggcattgccgacaatgccaccatggtgcgtgtagatgtattcggtaaaaaaggtaaaaattatctagtaccggtttatgcttggcaggtagcaaaaggtattttaccgaatcgggccgtagtagcttatgctgacgaagcagattgggatgaaatggatgacagctatgagtttaaatttacgctgtacccaaacgatttagtggagatcatttccaagaaaggacggattttcggttattactctggtttaaaccgtgcaacaggtgccattgatattaaagagcacgatttatctaaagagaaagccaaaaatggtatacatcaaagtgtcggtgtaaaaaccgtcttatcttttcaaaaataccaagtcgatcctttgggtaaagaaatctgcctttgcaaggtagaaaaacatcctgaactaaacagtaaaaagaaaaaataatgttcaacggctgcgcatcaaatgcgcagccgttttgttgtgtaacctatttaacagactacttacggagaaaagaaaatgacttggcgcagcattctaatcagccgccccgcacgtctgtcgctgcaacaaaaccacttgctgattcaacaagacgaagccatacctataccgctggaagacgtcgccgtgattgtggtcgaagcacgggaagtagtgctgaccgccccgttactatctgcactggcacaatacggcatcaccctgcttacctgcgatgagcagtttttaccctgtggtcaatggctgccgtttgcacaataccaccgcagcctgaaagtgctcaaacaacaaatcaacatgacggaaccacaaaaaaagcagttgtggcaacaaattgtgaaacaaaaaatccgcaatcaggcttggcttttggattacagtggtcatgatatcgccacaggccgtctgaacgctttagccgacagcgtaaaatcgggagataaaaactttgccgaaagccaagccgccgctttgtatttccgtgtactgttcggagaacagtttacccgcagtcatgaaaacagcgtgaatgcccatttgaattacggttacagcattttgcgctcagccattgcccgcgcccttgtgcaatacggctttcttcctgctctcggactgcaccaccgcagcgaactcaatcctttcaacttggccgacgactttatcgaaccataccgccccattgccgatttatgggtttacgacaaaatgctttcaaacagtctgccagatgagctgacacccgcaagcaaacaacaattaatctctttgttatgctgccaaacagctttggacggatacaaatatagtgtattggctgccatagaccgcaccatccaatcttttcagacggccgtcagccaaaacaagcccaaactgttaaagctaccgcaaatgctgcgcttaaaggtacatgattatgagtgaggccaaatttatgcgcttaattgttttctttgatttgcctgtaaccactgccgccaaaagaaaagcagctaaccaatttcgtaaatttttgcagaaagacggctatcacatgctgcaattatcagtttattcacgcattgtaaaaggaagggacgcgttgcagaaacaccacaaaaggttgatgctgcatttaccggaagaaggccaagtacgctatttggaggtaacagaaaagcaatacgcaagtatggtcatgcttattggcgaacccaaaccccgcgaaaaaaaggtcaatgctgatcaacttttgcttttttgaagccgtttttttaatcaaaataaaacaggtaagccttattttataaggcttacctgtttaagtattgtaacactacgagatgagagaggaagctacaacttgttctcgatatttaccgttacttctgccattgtaacactacgagatgagagaggaagctacaacggtaatgaatgatttatttagtcactggttattgtaacactacgagatgagagaggaagctacaacgctttggaaactgatccgcgaaaacgtcggattgtaacactacgagatgagagaggaagctacaacagcggcttgtgcggctgcaccggcggctttattgtaacactacgagatgagagaggaagctacaacttcaacaaggttggcaaggggcggtgttcgattgtaacactacgagatgagagaggaagctacaacgcttggtaacgtggctggatatttgcgacgattgtaacactacgagatgagagaggaagctacaacaaaagcagataaatactgcaaaagaacaagattgtaacactacgagatgagagaggaagctacaacttgttattttgtatctaatgcgtctgtttgattgtaacactacgagatgagagaggaagctacaacttgaatgatgattggcagatagatgaattcattgtaacactacgagatgagagaggaagctacaactgacgactggtttgatatttggcctgaactattgtaacactacgagatgagagaggaagctacaacggtcgtcggtgtctgtgttttgcttcgatgattgtaacactacgagatgagagaggaagctacaactcccgttttgctcaaaaaactgcttgcgccattgtaacactacgagatgagagaggaagctacaacttgttattttgtatctaatgcgtctgtttgattgtaacactacgagatgagagaggaagctacaacttgatgtatttaatagacataataatctctattgtaacactacgagatgagagaggaagctacaacaactaacggtgattaaaggacgagttcccaattgtaacactacgagatgagagaggaagctacaacagtgggcggaaaaacaggagcgcggcaataattgtaacactacgagatgagagaggaagctacaacgctatgtcgaagctggtgcacagtttcagtattgtaacactacgagatgagagaggaagctacaacgttgcttggtctgtatagcatgtacagcttattgtaacactacgagatgagagaggaagctacaacgcctgttgaccccgaaccgcccccatttccattgtaacactacgagatgagagaggaagctacaacatgtcttcgtcatcatttacattgtcggcaattgtaacactacgagatgagagaggaagctacaactgcggcggttagctcaggatgtacgttgtgattgtaacactacgagatgagagaggaagctacaacttacaatctagtatgggctttggggattacattgtaacactacgagatgagagaggaagctacaacgctattgcacttctgctcatggtttgccggattgtaacactacgagatgagagaggaagctacaactatcacaccgctcgcaatcatatctccatcattgtaacactacgagatgagagaggaagctacaaccaggttacggtattcttctaatagctctttattgtaacactacgagatgagagaggaagctacaacccgacaccttgggcgggcagctggatgcgaattgtaacactacgagatgagagaggaagctacaacaccgttaatagtctcagctttaatagtatgattgtaacactacgagatgagagaggaagctacaacctcttcacccactattgaataactgacattattgtagcactacgagatgagagaggaagctacaactagttcgcaactacttgaaaaagaaggaaaattgtagcactacgagatgagagaggaagctacaactggagacgatacctataacgtctagattgtattgtagcactacgagatgagagaggaagctacaacaaggcaagcagttgggcgattctgaaagccattgtagcactacgagatgagagaggaagctacaacaaattcagggcgcatcaggaacagtcgataattgtagcactacgagatgagagaggaagctacaacggaaaaggtgtagttataatggctacacatattgtagcactacgagatgagagaggaagctacaactttaaaaactggtcggcataagcgcgccagattgtagcactacgagatgagagaggaagctacaactagaggattatattttgctactgctccacaattgtagcactacgagatgagagaggaagctacaacgtttggtcgaaaggattaattatggcttttattgtagcactacgagatgagagaggaagctacaacaaggtaaacagcttggcgataaagaaagtaattgtagcactacgagatgagagaggaagctacaacccgacgcggataaactcgccctcttgacacattgtagcactacgagatgagagaggaagctacaacctgatagtgcgacaccacctcatgctctagattgtagcactacgagatgagagaggaagctacaacacgaatcaaagctattacttcagccaattcattgtagcactacgagatgagagaggaagctacaaccccctgctgcacctgcttcagccccataaaaaaacgcagcgttcgcagcaaaggcacgaacatttgatgctaaaggccgtctgaaaaagcaggtaactgatttttcagacggcctgaaacctttgtacaatctcaagaaaaaatctgagacgcttgcagacccaagttttgcaagggttctattatcaatccactcaattttaataacacaatcgtagtggcagagtacatgtccgccggcaacggtttgacgggaaggacagtatctacgattttgttactaaacttaagttgattgactgtatatcgtgaatcaactttaggcttgacctgattatataaaccgtatgattattaactggttagccatattttgaccccttgaccgatgttcgcgaaagtatcaggccgtctgaatacccaaaggcaaaaccgatgaggattctgaaaaacattttttatctggcttggaaagaattgcgcagcctcttttcagacccggtgttgatgatattgattgtgtttatgtttacggtaacggtttattcggctgccgaagtaaaccaagacgtgcataacgcaccggtggcagtgattgatcacgatcgttccgcgctgtctttccggctgcgcgacgcggtgcgcccgccgcatttccggccacccgaagaagtgtcgccccaacaggcagacgaggcaatggataagggagaatacatttttgcatttgaaattccgcccgggttcgaacgcgatgtgctgatgggcagaagcccgcagattcaactcttggttgacgcaacggcaatgtcgcaggcgggtttgggtgcaaactatctgatgcagatatttacgcgagaaaccgccgtctttctcaaccggcctgccgccgaaacactgttgccggtcaaacccgtgatcagaatgcatttcaatgccaatgccgaaggcctgtattacggcccgccgatggaaatgggcaatatggtgctggtgttggccttgatattggtaggcgcggcggttatcagagagcgcgaacacggtacaatcgaacaccttttggtaatgccggtaggcgcggcggaaatcatgttggcaaaagtaaccgccaacagtttggtgattttgattgcctcgatgctgtcgatgtggtttgtagtgaaacaaagcctcggtattccgattaacggttcgctggctttatacgctttgggcatctgcatctatcttttttcgctttccgctttggccatcatgctggcaaccatcgccccgagcatggcgcaattcggattgctgatgattccgctgtatatggtgctgctgctgttttccggcatggcctctccgcgcaacaatatgcccgaagcggcacaatggatcagcgaatattggccgagcacccaatttgtgcagttttcccaaaacgtgctgttccgcgatgcgggtttaagtatcgtatggccgcagcttacggcgatgacgctcaccggagtgctgtttttggcctttgctttggtacgcttcagaaagatgcttgagcagcagggataagttttcagacggccgtcagaaaatcttagctactccgtttgaccctgttgggacacatttttagcgtaagtattgtgcaaactgcaaaccattccttacgcagaaacccgcagctacaaacaataggtggggcgcatcggcaaactgcaggctgtgcgtgccgtagctgccgccaacgggcagattaaaatttccatcctgataacgtgccaccgcgtgatcggcagcaacggcgacttaaccgactacggtggcgaccttgtatggaagaaagcattgaaagtttttggaatcaggcgaaacgtgtcttgcgcaaatacaacgaaatcgaccggaaatcttttcctctgcttttgaaagaaaaagcagcagttaaaaattctgcggctttggtgtgatattcagagggctaatctagttcagccccaagaaatatccagttcagccgacgggccgcatatcttaaggccgttacttcaaccactccagccaacccaaggtattggcaaagaccagcagaatcgctacgggcgcggcataacgcaaagtttgataccaaaccgctgcgatttttgcatgaagcgtgctgccttgccgcatgtgtgccaacaccttgcttttaggcagtatccaagccacaaataaagccgtcatcaaagcgcctaccggcataatccaagaagtaatcagataatcccataaatcaaatacggttttgccgaataaggtaaattcagacatcgcaccgaaagaaagcgccgaaggaatgcccaccagcaaaatcgccaaaccggtcagccaagtaacgcggcggcggcgttgttcattgttgtggatagcggcggcaatcaccgtttccagcatcgcaaatgccgacgtgagtgtggcaaacgttaccagcaacataaacacggcaaaaagcaccgttccgaaagggattttctgaaacaccgcaggcaacaccgcaaaaatcaagcccggcccttctcccggctcgaaccccaatgcaaaaacggcaggaaaaatcaccaaacccgccaacaacgacaccaacatattcaaccacataatgctgttggccgaacggaacaaatcctgtttgtcatccagataggccgcataagtgatcatggcggaaacccccaaactcaacgagaaaaacgcctgccccaatgcagtaagcaccgtgtcggccgttactgccgagaaatcgggtttcagtaaaaaagacacgccttccatcgctcccggcagcaacagcgaacggacggccaacaacagaaagacaataaacaaagcaggcatcagatagcggctggccttttcgatgccttgagaaataccgttttgaaccaccaaaatcgtgagcagcataaacaggctctgatagccgacggcggcagccggattgctgatggtttcgccgaagagctgtttaaaatcggtgtccggagcaatcgcacccgtgaatgcgtgtacaacataagccaacacccatccgcccactacgctgtaaaacgataataagataaaacacgccgccacacccatacggcctacccacggccatgaggacttcggagccaatgccttaaaagcatcgacggcattgcgctgggtttgcctgccgatataaaactcggccagtaacacgggcaacccgatcaacaccgtaaaaaacaaaaacagcagaaaaaataccgcaccgccgttggtacccgccgtataggggaatttccaaatcgcccccaaaccgatggcggaacctgccgcagataaaataaaacctattttggatgtccaatgggatggggccgacataagtggttctcacgcgtaaagatgataaggataaaatgcctgaatacagacgttcggaaaccttcgcaaatgccgaatgtggatgcggttcaaggaataagcgcagcatctcagcagactcagacatatcaaatagatatagaaaggcaaaacatgcgggtagcgtacaatgcaggaatgcactacaggcggtgattttacaaaggtttcggtcggatattgcagaattaaggccgtctgaaaagccgtgataataccaaaaaaaccttagttcgggcgtaacaggctgcacgccgccagaaagaatatacagctttttttcagacggcctctaagccgtctgaaaattaagcccgagagaaaaacaccgtgctggccgcacggtgtttaacgtttaaaacgaccaatcagctttcaaccagaaggtacgcggcatgccgacgacggcaaagctgcggtcatagcggccgcgttggatttgccagtagtttttgttaaacacattttccacggcaccgcgaagggtaaatctgctgtttctacccagtttagtttcgtattttgcaccgacatctacggtagtgtaggaaggaagtacataagtgttggcggcattttggaatgattttccataatgctgggcgtaggcgttcaaagtcagacctttggcaaaagatgcgtcccattccacgccggctttggcaatgatacgcgggctggttacctgctgcttgccgttaaccacggcagcggtgttgaattctttgtagttgcgcagttcggagcgcataaacgatacgcctaagctcgggcgcagggttttattgaacagattggcgtaggtgctgagttcgagaccgctgttacgttcttcaccgccatagccgaaaatccgtgaagtcggatcaagataggcactgggacggtagatgcggtaaagactggcggtggaagtaatcaggccgtcgcgccagtttttgcgtacgcccacttcgatctgctctgttttaacaggagcaagtgtatcgccgttattcaaggcggtatcgtcgttgactagtgtacccggctcgagatcgcgcatgtagttaccgtagaacaccagattaggattgggcagataggcggcggtaatcatcgggctgagcgcgtggtcgcgcgtgcttgtgcctctgcggtgattttgctgtttgatgtattgcagacggccgcccaaagtcaggcgcagtttgttgtcgaacatacccatcgtatcggcaaatgcaatgctcggagcggtaaaagtttcatgtgtattattgttggaaagcgagccaaatacaggtgcgttgggaaatacgggctgatagatgttgctgctgaaggcgccggcttgtgcactctgatggaaatcgcggtggcgtttaacgtagtcgcccgccacgctccagctgtggttgacggagccggtggcccattcgccgcgtgctttcagcgtagcgctggtggtacgcgaaatatagtcgatggcgcgcgaaccggctgcattgtaatcgcctgccgcattccgcatggccaattgtgtgaacgaaccgtcgtaacgcgaatccatatagccgataccgcccgagtagttcacaccgtgacctgcagcatattcaaaggtagccatcgcggttttgtcttcagtagtttgccccgaccaactagggatcagattgattttgccgtcgggagccgcgggcatttggaaattcaaacgctgcatatcctgtatgcgtgctcggccaccttcggttttgcgtttggcatacatcaaatccacaccggctttcaggcgttcgccgcggtagtcggcaccgacggctgcttcgcgggcatcttcgctgtaaccgttacgcggcgtgtcgcctttgcggtatttgccgttgatgcggacaccccattcattgttgctgccgaaacgcctgccgaaatcgaatgcaggctgtatacggctgttgccgaaccacgataaacctacgcggttaaccggagtgtcggcggcacgcttggtttcaatattcaccgaagctccggtcgtgccttcggcatccatgcctacggtagcggtagatgctcctttgataagctgggcggaactgacagccgcagtaggcgagttataggtggaatacaaccctgccaaaccgttgacgctgaactggcgggaatcaatttgcaggttacgcacatataatccgttaagcgtgttggtttcaccgccaaacgacatagttgaagcatcggttttcgcaatcacatcaaccacattgcgcggttctttatccgcaaaggctttttcgtcgtagttcactaccgtaaccggagaagtaaacgtattctgcctgcccagcaatcccaaattggctcggtcgcgcagattgtcgtcgctggaaagggagaatgatttgacggcacgcccttttacctgtacctgctcaagttccacctgtccggcgggtgtggcggtgtcggcataaacccaagcttgggtaagcaataaaggcaggagagcgtattgagaatgtggtttcataaatgtctgctttcaca

SEQ ID NO: 2706 - DNA, 23216 bp, synthetic construct
  source 1..23216: mol_type = other DNA
  misc_feature 1..23216: note = Synthetic
aatattaaaatggttgatcattattatcttgatgatcatttttctgaaaatgcaagtaaatgccttggggttagtcataggatttgcgacaacctatgtaggcggctattttatgatgcttatactgaagtgaggaaatatggcaggggcagaacatagcggtaaaaccggtgctgcggaatttatccaacatcatatgaccaatcttgtgattggcgaaccgggaacattttggtctttacatattgatacgctctttttctctattcttttaggtgtgttgttttgttggtttttttatagcattgcgaaaaaaatggacagcggcgtacctggttttgctcaaaactttgccgagatgatttttgattttgtcaatgatgcggttaaagatttttacggcaaatcaagagcagatatcggttccttagctttaacggtattctgttggattttattgtggaacgtgatggacctcattcctgtcgatttgcttccggcggccgcttctttggtcggaattccttatctgaaagtagtgccttcgacagacgtgaacgcgacctttgccttatcaatcactattgtggttttgacttatgtgtatgcttttaaggcgaatcatggcgcgatgggcttgttgaaagcaatggggtctcatcctttcgaggcagaagtactgtggaaaaaggcactgttattcccaataaattttgcgttaaaaattgttgaagatttcgctaagattatctctttatcattgcgtttgtttggtaatctgtttgcaggcgaattagtctttattctgattgctttgttaccattttttgttcagtttataccgggcggtgcttgggctatcttccatattttggtagttatcctgcaagcctatatttttatgattttgacaatcgtctatatgtcgatggcagaatctcactaattttccattcatttcatttactctaggaggatacccatgggaaatattgaagcgtttatgcatatccaaggcttttcagcaattgcaattgccgttatcttaggtttggcagcaatggcgacaggtattggatttgctattttaggtggcaaatatatcgaaagcagtgctcgtcaacctgaaatgatgaacccattgcaaaccaaattcttcattatcgccggtttattagatgcgattgcgatgattagtgtggtaattgcattgattatggtatttgctaatccattgcttggtggaattcagccgtaatttgacatatcaaccaaaggtacaatcctatggatattactctgaccctaattggccaggtaggcactttcctagtattttggtggttcgtgcataaagtcatttggccaatttttgccaaagtagctgctgaacgtcagcaaaaaattgctgaaggtttgagtttggcagacagtgcacgtcacaaaatgcaaagtgcgcagcaagaatctgcagatttgcttgagcaaacgaaagcgcaagcaaatgaaattcttggtcgcgcacaaaagcaagcaaatgaaatcgttgatgctgctcgtgaagaagcaaaaaaagtgggtgatttagaattaaatcaagcgcgtgctcaaattcagcaagagaaaaatcaagtatcacgcgaattgcaatcaaagctttcggctttggttatagaaggtgcggaaaaagtcattgggcgtgaagtaaatgcaaaagatcatgaacgacttttgcaagaattagccgagaaattctaatatgtctcaatctgaaactattgcaagaccttatgctaaagccgcatatcaacaggctttagcaaatgaatctttaggaaagtggcaggaatttttgcagatttctgcatcatttgccaaaaatgaagcaattatttctcgattaaccgtaccgggctttttttccgaatggcaaagttggcttaatgaaagcttggaaaaaaatcgcggcgaaataatgcggaaagaagaagaaaatttcttgaatattttacaagaaaataatcgcctttctgttttgcccgaaattgccgagcaatttatattgcaaatgcaccaagctgatggcgtgtgtgaggctaaagtttatagtgctaaagtcttagaatcgcaacaaaaagctagcattatagaaatgttagaaaaaaaattgggtaaaaaagtgctgcttgaggtgattgagcaagctgatttacttgctggtgtcagaattgagtatgatggtttggtattagatcagtcgaccaaagggcggattgaacaatttgcccaaaagctagaagatttgaggaattaaaatgcagttaaatgccgcagaaattagtgattttattaaaaataaaattgctgattatgatagtaaagtagaaagcagcgcagaagggacgattattagcgtttctgatggtattgtgcgtattcaagggttgcaacaagttatgctgggcgagatgattgctttgcccggcggagaatatgcacttgctctaaaccttgagcgtgatagtgtcggagcagtggtattgggcgaatatactgctttacgtgaaggcgataaggttaaatgtacgggtaaaatcttagaagtgccggtcggtcgggaattactgggtcgtgttgtgaatgcgcttggtgaggctatcgatggcaaaggtgagattaaaaccgcacaaagttctcctatcgaaaaaatcgctcccggcgttatagagcgccaatccgttgatcaacctttacctacgggattaaaatcgattgatgcaatggtgccggttggtcgcggtcagcgcgaattaattatcggtgatcgtcaaacaggtaaaacggcgattgcagtagatgcaattattaatcaaaaaacaacgggcgtgaaatgcgtatatgtggcaatcggtcagaaagcctcatcaatagcggcagttgtgcgtaaattagaagaacacgatgcgctcaagcatactatcattgtggcagcttcggcttctgattcggcggcaatgcaatatattgcggcttatgcaggctgtgcaatgggcgaatatttccgcgatcacggcgaagatgcattgatcgtatatgatgatttaactaagcaggcatgggcatatcgtcaagtttctctgcttttacgccgtcctcccggccgtgaagcttatcccggcgatgttttctatttgcattcacgtttacttgaacgcgcttctcgtattaatgccaaagaagttgagcgtttaactaatggagaagtcaaaggtaagacaggttctttaaccgctttgccgattattgaaacgcaagcgggcgacgtttctgcattcgtgcctactaacgttatttccattacagacggtcaaatcttcttagaaacagacttatttaatgcggggattcgtcctgcaattaatgccggcttatctgtttctcgtgttggcggtgctgcgcagactaaaattattaaaaaattaggtggcggcattcgtttggctttggctcaatatcgtgaattggctgcttttgctcaatttgcttccgatcttgatgaagcaacgcgtaaacagcttgaacacggtcaacgtgttaccgaattgatgaagcaaaagcaatattctccgttaaatacagcagaaatgggtatttcattatttgctgcagataaaggttatttagatactgttccagttgaaaaaatcattcaatatgaaacagcgatgttggcatatatgcgtagcgaacataaagcattattagattgcattaatgaaaaaggcgattataatgatgaaattgaaacagcaattcgcactgcattagatgagttcaaagaaaaaggtacttggtaaggaatcgcaatgtctaatgccaaagaaatacgcggtcagattaagaacataaagaacacgcagaaaattacgcgtgccatggaaatggtagctgcttcaaagattcgccgtgtgcaagatcaaatgcgagtaggaagaccttatgctgagagtattctgcgtgtgattgcgcatttggtaaaggcgagtactgcaaaacagcatctttttttaactggttatgaaaaagaagcgattgagaaagttgggtatatcttaattagtactgatcgcggtttatgcggcggtttaaatattaatttatttaaaacttttttacagcatgtgcgtgatcaaaaagcacaaggtcgtaaagtcgttgcttctgtctttggcagaaagggtgtcagctttttaagtcaggccaatattcctattatttcggctgtagagaattatccggaagctccggaaattcaggatttgattggtgcagtccatccaatgattgaagctttcgaacgcggcgaaattcagcaaatttatattgttggcaacacattcattaatgcgatggcgcaaaaaccgactattgaacggcttttgccggcaaatatcgcacatggagatggtaagactgccagccattcttgggattatgtatatgattcttctccagacgaattacttgagcgcttgatgaagcgttatttggaaagcattgtcagacaagcgatgcttgaaaatatcgtatctgaaatgtcggcacgcatgatcgcaatgaaaaatgcttctgataatgccggttcattgattaatgaattgcagctgaaatataacaaagctcgccaagcggcgattacccaagaattaacagaaattgttgccggcgctgatgccgtctaatgaattaggagagtttttatgagtacgggcaaaattgtacagattattggcgcggtagtagatattgagtttccaattaatgaaatcccaaatatcaatgatgcgttaatcggtgaagagaacgggattacttttgaagtgcagcagcagcttggcgatggtgttgtgcgtaccattgcgatgggcgcttcagatggtttggttcgcggtatgtcggttaaaaacaccggtaaaacgattcaggtgccggtaggtaaggcgactttaggtcgtatcatgaatgtgttgggtgagccgattgatcatcaaggagaaattgaagcggaagctaaatggggcattcaccgtgcagcgcctgcttatgatgaattatcaagctctaccgagctattagaaaccggtattaaagttattgatttgctttgtccttttgccaaaggcggtaaagtcggtttgtttggcggcgcaggcgttggcaagaccgttaatatgatggagcttatccgtaatattgcgattgagcatagcggttattccgtttttgccggtgtcggcgaacgtactcgtgaaggtaatgacttctactatgaaatgaaagagtctaatgtattagacaaagtctctcttgtttatggacagatgaatgagccggcaggtaaccgtttccgtgttgctttaacaggcttaactatggcggaatatttccgtgaagaagggcgtgatgttctgttctttgtggataatatttatcgttataccttggcgggtacggaagtatcggcactcttaggtcgtatgccttccgcagtaggttatcagccgactttggcggaagaaatgggcaagctgcaagaacggattacttctaccaaaaaagggtcgattacttcgattcaagcggtgtatgtgccggcagatgacttgactgacccttctcctgcgacaacttttgctcacttagattcaacggtagtgctttcccgccaaatcgccgagttaggaatttatccggcggtagatcctttggattctacttcgcgtcaattagatcctttgattattggcgaggagcattattcggttgcgcgtcgtgtgcaaggcgtgttgcagcgttataaagaattgcgtgatattattgcgattttaggtatggatgagttgtctgaggaagacaagcaaatcgttacccgtgcacgtaaaatccaacgtttcttatcgcaacctttcttcgttgcggaagtctttacaggttctccgggcaaatatgtgtccttaaaagatacgattgccggttttaaaggaattgttgaaggtgaatatgaccacttgcctgagcaggcattttatatggtcggttccattgatgaagcagtggcaaaagctgaaaaaatgaaagcccaagcctaaggaggcagcatggcgaatgcttttcgtgtaagtgtagtgagtcaagaccgttctctttatgagggaacggtacagcaaattgccgttactgccgcttctggagagttgggcattttggctggacatacgccattgatggcaagtttaaagcccggtcaagtacgtttgactttagaatcaggagcggaagaggttatctatatttcaggcggattcttagaagttcaggcgcagcagacgattatattagcggatagcgctgagcgtgctgcggaattagacgaagccaaagtgcgagcggcaaaagaacgagcggaagcgaggatgcacggtttgcaggcggatgatgaagacggtaaacatctacatactgagttggcgcaattaaccgcacaattatcagctattcgtcgcacacgcaggtaagcgctgtattttttaagccgaccttgtgtcggctttttatttgaggaaaaaagaatgtctcatcatgtatttaatgctttgattttggcggcaggcaaaggcacccgtatgaattcgatgcgccctaaattgcttcaacctttagccggacgtccaatgttgagtttattattagatacgcttaagcaattaaatattcactcaagtgctgtgatatacggttatttgggagagcaattacaagcggaaattagctctgattatcctcatttgcattggtttgagcaaaaagagcagttggggaccgcacatgccgtgatacaagctttgccgtttttgcaaagtgaagcaattacattaattttattaggcgattgccctttgctcacggttaataccctcaatgctttattgacgcaagcggaaaagactggagccgccttattgaccgcaaatttcgctgatccaagcggttacggaaggattgtgcgtgatgttcaagataatgtggtggcaattgtcgagcataaagacgcaacagatgagcagcgtaaaattcaagaaatcaatacaggcgttatggcgattaataatgctttattacgtgaatatttgccccaaattgataataagaatgcacaaaaagaatattatttgacggatttaatcgccttattatctgataatggttggcaggtatcggcattacttgctgaaaatgaagaagaaactttaggcattaataatcgtgcgcagctcgcacaggcagaggcggtatatcgcaaacgtcaagcccagcaattattagccgtaggcgttacattgattgatcctgctcgaattgatgtgcatggtcaaattagtgtcgggcatgatgtcttgattgagccgaatgtttttttcaaaggaaaagttgttttaggaaatcatgtgcatattggtgcaggcagtgtgctgattgattgtgaattgggggataatgtacgcgtacagccgatgagcatgattgaaaaatcgcagattgcggctgatgcagaaatcggaccgtatgcgcgcattcgtccaaatacacaattaaaacgggcggcaaaaatcggcaatttcgttgagattaaggcgagcatagtggatgaaggaagcaaagtaaaccatttaagctatatcggcgatgctatcattgggaaaaacgtcaatattggcgccggcaccattacttgtaattatgatggcgtgaataaataccgcacggaaataggtaatcaggtttttgtcggctcaaataccgcattagttgcgccgctgcgtcttggtgatcgcgtaacgattggcgcaggctcagtgattacgcaaaatatttccgcagatagcttggcttttactcgtgcagatttgcaagaaaaaccggattggctaagtccgataaaaaagaaaactaatcaaaataagtcttgaagcttaactgaatgtaaaacacaaatattgccgatcttgttatattgttagtccctttaatataaaacagaggtagagatgaaaaaattatttcttgtatcggcaatcttatttagcgctacgtctatggcgcagacctccaatgcagaagatcgtgcacaagcacgtccggattcaaccgtaaaagcagatgtagtaacagaaacgcaaattactcaagcgcttgttcttgatggtaatgttatcactgaaagtacacaaactattgtgcagccatctgttgaagcgcttaatattgaagctccggcaacatctttgccagcggcagcaattattgacgactctaaagatttagaagcgacaatgaaattgatgggacggaattttaaagctattaacggcgcagataatatagcggcaatggcagagcctgcggcacaattgagccaatgggctagtcaagcagaggcattgagtattgacgctaatgcgcaagatcaggaaaaatttctgcaaggtatacagcaaatacgtaaattaattgcggatttagaaatagcgattgaaaataaagatgaagtaactgttcgcacgattatcaatgaattaggcgatgtacgtaaggagtatcacaaatattttgatatgaattaattcaacctaaaaagacgatgcccctgaaaagtagaacttttcaggggcacattcatttctgaatacgtcgcgacacattttttcaaatggtcttattgtagcaacggctctcatctcgtagtgcaacaatgctgcggattataaaatacttatgcgaataatagcaagcagaaatttagctgagttgtgtagatttttatgttcttgaatttacaatccaagtgcaaaaaaaagaagcattcataatagagtataattttgttccccaacaaaaaaggactctaaaatgaacgcttattaccgacatcttacgctttcagaacgggaaagcataatgattctgctcgctcaaggcaaaaaacaatccgagattgcccgacaattagggcggagctgcagcaccatttcccgtgagctaaaaaggcatgtactcaaagtatatcgagcgagttcggcgcacagcggctatcaagcatcggaaaaagtgcaaagcgatacccaatttaaaacgggcggaatatcatcatttggtgcaaagcaaggtgttggacggcaagtggtcgcccgaacagctcagcaagcgcttagaatttgaaaaatctgatttatcaatcggttttaatacgatttaccgcgcgattcatcaaggttggctggatatcagcgaaggcaaagcaagccgaaaattacgccataaaggcagaacaagacggagaaaaaatcatcttgaaaagcgtggaaaaatcacgatttcgcatacattggaggaacgcccgatttcagcgcaaaaccgcagccgtttcggacattgggaggcggatacggtattgggtgtcgcaggcggtgcctgtttgcttactttgacggaacgcaaaagccgttttgagttggtgaaaaagattgcaggcaaaaaaagcattgttggtgaaagaggcgatgataaccctgcttaaaccgcataaattacggtcaattacgccggacagaggcaaggaatttgccaaacatagtttagttacgcaaacattaggcacagctttttattttcccgagccgcatcagatgtggcaaaggggggcaaatgaaaatacaaacgggttgctcagggagtatttccccaagcaaaaggatataaaccgttggagcgatgattatattcaatcggtcgttgacaaattaaatctacggccgagaaagtgtttaggctggaaaacaccttatgaagtttactttaaaaaactattgcacttggtttgacaattcaagttttaaaacagtatgatttctaattattcactgtctggacaaaggaaagggctatggcgcagcaaaattatattttgggcttggatttgggtattgcttctgtaggttgggcttgtgtttggattgatgaaaatgaacatacaattggtttacttgattgcggtgtgcggacatttgaacgggcggaagtgccgaaaacaggtgattctttagcaaaagcgcggcgagaagcacgtagtgtacgtcgtttaattcgtcgcagagcgcaccgtttgctgcgtttacgccgtttattgaagcgtgaagggattttaaaggcagcagattttggtgcaaataggttgcctgaaaatctgccgattgatgcgtgggctttgcgtgtggcaggtttagacaaaaaacttgcggcaaaagagtgggcggcggtgttgttgcatttggtgaaacatcgcggttatttgtcacagcgtaaaagcgaattgcaggaagacggcaaatcggaattggggcgtttgttggcaggcgtggcgcaaaaccatgaattgttgcaagccgatgaataccgcacgccggcagaattggcagtaaaatattttgccgtgcaaagcggacatttacgcaataaaggcggcgattactcacatactttcaaccgcttggatttacagaaagaattacatttgttatttgaaaaacaacgtgaatttggcaatccctttgcttcagcagacttggaagcaaaagttgatgctttgctgatgacgcagcgcagtgctttgcagggcgaggcggtgttgaagatgttgggcaaatgcaggtttgagtcgtctgaatataaagcggcgaaaaacacttacagcgcggaacgttttatctggctgactaaattaaacaatctgcggattatggacggcggtgaggagcgggctttggctgatgatgaacgccgtttgctactagacgagccgtatcaaaaatccaagctgacttatgcacaagtgcgcaagattttagcgttgcctgaaagcgcggtgtttaaaggtttgcgttacggcagcgatgcggaaagtgcgaaaaaagccgaaagcggcgcattgatggaaatgaaggcttaccacaaaatccgtacggtattggaaaaagcaggtttgaaagcggcatggaacaaccgtatccgcaatcccgaattattggacagaatcggcacggcgttttccgtttacaaaaccgatgaagatattcagacggcattggcagatttagggctgcctgaaaatgtattggacgccttattaaaaggtctgagttttgacaaatttatcgaattgtctttattggcgctgcataaaatcctgccacagatggaaaaaggtttgcgttacgatgaggcttgtaaagcagcctatggcgatcatcgtgcaataaaagaaaatcaaaacaaaaggttattgccgcccattcctgccgatgttatacgcaatcctgtggtgctgcgtacgctgacacaagtacggaaagtggtgaatgcgattatccgccgctacggttcgcctgcgcgagtgcatattgaaacggcgcgggaattgggtaaatcatttaaagaccgtaaagaaatcgagaaaaaacaggaagaaaaccgcaaagaacgcgaacgtgcggtggaacggtttaaagaattgtttccccattttgcaggcgagccgaaaggacaggatattcttaaattgcgactgtatcgacaacagcacggcaaatgtctgtattcgggcaatgaaatcgatttgagccgtttgaatgaaaaaggttatgtggaaattgaccatgctttaccattttcgcgtacttgggacgatagcttgaacaataaagtgctggtgttgggcagtgaaaaccagaaaaaacgcaatcaaacgccgtatgaatatttagacggtgcaagcaatagccgcgtatggcgggaatttcaggcacgcttggctggttgtgattttccttacggaaaaaaacagcgtattcagacggcaaagctcgataccaaagccgaacagggtttcttggaacgtaatttaaacgatacgcgctatattgctcgctttttatgcggatttgtggaagaaaacctgtatttaagcggcaaaggtaagcggcgcgtgtttgcttccaacggctcgataacggctttgctgcgcggtttatggggcttgcagaaagtgcgtgaagaaaatgaccgccatcatgcccttgatgcgattgtggtggcgtgttcgaccgtttccatgcagcaaaaaatcaccaaagccatacaggggcgcgaaatcttggaaacggttgatacggcaacaggcgaagtcaaaacccgtattccgcagccatgggaatttttcaggcaggaagtgatgattcgcgtgttcagcgataatccgcatgaagaattggcggagaaattgagcagccgccccgaagcggtgcatgagtttgtgaaaccgttgtttgtgtcgcgtgcgccgaatcgcaaaatgacggggcagggacatttggaaaccgtgcgctctgctaagcgtttggacgagggcgtgagcgtggtgaaaaaaccgctgactgccttgaaattaaaagatattgaaaaaattgtcggctatcccgaccgcgaacctgcgctctatgatgctttgcgccaacgtttacaggcatttaaagacgagcctgccaaagcttttgccgagccgttttacaaacctgccaaagatggtaggcagagtgctttggtaaaagcggtgcgggtggaagatgtgcaaaaatcaggtgtgatggtgcgcgatggcaaaggaattgccgacaatgcaacgatggtgcgcgtggacgtattcacgaaaggcggcaaaaattatctggtgccgatttatgcttggcaggtggcgaaggggattttgccgaatcgggcggtggtggctcgtgcaaatgaatcagattgggacgaaatggatgaaagctttgaatttaagttttcgctgtatccaaatgatttggtagaggtagtaagtaaaaaaggaagaattttcggttattttgccagctgtcatcgtggtacgggcaatattaatattcgtattcatgatttggattctaaagttggaaaagatggtatgttagaaggagttggtgtcaaaacagctatatcctttaaaaaataccaagttgatcctttaggcaaagaaatccgtttatgcaaagcagaaaaacgtcccgaattgaaaaataaaaaatcttaaatgctaatggctgcatctaaataatggcagccattttttattacaagaaaaagaggtaagaatacagtcttttggaaatctaggaattagggaatcatatcagcattaggagaggagtatggcatggcgtagcattgtaatcagcaaacctgcaaggctttccttaaaacaaaagcatcttttaattgagcaggaagagggtattcctgttcctttagaagacattgccgtgatggtgattgaagcgcgcgaagtggttttgaccgcgcctttattatcggctttggcgcaaaatgggattactttgctcacttgcgatgaacagtttttgccgtgcggacaatggttgccgtttgctcaatatcatcgctgcctgaaaattctaaacttacaaatgaatttaagtctgccgcagaagaaacagctttggcaaggtatcgttaaacaaaaaatacgcaatcaggcgtggctgttggattacagtgggcacgatattgccgcgcagcgtttgaaaacattggcagaaagcgtgaaatcgggcgataaaacttttcatgaaagccaagcggcagccttgtattttcctctgctctttggacatgacttcacacgcgctcaggaaaatatgattaatggctgcttaaactatggttacagtatcttgcgttctgcgattgcccgcgctttggtgcaatacggatttttgcccacgcttggcgtgcaacattgcagtgaacttaatccgtttaatcttgccgatgatttgattgagccataccgcatattggtagatttatttgtgtatgaacagatgatgcaaaatacgctgcccggagagttaaatactctatggaaaagccgcctagttgcattattgcatcatcagataaaactgaatggcaaaacttatagtctgttgtcggcaattgatcgaacagtacaatcttttcaaacggcattgatacaaggcgattctggattattaaagctgcctgaaatattgccattaaaggtgcaggattatgagtgaggcaaaatttatgcgtttgatagtattttttgatttgcctgtaacgactgctgctaaacgcagagcggcaaatcggtttcgccattttttgattaaagacggttatcagatgctgcaactatctgtatatgcgcgcattgtgcgtggtcgtgatggtttgcataaacactatacgcgcttgcagaaaaatttacctgaagaagggcaagtccgctgtttagaagttacggaaaagcaatatgcgagcatgttgatgctaatcggcgaaatgaaaccgcgtgaaaaaaaagtcaatgcgaatcagattttgctattttagctcttgaaaactagacaagaaattagcgataaagcctataaaaatagagctttatcgcttgggtattatagcactacgagatgagagagggagctacaactaaatctagtttttatttgtgtaatcgtttattatagcactacgagatgagagagggagctacaacgataagtgtgtctgttgtgtttgctcagcaattatagcactacgagatgagagagggagctacaacggatagtctttatcaacaatcactgctgttattatagcactacgagatgagagagggagctacaacagtccgtgcaggcttgtctgatacgcccgaattatagcactacgagatgagagagggagctacaactaaaatgaccgcttgtgcctgttcatcacgattatagcactacgagatgagagagggagctacaaccacaaagtatttctcgccgtcctcggtgtgattatagcactacgagatgagagagggagctacaacatcgtatatttaataggtcatgtgtcaaagattatagcactacgagatgagagagggagctacaaccgttttgttgcctcggcttgcagcggacggattatagcactacgagatgagagagggagctacaaccagcgaagcaccgctgcgcttagcggcataattatagcactacgagatgagagagggagctacaacctacctgaattgggctctacgagcctgtgcattatagcactacgagatgagagagggagctacaaccaggatggcactgttaaagaaaccacgaaaattatagcactacgagatgagagagggagctacaacgaagaagtgaaggctaatttcaaagaagttattatagcactacgagatgagagagggagctacaactaactgttatatcgaaggaacagaggtcttattatagcactacgagatgagagagggagctacaacttggcggtagtgcttgatggtcaagatgatattatagcactacgagatgagagagggagctacaacatatcaatggggcgctgtatgtggagcgcaattatagcactacgagatgagagagggagctacaacggtttaggcatgaaatgcgcattaccgctcattatagcactacgagatgagagagggagctacaaccgcagatgtgttttggcgcgctctaagctaattatagcactacgagatgagagagggagctacaacgaagcagtccggcggtaagtgtgccgcgcaattatagcactacgagatgagagagggagctacaactacttgggttccgctacgcctagccaaaccattatagcactacgagatgagagagggagctacaactcgtctgcttcgcattctcgctctgtgtttattatagcactacgagatgagagagggagctacaactacttgggttccgctacgcctagccaaaccattatagcactacgagatgagagagggagctacaactcatgcgagccaccatacacatcaacatccattatagcactacgagatgagagagggagctacaacgtcaagcccagctccaattccatccgctgcattatagcactacgagatgagagagggagctacaacttaaatctttgcaggatgcgctgcaaaaggattatagcactacgagatgagagagggagctacaacctcaataccaccgattacccgattgagattattatagcactacgagatgagagagggagctacaaccaaaagccttgatacacgccaccatgcgtaattatagcactacgagatgagagagggagctacaactcaggcatgcgatgccaattgagttttaatattataacctgagttcgggataagcacctcactaaaaaataaagagcaattgtgataatctaggtagtgttcaaaaaactgtgtcactcccataaactatccagaaaacaaggaatgacattatgcaacactttgactttaacgaagctttaaaagccatccaagcaggtaagcccatcacaggcagtgatggggtcctagccccgcttattaaacaacttactgaagcagctttatcagctgaaatagaaagttatcttgggcagaatctcaatagtaataaccgccgtaacggttacagtaaaaagacggtcaaatcggcacttggcagcttcgaacttgaaactcctcgtgaccgcaatggagaatttgagtctgtcttagtcaagaaacaccaaactaagctcagccctgaaatagacaatcatatcttatcgctgttctcgcacgggatgagctatagcgctatcaaagagcacattagcgagatttatcagcttgaggtttcagaagccgccatcagcagtatcaccgaccaacttatcccacaacttaaagcctggcaatccagagcactggatagcgtttatcctatcgtatggcttgatgctattcactataaggtcaaagatgagggacgctatgtcaataaagcagtctatacactgttagccctcaataccgaggggcataaagagcttattggactttactgctctgaaagtgagggtgccaattattggctgtctgtgctgacggatttacacaatcgtggtgtagaagatattcttattgcctgtgttgatggtttaaaaggcttccctgaagccattgaggcgatatttcctaataccgaggtacagttgtgcgtgattgatcaaatccgtaacagtattcgttacatagccagcaaggagcaaaaagcctttatgtgtgatttaaagcctgtgtataaggcggttaataaagaatctgccgaattggcccttgatgaactcgacagactctggggcagtaaatatcctgcggtgatagcttcttggcgagagaaatggcatttactatcggcttattttaagtaccctgaggcagtcaggaaacccatttataccaccaatacggttgaagcgctgcatcgccagtttcgtaagttgactaaaactaaaggtgctttccccaatgaaaacagcttgcttaaattactgtatgtggctatgttaaatgccggtgagaaatggacaagacctatcaacaattggggacaaactatgatgcagttgtctatccatttccccgggcgcttagataaggtgatgagcctttgattgaactgacatagatttctgaacgccctcttcaacgttaaacttgaactttaaacagtttaataatgtaattatttaattttgtcggattacttagattagattagattagattagattagattagattagattagattagattagattagattagattagattagattagattagattagattagattagattagattagattagattagattagattagattagattagattagattagattagattagattagattagattagattagattagattagattagattagattagattagattagattagattagattagattagattagattagattagattagattagattagattagattagattagattagattagattagattagattagattagattagattagattagattagattagattagagattgtgtggcgttataaaataaaagcggtgagtttggacatcaccgctttttacttgtttgatggggctgtttaggcgttttcttcagcgcgcatttgcgcgtagcgttcttcatattctttgatagtgtcgcgatcaatacggcgacgtactgaatgatagccgacaatattatcatctttatcgcgaatagtggttacggtggctttgacccaatagtaaccgccgtctttgcgtaggttttttaccatgccaatccaagtcccgcctgtttggatggttgtccaaagatctgcaaaagcagctttaggcatatgtggatgacgcataaaaaaatgtggttgtccgataatttcttctttggtgtagctgctggcatcgacaaagtctgcattggcatgcgtaatgaaaccgtctaaatcggtgcgcgaaacaatcatcatgttgtgtgggacgatgtattgcgagtccgtaaagaagacctcgcgtgaagagccatcatggtattccataaaggcggtttcaatagaagagatagaagtgtgggaaggaggtttttccatttttggaagttcgtatttcatgataattttccataaaagattgtaaaaaaaattatcaattgaaggtatcaattgaaggtatcaattgaaggtatcaattgaaggtatcaattgaaggtatcaattataccataacctgagttcgggataagcaccccactaaaaaataaagagcaattgtgataatctactgttttgacaaaacaaaccatcacaaaagccctttaacatggaatatcttacaacacttttctgccaagtagatgatttttgtaaaacatttgaagcagactttaaccgcacactcatcagcaaacccaacagcagaaaccgaaaagcctctatcagtacttccgaaatcattaccgtatggatctatttccaccatatccgcatacgtgatttcaaaagctactatctatggcaaattaaaaccatttggaaaacagcattccccaccatgccaagctacaatcgatttatcgaattagcacaacgtgcattacttgctatgttggtttttctcagtactcaaatggggaaatgtacaggcatcagtatcgtggattccaccatcttatctgtttgccacaatcgtcgaattcataggcataaagtgtttaaaaacattgctcaacgtggcaaaagcagcatgggttggttctatggattcaaacttcatgcagtgtttaatcatgtaggagagctagtcaatttctgcctaacggcaggcaatgttgatgaccgtaaaggcttacgacaaatggcaaacaaactgtttggattgttggttggggatagaggctatatcagcaaagagttaagcgattgcttagaaaagagatacaacatcactttactgacaggcaagaaaaagaatatggaatccccgccccaaagtcctgaacaaaaaaggttgttaaaacaaagatgtgttgttgaaacgatttttgatcagttaaagaatctatgccaaattgaacatactcgccatcgttcagagaagggatttttgttgaatctgatttctggattaacggcatattgcttgtttgcgtataagccgcagatgtttgggaagaatgctttggcggctgctaaatagaggtggcttatcccgaactcaggttattatagcactacgagatgagagagggagctatagtcaaggaatccaaaaaaggttacactaaaacttatggcatactcaaaagattacagacaaatgatattagacaagctggcatcaggtcatagctacagaaagcttgttgaagaatatcgactcagcgcaacaactattcaacgttggaagaaaagcatagaacgcaagaagtacgaacgcaaaccggcaaaaatcgataatgaagctttaatggctgacgtccaagcttatcctgatgaaattgctatgaacgggcaagacgctttaactgtagcgacagagctattgccatagcattaaaacgtgtcggcattactcgaaaaaaaagaccttaattcacatccgaaagcagacaaacaacagcgcctatagtcaaagaattgaaaaagtattacggcgttggctcgccttgccgtacgctcttgtactgtctacggctcgccgccttgtactactttttcacttctccgactatattatttcttaagcagttagcggcatttgaagctgaaggcagaacactgatttacttagatgaaagcggctttaaatctcatgataacagagcttacggctattcccacaaaggccgtccttgtttaggaaagtacaactggcaactcaagaatcaaagcaatgctatgggggcaatacataagaacaagttgtttgcggtagagctttatgattgcagtattaatagtgatgtatttcattgttaggtagaagaattgctgttaacacaattgcctgaaaacagcgtcattattatggacaatgccagctttcacaaaagacaggatacccaagagcttatcgcagatgcgggacatcatatagtctcttaacttcaaaatgagattattctaagcgcttctcctgacaaaatgtgtatctctaagtctcattttgaagttaaggtactatattttatggctgccgccatacagtccagatctgaacccaatcgagaaaatgtgggcttggcttaaacgtaaacgtaaggattggcgcttagattgcatcgataaactattcttttacttcctgtggatttgttactctttttgatttccttgactatattcctttttcttgtagctctcgtatggcttgtcgatacagcgtattgctttttgatttaacttcgctgaccgataaggcttgtcggctgatgctgttatacagcaccatcacaccaaatttacgtccaaagtaggtagtatccatgatgatattgactgatgaataatgccgttgttcaggctctctaagttgggcttgtttgagatatctagcaatggttttacggttgcaggaaaaacgttgggcgagctcttgcatgctttgtttgccgctactataaagtgtccacaactcttgagggttaagacgctttttgctgctaaaacgcttaccgcattgccggcatttgtatcgttgctgatgattttgtctgccgtcttttttgacctgttttgagccgcagaaaaagcattttttgtgttcaaagcttttgacctcgctaaaagctttacagaataaggcttttcaaactttttagcatctaaaatgtccctttgcccaaaaatttgtgtcaatctcataaactattcagaaaactaggagtgttcttgtgtaatattttaattttaattaatatttaatcaatttaagtggtcaaactcatcacaggttttagatagtaaataaaaagacggcttaagccgccttttgcaaaagaagcttattttttagcttttttaggagccgcttcttttttagccggtttttcatttttttgattgaccgcatcttttaattttttacctgctttgaaagcgggcgtggtgctagcggcaatttctaatgccttgccggtttgcgggttgcgaccggtgcgtgcggcacgttcgcgagtctcaaatgtgccgaagccgatgagggttactttatcgcctttaaccaaggcttcagtgatgctgtcgcagaaagcatcaatggctttgcttgcttccgctttggtgatgtcagccgcggctgcaatggcatcaactaattccgtcttgttcatattccatgtacctttatgagggttgattaagatgtggtgcaagcaccagcggtgctgatttttgcagattatgcaggtaagtgtcaaacttttttaatttcttataggttgaaaatgcacaaaaaaatgcctagaaatcgctttctaggcattaaagatatttgaaaataaacttatcttattgaaaggtagagtttatttttcaatgtgcatgtttgctcatattaccgtcgttttgcaggctttgcacagggataaaggctttgctgggcgtgctttcttcggcaaaaacgcgggcaaagacttcgctgacgtggctgacggcgataatttcaaggtcttttttcacgtcttcaggcacgtcgcgcaggtctttgacgttgtcgctagggattaagacggtgcgaatttctccgcgctgcgccgccagcaatttctcttttaaaccgccgatggccagcacgcgcccgtgcagggtaatttcccccgtcatggcgatatcgccgcgtactttgctacgcgtgaatgcggaaagtagggcggttgccattgcaatacccgcgcttgggccgtctttgggcgtcgcgccttccggcaggtgcatgtgaaggtcgtaatcggcgaagcggaaatcactgtcatgcgcttccaaatagtggcgcacaacggttaatgccgcttgaatcgattctttcatcacatcgcctaattgccccgtatgggtcaatttgcctttgccgctgaaggcggcggtttcaatctgaagcagttcgccgcctacggaggtccatgccaagcccgtaacgctgccgattttaggcgcaaggtcttcgtcgctgcggcggtatttcgccacgccgagatagtcttccagattatcgcgcgtgattttgacgcttttaacgcttttatcgtgcaatttgcgcaccgctttgcgtgccaatttgccgatttcgcgttccaaattgcgtacgccagcttcgcgcgtgtaatcttccaccacttggtttaagacgcctttttgcagcacgaattctttttccgacagggcgttttctttacgctgacgcggcacgatgtaacgctcggcgatgtgcagtttttcgcgcgtggtatagccgggaatgcggatgacttccatgcggtctaataggggagcagggatattcagggtgttggcggtagcgatgaacagcactttggacaaatcgatatcggtttccaaataatggtcgctgaagctg

SEQ ID NO: 2707 - DNA, 23210 bp, synthetic construct
  misc_feature 1..23210: note = Synthetic
  source 1..23210: mol_type = other DNA
ggctttggtagatgaaaatatgccggtggtagtgattgcaccgaaagaccaactgctggataaagtgaaagccaacatgcaggaagtaggcgcgcgcggcggtgaattgtttgtattcaccgatctggacagccacttcgaagaaagcgaaggcgtacacatcatccgcacaccacgtcacgtcggcgccctgtcgcccatcgtgcacactgtaccggtacagctcttgtcttaccacgctgctctggcacgcggcaccgatgtcgacaaaccccgcaacctggcaaaatcggtaactgtggagtaaatacgaacagcaaaagccgcatttgatatgcggctttttttgtttactgtattgggctatctttcgcacaatgcctgtctgaaaaaattttcagacaggcattattgtaggtaggctttgttatatgtaagcagtttgactattatcaaacagcagcagccaaagcctgctccaaatcggccagcaagtcatcaatatgttcgataccgatggagaggcgaaccatgtcttcgctcacgcctgcctgtgccagctcttcggcattgagttggcggtgggtggtgctggcggggtgtgttgcgagcgatttggcatcgccgatgttgaccaagcgggtgaacagttgcagggcgtcgataaacttgccgcctgcctcgatgccgcctttgatgccgaagctgagcaggccggaggctttgccggcgaagtcgcggtcaatcagggctttgtaggggctgtcggacaggccggggtagtttacccagttgacttgcgggtgcttttgcaggaactcggccactttgagcgcgttgtcgctgtggcgttccatgcgcagggcgagggtttcgaggccttgcaggattaagaatacgttcatcgggctgatggcggcgccggtattgcgcagcggcacgacgcgggcgcgggcgatgtaggcggcggggccgaagtgttcgctgtaattcacgccgtggtaagacacgtcgggcgtggtcagcactttgaagcggtcgcctttggtccaatcgaatttgccgccgtcgataatcgcgccgccgatgctggtgccgtggccgccgatgtacttggttagggattccaccacgatgtcggcgccgagttcaatcgggcggcacagggcgggcgaggcgacggtgttgtccaccaccagcggcaagccttttgcgtgggcggcttcggcaaaggcgcgcaggtcaaccacgttgatggcagggttgccgatgctttcgcagtaaacgagcttggtgcgcgcatcggttttggcggcgatttcttcgggtttggccgagtcgataaagcgcacttcgatgccttgcttgggcagggtgtgggcaaacaggttgaaggtgccgccgtagagggttttggtggcgatgatgttgtcgcccgcctcggcgatggtttgaatggcgtaggtaatcgccgccatgccgctggccacacacaatgcggcgatgccgccttcgatggcagccaaacgctcttccaaaacggcggtggtggggttcatgatgcgggtgtagatgttgccggccacgttgagattgaacaaatcggcgccgtgccgggtgttgtcgaatgcgtaactggtagtttggtaaatcggcacggcggcggctttggtggtgggttcgggcttatagccgacgtgaatggcttgggtttcgagtttcatatttgctccgttgtattgtgcgagtgcataaagcggttattgtacatgatgaggaatggttaaggccgcctgaaagcgaacctagtgagcttcgctaaaacgagcttgagagtttcgccaaagcgatgcgacaaatccgtttcacaatagcgtcatgcttaagcgtcacatctgtcacatctgctttgtcacaccggcctgatgttactgtcacatcaggccgtctgaaaaatctaaaaaacaaatcttttcttaaaaatcatttagttatctttaaattttcagacaggcacatggattgctttgcttattttaaaaacaagatctgcaaggagaaaaaccatgtctgccaccgttcgcgtcggcattattgccaaccccgtttccgcccgcgatatacgccgcattatttcccatgcgtcggggctgccgctgggcgagcgtgtgaatatgttgatccgcattttgtctgcgctggcggcgtgcggtgtggacgaggtgctgctgatgccggaaatggaaggcttgcgcatgctgctggaacggcggctgccggccgtagtcagcgcgctggaatatccgctgccgcggctgcgctggctggatatggcggtgaacaacgacaccggcgattcggtggtagcggccgagatgatgcgtgaagaaggtgtgtcggcgattttggtgttgggcggcgacggtacgcaccgtgcggtagcgaaaggctgcggcgatattcccatcgcgggcatttccaccggcaccaacaatgcgtttccgccgatgcgcgaagtaaccatcacggcgtgggcggtgggcctgtatgccgttgaaaacgtgccgcgcgaacattcgctgcgcgccaataaatgcctgcatatccgcaaatacgacgcggcaggaaaggaagtgctgcatgaaattgcgctgattgacgcggctgttttgaacgagggcattctgggttcaaaagccatcagcgaaacagatacgctgcgcacgtttatcactacacaagcttcagttgaggcggtggggctgtcggccgtggcggcggctttggaaccggtaggccgctatgaagccggcggattgctggtggatctggtgccgtcttacggttcgtatgagccggcggataaagcgttttccgttcaggccgtgctcacgccgggcatgatcgaatacatcaacattggttcttaccgccgctttttcgagggcgacgaataccgcctgagcgggcaaaccggcttggtggcattggacggcgaacgggaaatcgtgttccgcgaagaagaaagcattgccatcactttgcaggaaggcgcgttttacacgctggacgtgcccgcggtattgcaatttatcaacacgcaaagacgcggcaaacggtaacagtaaatgttttcagacaggcacggcaggccgtctgaaaaagtatagtcaacccacttacataataacgataccgtcatactcgggcttgacccgagtatctcaagctccggtaagtttaggagatactcgggtcaagcccgagtatgacgagcgtactatttttaagttgattcactatatattttgaaacagtcaaaccgtacaccccaaaaacaaaaccaaaaaggccgtctgaaaacactttttcagacaggcataaacgaaaacccgttgaataaggagaaacccaatgagcatcaaactgcctttagaaaaaaaccagctgctcgacgtttaccgccgcatgaaaacgatacgcgaatttgaagagcggctgcatatcgacttcgcgcggggcgagattcccggtttcgtgcacctgtatgccggagaagaagccaccggcgtgggcgtgattgcccatttgaacgacaacgaccacatcgccagtacccaccgcgggcacggccactgcatcgccaaaggcgtggacgtaatcggcatgatgaaagaaatctacggcaagcgcgacggcgtgtgccgcggcaaaggcggttcgatgcacatcgccgatttgtcgaaaggcatgatgggggcgaacggcattgtcggtgcgggcgcgccgctggcctgcggcgccgcgttggcagccaaatttcagggcaaaggcggcgtggccatcaccttctgcggcgacggcgcggccaaccaaggcaccgtgttggaaagcctgaacttggcggccatctggaatctgccggtgatttttgtgattgaaaacaacggctacgccgaatccaccgctcgcgattacggcaccgccgccaacagcttcgccgaccgcggcatcggtttcggcatccccggcgtggtggtggacggcaacgactttttcgccgtttacgaagccgccggcgaagtgatccggcgcgcccgcaacggcggcggcccggcattgctcgaatgcaaaaccaaccgtttcttcggccactttgaaggcgacgcacaaacctaccgcccgaaaggcgaagtcgacaacctgcgcgcccatcacgactgcctgaaaatcttccgccaacgcgttaccgaagccggcgtgattaccgatgccgaattggacgccatcgacaaagaagtgctcgagttgatcgaacgctcggtgcaggaagccaaagccgcgccggtgccgacgccggaagatttgctgaccgatgtttatgtatcttattaaaaatcatatgtagcaaataaagttatttttgatacaaggcagcaagccgcagacagtacaagcagtacggctaggcgcagcaacgccgtagcaaattaagtttatttgcgatagctgcaaaaccgaatctttcatgcaccatttgaaaagttgattccacagctatttaaaaacaggagaaacagatcatgtcccgccaattaaccatgaaattagcgcttaacgaagccatcgatcaggaaatgagccgcgatcccaccgtgattatgatgggtgaagacatcatcggcggcgcaggcgccagcggcgaacgcgatgcttggggcggcgtgctcggcctctcgaaaggcctgtatgccaaacacggcgaccgcctgatggacacaccgctttccgaagccgcctacataggcgcggccatcggcgccgccgcctgcggcatgcgcccgattgccgaattgatgtttatcgactttatgggcgtgtgtttcgaccaaattctcaaccaagccgccaagttccgctatatgttcggcggcaaggcagaaacccccgtcgttatccgcgcgatggtcggcggcggtttcagcgcagcggcgcagcacagccaaatgctcacgcccatgtttacccatgtgccgggcttgaaagtggtgtgcccttccaacccttatgacgccaaaggcttgctggttcaggccatccgcgacaacgaccccgtgattttctgcgaacacaaaagcctgtacggcgtaaaaggcgacgtgccggaagagctttacaccatccccttcggccaagccaacgtcgttcgcgagggcaaagacgccaccatcgtcgcctacggcatgatggttcagcgcagcatggatgccgccaaactgttggaaaaagaaggcattgaagtcgaaatcatcgacctgcgcaccctctcgccgctcgacatcgacaccgtattgaattccgtagaaaaaaccggccacttggttgtggtcgacgaagccagcccgcgctgcaacatcgccaccgacatttccgcccaagtgtgccagcacatgttcggcgcactcaaagcaggcatccaaatggtgtcgccgccgcacacgcccgtgccgttctccaacgtgctggaaaaactatatctgcccagcggcaaacaaatcgccgaagccgtgcacaaaacattaggtaaggttgaggccgtctgaaaaccatgatcaaacaaacggcgggcaaaaatgcccgccccgccgaagccataccttacctgcacccgctgaaaactttttcagacggcattcacaataaacaaaggagaaaacaatgagcaacatcaaacccgttatcatccccaaatggggtctgaccatggaagaaggcaccatcagcgaatggctggttgatatcggcacccccgtaaccgtcggcatggaaatcctcagcatcgacaccgacaagctcaccaacgccgtcgaagccgccgacgcaggcgtattgcgccgcatcctgcacggcgcaggcgaaaccctgccggtcaaaaccctgatcggcatcctcgccgacgccgacacccccgaagccgacatcgacgcctttatcgccaactggataccgccctctgccgacgaagtggacgaataagccacattttaaaatgcacaaacccggtttgaacggttcgtaaccatgcctgtctgaaacccaatttaacgtttcagacaggcatctgaaactcgttgagctgtttttacaatccgcaacaattccggcacaaataaaaaacaaccttacacaaaacctgtttgctttaacatcaggcttgctacaattttaagcacctgtgtcaatattgacgaaacaggcaaatgagcatatccgctcataatcaaatcaactcaagaaaggtttccgcatgaaacatcaatctgcacgtttggctgcctttatggtggcagctttgggagcatcgttttctaccgctgcaatggccgatgaagtaaccggcccctacattcaaggcgatatcggcttggccaatgtaaaagtagatgatgacgagaaattcaaagtgcgtgacacattcaaaagcctgaaaaactcgtacaaagattcgggctttatgccccgtgtgagcgccggttatgatttcggcgacgtgcgcgtggccggtgattacacccactacaaaaacatgaatgacagcgccaaaaaaggcgatgagcagctggacgttaaagtgaaagcccaaggcatgggcgcatctgtgatttacgatattccgctgcaatccaacttccaaccctacgttggcgcgcgcttatctgccaaccggttgaagtatgaatcgcatggcgtttcagccggcatacgctctcactcttccgaaagcaaaaccaaagtaggctacggtgcgatggccggtgtgggctacaaattcagcaacaatctggccgccgatgtgggctaccgctacaaccgtttggattcagacctgaaagcgcacgaagtatctaccggtttgcgctacacattcaactgattcaaaaccctttgtggctgacataaataaagcgtactgcttcggcggtacgcttttttacatcatatagtcaatcaacttaagaaaaagtacacacgtcatactcgggcttgccccgagtatcttgagtttcagtaaatttgggggtattcgggtcaagcccgagtatgagggtactattattatgtaagtggtttaactatatgcctgtctgaaaacgcatttttctttttcagacaggcatgctctgttttcttttaagttttcttctaattggcagcccagccgccgcccaatgccttatacaaaccaatcagcatccgcgcgcgcgccagttgcgattgaatcaggttttcctgcatctcttcttcattcaagcgtgcggtaagagcgttatccagcgttttattgccgtatttaaacagtttttcggcatcgcccgcctgtttggccgcctgtttatgcgcagtaacgagcaaggtgttttggcgggtaagcgcgctgtgtgcctgatatgcgctgtccacttcgccgagggctttaaggatgttttggtcgtattgcaataaggtcgtctgaagccgtgcatcggcggcggcgatattggctttgatgcgcccgttggtgaaaatcggcacttggatgcctgctttgattaagctgccccagccttttaaatcactgtcgctgtcgatgctgatggtgcccctgcccaaaaattcgatggtaaaccgcggcagcaaatcggctttggcgctggcgagcttggcggcataggcattcacttgcgcggcatgggcgcggatgtcggggcggcgttcaagcaagccttgcggggtttggccgctgggcgcggcgggttgcgcggttaaaacgtcggccttgctttcgggtaaagtgaatgtttgcggggtttggccggtaagcacggcgatgctgcgcacatgggcggcgtattccgattcgatggtgctttgtttggcacgcaaagcggtgagcttgctggcgacttcgtctacttcataagcggtaacgtggcctgctttgaaacggccctgcacatatttcgccagccgctcaacggtggcgatattgcggtttaccgatttcaaacgcgcttgggcggcgcgggcttgcagataatgctcggcgatttccccgccaatcagcacttgcgtgccgtacacctcttcctgccggccgagcgcggcataagcggcggcatcggcatcgctgcgtttctgcccgaagatatccggctcccacgacgcggaaaagccgcccgtgaggctgttgcctttcaaggtaaaatgctcgcctgccaaatcggcagcctgcggaatcctgccgagcatgacgcgggtttcgtcgctcagcgggttgctgatgcgggcattgatgcgcgaggcttcagcgcccgcaccgactgtcggacctttatcggcattcgctaaccgcataatggcgcgcgcttcgtttaaacggctgcggacgatttggatatcgtggttttgctgcaagccttgttcgattaaacggctgagtacgggatcattccaatgctgccaccagcggccgatttccacgctgccgcccgctgcttccgcctgactgaaggcttgcggaacgtcgattttgctttcgagcggcacggtagtgcttttacaggcggcaagtgccaacgccagcatcaagctgcttgtaagatggttcaaatggggtttcatagcttttcctttattcttttttcagacaagcatagaggccgtctgaagactccttgtgtatatcgtttaagtaaattcgagaatccgacttacggcgggctacacatatttctccgcctcacggatactgagtttcgccatgcggctgcggtatcgctcgataaatgcccgcacccattcggggttggttttgctgtaatcgcgcaaggcccagccgatggctttattaatgaaaaattctttttgatccaaattgttgcagaggatttgctccagcaaagcagtgtcggttttgtctttgcgcaaaagctggtgatcgatggccacgcgccgcagccagatattatcgctgttgctccaatccagcagcacggcattggtttcggggtaaaccaaagcgatgccgccgacaatgcggtcgagcacgtctgacgtatcccaccatgatttttcggtaatcagcttttgcaggcgcggaatatcctgcggcgtgagctttttctgcatggttttcagatactcaagcgcacagtattgcagctcgcggtgcggattggcccagcattgttcgacaaaccgccaatcaacctcttccgctgctccgcttttaaaaaacggtttgcagatttttaccaagcgcggcttagaaataccgagatagtcgaaacggtgtctcatataggctttcatcggcatggcgcgctcagggtcggcttcgcgggtaaggatagcaagcagttcttcgtaattcattgtatgcaccttttcagacaggcattgcgccttcctgttccaacaatattttttgtccaaccaaactgccatatcaagattcacggcttgggtatattggatattttatatttattaagaataccgcacctttgatatcaattttaaggttcctaactttggaacagttgattgttttcagacggcctgctccttgtatagtcaatccacttagataacaacgatagcgtcatactcgggcttgatccgagtatcttctgagtttatcggagctcgagatactcgggtcaagcccgagtatgacgagcgtactatttctaagttgattcaccataacaggctttttcagatattaataaagacgatgcccctgtttaagcggacttaaacaggggctcaactcatttctgaatctttacgtcgcggcacgtcttttcagacggccttattgtagcaacggctctcatctcgtagtgcaacaataaatttgattctaatgatgatgaaaacacttgtcaaatatttatttctttactataaataagcgtatgtatttttttgtaaatcaagatgaaaaggggaagaaatgaaaaaacagccgcaacgctatattttgggtttggatttgggtattgcttcagtaggctgggccttgatcttagtggatggagcggaaaatcccgtcggcctgctggattgcggggtacgcacgtttgaacgggcggaagtgccgaaaacaggcgattctttagccttggcccgcaggcaggcgcgcagtgtgcgccgcttaatccgccgccgcgcccaccgtttactgcggttgcgccgcctgctcaagcgcgaaggtattttgagtgctgccgactttaattcagacggactgcctaatctgccgattgatgcttggcagttgcgtgtggcgggcttggagcgaaaactgacaaatcaagagtgggcggcggtattgctgcatttggtcaaacaccgcggttatctgtcgcaacgaaaaagcgaaacccaaacggaaaacaaagaattaggacgtctccttgccggcgtggccgaaaacagcaaactgctgtcagaaagctccgaacaataccgcacgcctgccgaattggcggttaaattatttgcggaacaatcggggcgtttgcgcaataaaggcggtgattacacccacactttcaaccgcttggatttacagaaagagctgcatttgctgttcgagcggcaatgtgcgctcggaaacccgtttgcttcggcagagttgcaaagcaaagttgacgaattactgatgacgcaacgcagtgccttacagggtgaagcagtgttgaaaatgctcggtaaatgcacatttgagccttccgaatacaaagcggctaaaaatacttattctgccgagcggtttatttggctgaccaaactaaacaacctgcggattctgtacaacggcgaagatcgggctttggatgaaggagagcgcaaacaactgttggacgagccgtataaaaaagccaaactaacgtataaacaggtgcgttcaatattgaatctgcctgaaagcgcagtattcaaagggctgcgttacggaaaagattcagacggcctcaaggcggaaaacggcgcattgatggaaatgaaggcctaccacaaaatccgcacagtactggaaaaagcaggtttgaaaggcgaatgggaaaaccgcatccgcaaccccgaaatactggatcagattggtacggcattttcagtatataaaaccgatgaagacattaaagcagagttggccgctttaaggctgcctgaaaacgtgttggatgcgctgctggccggtttgaacttcgataagttcatccaactttcactgaaagccttaagcaatattctgcctttaatggaacgcggcatacgctatgacgaagcctgcaaagaagtttacggcgatcaccgtgccttggcagaatcaaaaaaccaaatgctgctgccacaaattcctgccaacgaaatccgcaatcccgtggtactgcgcacactcacacaagcacgcaaagtgattaacgcgattatccgccgctacggttcgccacaacgggtgcatatcgaaacggcgcgcgagttgggcaaatcgtttaaagaccgaaaggaaatcgaaaaacgtcaggaagaaaaccgcaaagaacgcgaacgtgcggcggaacattttaaagaattgttcccgcgttttaccggagaacctaaaagcggcgatattctgaaactgcgcctgtaccaacagcaacagggcaaatgcctgtattcgggcataccgatagatttaggccgtctgaatgaaaaaggctatgtggaaatcgaccacgccctgccgttttcccgcacgtgggacgacagctttaacaacaaagtgctggtgttgggcagcgaaaaccagaaaaagcgcaaccaaacgccttatgaatatcttgatggtgctcgcgacagccaacgctggcgcgaatttcaggcgagagtacaaggctgtcgttttccttatgctaaaaaacagcgtattcagacggccaaattggacagcaaaaccgaacaaggctttttggaacgcaatctgaacgatacccgttatattgcccgctttttatgcggctttattgaaaaaagcctgcatctgcaaggcgcgggcaaacgacgcgtattcgcctcaaacggccaaatcactgccttgttgcgcggtctgtggggcttgaaaaaagttagggaagacaacgaccgccaccacgcactcgatgctatcgtagtcgcctgctccaccgtttccatgcagcagaaaattaccaaagccatgcagcggcgtgaaaccttggaaacaataaataccgaaaccggcgaagtcaaaacccgcattccgcagccgtgggatttcttccgccaagaagtgatgatacgggtgttcagcgacgccccgcgcgaagagttggcagagaaattaaacagccggcctgaagcgctgcatgattttgtatcgcctttatttgtctcacgcgcccccaaccgcaagatgacagggcaagggcatcttgaaaccgtcaaatccgccaaacgcctgtctgaaaacatcagcgtggtgaaaaaaccgctgacagcgttaaaactgaaggatattgaaaacattgtcggctatcccgaccgcgagcctgctttatatcgagctttgcaggagcgattgcaggcatataaagatgatcctgccaaagcgtttgccgagccgttttacaagcctgcgaaagatggcggacaagggtcattggtcaaagcagtgcggattattgaaaataccaaacatggcttaaaagtacgtaacggcattaccgatactaacggtgatatggttcgggcggatgtctatcaaaaagccgataaaaaagggaaaaggcaatatttcattgttcccgtctatgcttggcaagttgaaaaaaatgagctgccgacagttgattgtaaaggatatgaaattgatgacacttatgaattttgttttagtttatataaatatgacattattgaaattcaaaaccctgataacatgagcaaagaactccgagtttactatatcaattgtgacagctcggatggtagattttggctggcacatcatgataaaagcgctaaagaacagcagttccggatcagtacgcaaaatcagccgatcataaaaaaataccaagtcgacccattgggcaaagaaatccgcttgtgcaaagcagaaaaacgcactgaattgaatggcaaaaagaaaaaataaatcctcagcggctgcaccttcaatggtgtagccgttttgctgtataacccatttaaaaacagaatacttacggagaaaaccaaatgacttggcgcagtattctaatcagccgccctgcacgcctgtcgctgcaacaaagccatctgctgattcaacaggacgaagccatacctataccgctggaagacatcgccgtgattgtggtcgaagcacgggaagtggtactaaccgcaccgttactgtcagccctggcacaacacggcatcaccctgcttacctgcgacgaacagttcttgccctgcggccaatggctgccgtttgcacaatatcatcgcatcctgaaagtgctcaaacaacaaatcaatatgacagaaccgcaaaaaaagcagctgtggcaacagattgtgaaacagaaaatccgcaatcaggcttggctgctcgattacagcggccacgatattgccgcaggccgtctgaacgccttggccgacagcgtaaaatccggcgataaagactttgccgaaagccaagctgccgctgtgtatttccgcgtactgttcggagaacaatttacccgcagtcatgaaaacagcgtcaatgcccatttgaattacggttacagcattctgcgctcggccgttgcccgcgcgcttgtgcaatacggctttctacctgcgctcggactgcaccaccgcagcgaactcaatcctttcaatttggccgacgactttatcgaaccataccgccccattactgatttattggtttacgacaagatgctttcaaacagtctgccagaggagcttacacccgcaaacaaacaacaactaatctctttgttatgctgccaaacagctttggacggaaacaaatatagtgtattggctgccatagaccgcaccatacaatcttttcagacggccatcagccaaaacaagcccaagctgttaaagttgccacaaatgctgagcttaaaggtacatgattatgagtgaggcccaatttatgcgcttaatcgttttctttgacttacctgtaaccactacagccaagagaaaagccgccaatcaatttcgtaaatttttacagaaagacggctatcacatgctgcaattgtcagtttattcgcgcattgtaaaaggaagagatgcgttgcagaaacaccacaaaagactgttactacatttacccgaagaaggccaagtccgctatttagaggtaacagaaaaacaatatgcaagcatggttatgcttattggtgagccaaaacctcgcgaaaaaaaggtgaatgccgaccaacttttgcttttttaaagtcgtttttttaaccaaaataaaacagggaaaccttattttataaggcttccctgttgaggtattgtagcactacgagatgagagaggaagctacaacggaagtgctgtttctacactaatccacctaattgtagcactacgagatgagagaggaagctacaactgcccctcgcctcaaacaatcagtattatgattgtagcactacgagatgagagaggaagctacaacgatattattcttataacccagcatccgagtattgtagcactacgagatgagagaggaagctacaacgactgacgccgtcttccgctgcccggtaaaattgtagcactacgagatgagagaggaagctacaacttaacgtaagaccgcctgtttaaattcaatattgtagcactacgagatgagagaggaagctacaaccggcggttcgggtggtggctctaaggttaaattgtagcactacgagatgagagaggaagctacaacgcaaaaagcgaagcatacgaacatttcgtaattgtagcactacgagatgagagaggaagctacaacgatagtcatattgcatacacaaccttaagcattgtagcactacgagatgagagaggaagctacaactcgttttttatgctgtttgccgtgatgttcattgtagcactacgagatgagagaggaagctacaacaccacgatcaacaacacggaaaataacacgattgtagcactacgagatgagagaggaagctacaaccccgcatcggctttcagcatggccactatcattgtagcactacgagatgagagaggaagctacaacatgattaatgccgttatctccatgtttccgattgtagcactacgagatgagagaggaagctacaacttgatcttgagggaggggggaactgctagtattgtagcactacgagatgagagaggaagctacaacgcaagatgcaaaactaatagctgaatattgattgtagcactacgagatgagagaggaagctacaacatgatagttgtcgtagcaatgaaattagtgattgtagcactacgagatgagagaggaagctacaacccaaattcaacaggcagcatcgccgaaaggattgtagcactacgagatgagagaggaagctacaacagggaaagaattgggtgataacttggttttattgtagcactacgagatgagagaggaagctacaaccggcgtaagactgataaaaaaatgcagcgtattgtagcactacgagatgagagaggaagctacaacaaaatcttatcatttggccgtctaaagcgtattgtagcactacgagatgagagaggaagctacaactcacttatttgtgggaataccgccattaatattgtagcactacgagatgagagaggaagctacaacctgaaagtatgtcccagcgcattgatgcgtattgtagcactacgagatgagagaggaagctacaacaagtacgttaggcttagacgataaggtgagattgtagcactacgagatgagagaggaagctacaactatgttgctaaggtctatgctgaaaaagcaattgtagcactacgagatgagagaggaagctacaactcaggttgcttagctttacttcggctacccattgtagcactacgagatgagagaggaagctacaacatcaggttcaaaatctcaagcaaaggctctattgtagcactacgagatgagagaggaagctacaaccggcagcctgttgcctgatttgatagatgcattgtagcactacgagatgagagaggaagctacaacgcgtggcgtggccataacaccatgcccaatattgtagcactacgagatgagagaggaagctacaaccggttgcaacgcggcaaaaacgggttgggaattgtagcactacgagatgagagaggaagctacaacgcgaaaaagtcggttccgattgggaatccaattgtagcactacgagatgagagaggaagctacaaccgagtatttggagcggcacgcatctttacgattgtagcactacgagatgagagaggaagctacaacatagctggtattgttgttggtgaggctgctattgtagcactacgagatgagagaggaagctacaacatagctggtattgttgttggtgaggctgctattgtagcactacgagatgagagaggaagctacaaccttggaaacttgccatacaccatgacaggaattgtagcactacgagatgagagaggaagctacaactgccgataaagtggattaaatatctcccgcaattgtagcactacgagatgagagaggaagctacaacagaagacacagcccactcctccgcattattattgtagcactacgagatgagagaggaagctacaacgaagcgagtaatgcggttatcaccgtttttattgtagcactacgagatgagagaggaagctacaaccgaacgctgcccgggatggtatcaaaaccgattgtagcactacgagatgagagaggaagctacaacccaaaaatgcctgcatggttgccatttcctattgtagcactacgagatgagagaggaagctacaacttttaaaggggcaggaaatgactaattgggattgtagcactacgagatgagagaggaagctacaacaagccactcaatcgctttatcgggcttcaaattgtagcactacgagatgagagaggaagctacaactataacgggcgttttccggaggaggcacgcattgtagcactacgagatgagagaggaagctacaactataacgggcgttttccggaggaggcacgcattgtagcactacgagatgagagaggaagctacaactataacgggcgttttccggaggaggcacgcattgtagcactacgagatgagagaggaagctacaacgagatggatgtgttggcgcatatcggccagattgtagcactacgagatgagagaggaagctacaacaaatcaggacgcggggtgcgggtttcccttattgtagcactacgagatgagagaggaagctacaaccactttccacaccattatgactatatcaacttccatcttatcctttttcagtcaagcattgcgccttccaattccaacaacgccctttttcgcacaaggccgccgccgtaaccggttaaatcgccattgctgccgatcacgcggtggcacggtatcaggatggaaattttgttctgaccgttggcagaggctacggcacgcacggcctgcggtttgccgatgcgttccgcctgctgcttgtagctgcgtgtttcaccgtaaggaatactttgcagctcgcgccaaacttgctgctgaaacggtgtgccgaccggatcgagcggcgtggtgaaatttttcagacggccttcaaaatacagatccaactcttgctgcaaagtttggctgcgcaccgtgtcgcgccacacaaaatccgcctgaaatgctttttgcacggccaagagttcgctctccagcattctgcgctcgggaaactccagcaggcacaaaccttgtgtgctgaatacggccagcatctgccccaatggggtggcgcgcacagagactgtcagcctgttgtcgtatttgctattgcgttgtgccatcaggtgcgtgatgcgttttagacggatatactgcccgagcgacatgccgacgtgccgctcgaaatcttttttcaacataaccagttcgtctgccgattcaagcgggtgtgcgtgataagatttaggcggattttcctgtgctgccagccatgcggcataaggttgccactgtgatgaaagcaaggtttgcggatcgggcagccggcggatattcatggagtttccttgcagtgttcagataggtatcagcatttcaaaactaaaagtctgataaacaatcaaaagaacgaatttttgatattaatgtattacccaagttcaatattatatttatctcatcaattttcagacggcctgcacaggcttcgcaagcccgtgtcagcctattgttttcaatctatctttgttagaattatattcttttgaaatattaaataagctaatcaagcaaaacaccgtcatgattatcaaacaaggacataatcgggaacatgatattgaggatctaaacacattattggctttgccttatatcgattccgataccaaagacaaaatcagccgtgaaatcagaaatatccagtccggcatcaaaggcgaaaaagaagcggcctaccacatgaattttcagtggagtgaatccaaaaattggatggttatccatgatttaaggctggaatataaaggtcatgtagctcaaatagaccatttgctgcttaaccgctttatggaaatttatgtctgcgaaagcaaacgcttcggcgaaggcattgccattaatgaacatggcgaattttcagcattttataagggaaaatcttacggcataccttccccgatagagcaaaacaaccatcatatcaaactgcttcaaagacttttcgacagcgactgcatcgagctgccaatcaggctgggcgttaaaatgaagcccaagctcatcagcctgattttaatcgccaactcagcgcgtatttcacgccctaaaaatgaaaaaagtgttgagagcttagacagaatcattaaaaacgagcaaatcgttaaaaaaatcaacagagatattgatgatgaaaatatctttagcatggttaggtcggtatctaaaatcatctctccggaaactttgcagtcgttcgccgaatctttagccgctctgcacaggccattggaaatgaattggcgggcaaggttcggtatcaatgagccggctgaatccgatccggttaaagcggaacatgtcgattctgttcaatctcaagatgagattcagcaccaagccgatgtgcaagataatgctccgaatgctgcgccggcccgcttgttctgcgccggctgcaaaaaaacggtcagccctaaagtggcaaatttttgctggagcaacaaagcccgctttcaaggcagggtgtattgttacaactgccaaagaagtatcaaaaaaacggtagattagcggatacacacgctctttacacggcaggcatgatggataaaaatgcacaatctgctacgcgcttgatgccttaaagtattagcgtgaaattaccttgcccgccgcctgattgctttggtctttggcttgctgctggtttatataggggcggaaggattgatcagcctttttgtataaagttttcagacaggcataactttgcgcaatgcctgtctgaaaacaatgctttcttttcaacgtaaaaaccaacgtttatcacgcaccgaacaacacggccttgcctttcgcgtcggacacatccaacacatctatattctccccgtccaacaccgcctctgtgagcatggccacgccgccggaggggccgatttccaaaatgcggcggacgcccaaatctgccatgcggcggcattcttctacccaaccgaccggatcgaccaatacattttgcgcaatgccgcgcgcctgttctgcgtccaaaccgcaggccgccgcccattcggctacttgcgctacggcgggtaccagcgcgggatggtggaagccgacttccacttcaagcggcacaagcagcgattcgggggtaaggccgtctgaatcttttattgtggctgagagctcatcacacacgcgctgcaccgattccggccgcccgctgaccacaaaggcttcttggctgttgcgcaggccgatgcacgggcgagcggctgggtcggttgaggcggcggggaacaggctatccaccatatcggcaagctgcgatcggctcacgccctgcaccatcaccatcgcatggccgccgtcgtgcatatacatgccggtttttctgccttgcaaagtagcggccgcgccgatcagttcggccaatgccagaatttcggcggagcgttgcggttcgctaaccagataacgcccgagtatgccttgcgaatgcccgatcacgcctgctgctttgccgatgtccaacccgcgtgctttcaaggtgtgcagattggcgatttgcgaaaggaaaatgccgggcacgctcacggcagcgcgtactaaatcaatttcgctactgtcgctgtctgcccacgcaatcggcgcaaaaccctgcgggcgggcggcggcgagctgctccgccacgggcgccaccatttgggcggcggcatcggcaatcttgccggtttcctcccgcgcgccttcggccaaagcctcgcgcaacatgctgatccaatcaaacccttgaccggaaaaacacagcgcaaacggttcggcatgcacacgctcaagcaggcgtttttgttcggtttcactcattgtctcactcctttgtatgatggttttcagacggcctcagcggcctttgtccgcatcctcaacactcagccatgctgctccagcatttttctaaaccgcatcaaggcaaatgccaaaaacagcagccccgtcaaagccattgccaaaagctgcggccacacgatgctcaagccggcattgcggaacagcacgctttgggcaaactggataaactgcgtgctcggccaatattcgctgatccattgcgccgctgcgggcatattgttgcgcggcgaacccacgccggaaaacagcagcagcaccatatacagcggaatcatcaagaggccgaactgcgccatgctcggcgcaatcgtggcaagcatcaccgccagcgcggcaatggaaaacagatacacggccacgccgaagccgtagagcagaagggagccgtaaatcggcacaccgagtatcccctttaccaccaaccacatcgacagcatactcaccagcaaaatcaccgcactgttggccagcactttcgccagcatgatttcggcggcgtttaccggcatcaccagcagatgctcgatggtgccgtgttcgcgttcgcggatcaccgccgcgcccaccaaaatcagcgccaacaccatcaccatattgcccaactccatcggcggcccgtaatagctgccttcggcattggcgttgaaatgcgaatggatcaccggcttcacaggcagccatttctccgccgactgctgccgcgcaaactccgccgtttcacgctccagaatgcgggtcagataagccgcgcccaaacctgcctgcgacatggcggtggcgtccacttgcagcagcaattcggggctgcgccccatcagcacgtcgcgctcgaagttcggcggaatttccaaggtaaaaatgtactcgcccttatccatcgcctcattcaccgcttctgccgccacttcctgcggcggctggaaaaacggctcgcgcacggcatcgcgcaggcggtaggaaagcgccgaacggtcgccgtccaccaccgccacggcagcgtttctcactccggagtcgattccagctgcggacaaaaccgttatcgtaaacataaacacaatcaacaccatcagcaccaagtcggaaaacaggctgcggagttctttttgtgctaagtagaagatgtttttaatgctgcgcatgggcttgccttgggggtttcagacaggcatttcacaccgattcggcggttgcatcggtaaattcggccagtgtctgcaaaaatcgttcggggctttctttttgcggccagtgcttgtgctcttcaaacacttccagccgcgcctgcggcatgatggtggcggccgcttcggcatcggccagcggcacggccgggtctttgctgccgtgaaccagcagcacggggcagtcgattttcggcagctccggcagcaggcggcctgtgggtttgccgccgtaggtttcgctgagctggaaagattggaacgctttgccggcatcttctgccaaggcggccgcgcgcacttcgtccaccagttcggtgctgattttgccggcatcgccgaatagtgtggcggcaatcaggcggcgggtcagcaggcggctggtgcacaggcggtaggccggcaggttccagcgcgagcgggcataccagccgcccaaccgcggccacggcagctcggtgctgatgccccacggcgccaccaacaccagccgcttgagcaggtgggggtagcgcaaagcaaactgcaaagccacgctgccgccgagcgacaggccgcataagttgatacgctgcaggcccagcgttttccaaagcgtgtagagaagctcggtgtaaaaatccagcgtgtagtcgatatcgggtttgctgctttggccgtagccgggcaggtcgggggcaaccaggtattcgttgcccggccactgcgttatgatttcgcgccacgacagcatcgccgaatccaaaccgccgccgtgcagaaatacccaggcttcttcttcgggccggcctgcggtgtggcaggcgaccgaaaggtcgtcagacagggttaaagtatgtgtttcgatagtgttcataatgcatcttttccaaaatatgaagcgcgtttatattttcagccaacccgtatggattcagtatctcaatattcgggccggcttatagaatggttgtatagccttttcagacaggcattccctcaaacccaacgccgtaccttacggcaatagctcaaataatcctcgccaaacttgtgcgccagcacgcgctcttcg

SEQ ID NO: 2708 - DNA, 23192 bp, synthetic construct
  variation 20407..22301: note = n is a, c, g, or t
  variation 9713..9812: note = n is a, c, g, or t
  source 1..23192: mol_type = other DNA
  misc_feature 1..23192: note = Synthetic
agaaatagctggcgcaatcaaagaatcatgattgtaactgtgttgacgagcaatatcgtgagtcaaataatgcgctttgacgtaacttttgacaaaaaaattgccacgccatttttgtgccaatcgcaatgcagggcgtgcaaatggtacatacaatttcactttaaatgcaggtgcagccaaaatcgcacaacgaattttcggcgcataatcattcagccagccagccgcaatcaccgcacctacgctttggacaattaaacaaatattttctggtgtaatgccatgttcatgttgtatgtgtttgataaattggtctaaatcatcgattgtagtggcaacactggggctatcgccgcgctcacctgtggtgtacccatgtccacgcgcatcccacgcaaaacacgcaaattccgacaaccgcaattcttcatgaacatacatcatgcgttcagaatgttcgtgtccgcgatgcagtaacacaatggcgcggcctgtgttgccattggcagcggggcggtggcgatagaaaatctgagtaccatcgctggcggtaaaatgatgagtggtttcggattgattcatgaataaaatcctttggttatttcgtgaataggattgtaagcattttcaggctaggggtaaaggatgattcatctataacgccgactcaatcaaagaacaagctaaggaaaccatactttcatcattgcattttaacccatcataccgagtagcgatggcgcgaaaatattttaattgtgcaaaacatttcttctttgaatcatcatatctttacaaaacctttgcaaaacttttaaaaaataaaaaattcaaaattttattaaattaatatatttaaatttctattttggctgaaaatgggagttttacaaaggtcttggaatatgacaaaaacttcgccttttctaaaattcgtaatcggctttcaaccacacggtgcgtggcattcccacaactgcaaaactgcggtcatatctaccacgttggatttgccaataatttttattaaacacattttccaccgcgccacgcaaagttacttgttgatttttaggtaattttaatgcgtattttgcgccaatgtccactgtggtgtatgcaggcagcctgaaagtattttccgcattttgaaacgatttgccataatattgtgccgctgcgttcaatgttaagccgcgtacaaagggtgtgtcccattctacacctgctttggcaatcacgcgtggactggttacttgttgattgccatcaatcatattgccagcattggtttggtaatttttcagcttagcacgttggaatgtgatgccaaaagtcgggcgtaatgttttgtttaataagttggcataagtacttaattctaaacctgtgttttgttctttgcccccgtacccaaacacgcctgtttgcgcatttaaatatgcgctggggcgattgatgcggtacacgctggcggtggtggtaattaagccatcttgccaatttttgcggatacccaattccatttgattggttttaacgggatctaatgtttctccattatttttggcgttgtcgttgtctactaatgcaccaggttctaaatcgcgcatataattaccatacacaaccaattgattatttggtacataagcagcggtaatcataggactgatggcgtgagtagtacttttggtttgtttttgatgattttcttggcgcacatattgtaaacgcgtacccaatgtgaggcggaatttgttgtcaaacatcatcaacgtatctgataacgctaaactgggtgctgtaaatgtttcgtgggtattctgctgattgactgacaaaatagtcggtgttgcagggaattgaggttggtaaatattgctgctgaaaccaccaaaagttttgctgctgcggtcaaaatcgcgatgacgtttcacataatccgcggcaacattccattgatgttcaaggctgcctgaaaaaaattgtccacgcgctttcaaattggcactggtggtacgcgtgagataatctatggcgcgtgatggttcagcacggtaattgccttgtgcattgagcattttcaattgggtaaatgagccgtcataacgcgaatccatgtagcccaatccacctgataccacaacattttttaatgtgtcatattcaaaagttgccattgcagttttgtcttcggtggtttgacctgaccactgtggaatgagattgattttgccatcgggagcttcgggcatttggaatttgagcagttgcatatcttggacgcgtgctcgtccgccttcggttttgcgtttactgtacatcaaatccacgccaacttttaattgctcgccacgataatctgcaccaatagcggcctcacgatttttttcggagaagtgttcacgcgctgtatcgccttgacgaatcaagccattcacacgaataccccattcaccatttgcaccaaatcgccgacctatgtctgcactggtttggtagcggctgtcgctgaaatagccgacaccaaaacgattaatgggttgtttacctgcgcgtttggtttcaatattgacagatgcgcccgccgagccttctgcatccatgccaaccaaagcggttgatgcgcctttgattaattgtgcggacgccacgccagccgtaggcgagttataagtggaatataaaccagacaaaccattaacgctaaattgtcgtgcatcaatttgtaaattgcggacatacaatccgctaatggtattggtttcgccaccaaaattcatggtagacgcatcggttttggctattacatcaacgacattgcgtggtgcttggttagcgaatgctttttcatcgtaattcacgacagtgatgggtgatgtgaaattattttgtttgcctagcaagcctaaattcacggcatcacgcaaatcgccatcgctggatttggaaaaagaacgttgaactttagcggttactttgacatcttctaatgtttggttagcagtcttgtctgtggcatctgcggcagcctgaaaactcaataacccaccgaacaaagccaatattgattttatataattcatgttaaacctcgtgttgaagcgtaaaaaatcgcaattataactgaattgtaattttaatgataatattttctattcaattattttgaaataagattttctttcaggcagcctgaaaacggtataatccagctttctgattaactataaataaaaaaaacacaagccatgagtatttttgcattgattttattggcatttagtatgtctatggacgcatttgcggctgccattagcaaaggggcagccgcgaaaaacgttagcactcaagaaattatccgtgcagcgttgatttttggggtagtggaggggattacgccactggttggttggggggcagggcaggccgcgcaatcttttattgctgaatatgatcattgggttgcgtttattttgctattgattttgggtattcgcatgatacgcgagagtttttccgcaaaagatgaaaatgaaatagacaataaaaataataagttaggtattctaattttgactgccatcgccaccagtattgattctatgattgtgggcgtgggtttggcgtttttagatgtgcatattggctggacagcattggcgataggctctgcgaccacgtttatggcggcgattggcatgggcttaggtaaaatgttgggcaagaaagtcggtcaacgtgcggagttggtaggtggcttggtgttgattgcgattggttcatctattttgttgaaacatttgggttttatttcttgaaaataaaatgaataagattcaggcagcctgaaagatatttgggtcaatttgatttgctaaacgcgcaaaaaatcaaattgtgctatattcgctcaattttcttttgactaaacattttaggataataaaatgcaaaaaaagtattctgtttacgcattggctttgatgatgagtgcgtgtagtgtggtggatagttccagtttaaatgcgcaatctgcccaacaatacaccgcagtcgtacaaaaagcacaatctgctaaattggttgacaccacgtccaataccgcgaaacgcgttcaaactgtgtttcgccgacttcttcctcatgcaaatgccgccaaccaaacagggcacccttttgattggcaaatgactgtcattcgttccaatgagatgaacgcgtgggcgatgccagggggtaaaatggcggtatatacaggcattgtggagcagttgaatttgacagatgatgaattggctgccgtcattggacatgaaatgactcacgctttgttggaacacagcaaaaaagaagccaatcgtacggctggtttgcaaattggcgcgaatttgggcagcgcgattttgcaagccacgacaggcataaacggtgatttggtgaatacaggcattggtttggcggcggatttgggcgtggacaagccatttagtcgtagtgcagaaaaagaagccgatttgggcggactcaaattaatggcacaagcaggttataatccacaagctgcgattgctgtgtggcaaaaaatgaatgcaaaaaataataataacaatatgttaaataaaattttatccacacaccctaccaataatgctcgcattcaagaattgcaaaaagaattgccaaatgtggtacctatttatcaacaagccattggaaaaaaataattatatttttcaggttgcctgaaaaatatttttgatgattggattaacaatattttttaaccctttaatttgaaagaaataaatgattaaattgcacactaattttggcgttatcagcattgaattagaccatgacaatgcccccattaccgctgccaattttgaacaatatgtgaaagatggcttttatgatggcgtgatttttcatcgtgttatcaaaggttttatgattcaaggtgggggcatggacagcgacatgaacgaaaaagatacgcgcgacagcattcaaaacgaagctcataacggtttgaaaaatgagaaatacagcattgccatggcgcgtacgtccgacccacattctgccagcgcacaatttttcatcaataccgccgacaacgaatttttgaattatcgtgccaaagaattgcatggccgtacagtggtgcaagaatggggctacgcggtgtttggcaaagtggtggatggctttgatgtggtggacgcaattgaaggcgtcaaaaccaaaaatcacggctatcatgctgatgtaccagcagaaacagttgtgattaccaaagcagaagtggtttgatttttttgattcaggcagcctgaaagcgttttttcaggctgcctatttaattaacatattgtatttaaggctgcctgaacatgaatctgaatcaaattcgtgaaaaaattcaaataattttaaccgaaaatgaattgccccaagacccaacttcatttttgcttgaccagcgtaaacgttatatcagtgaaaattgtttgttggttcaacccaatagtgtggaaagtgtgcaaaaagtggtgcgtttttgtgcagaaaatggcgttcccatcacgccgcaaggtggcaatacgggtttggtgggtggttcggtggcgaaaagtggtatcttattaaatttaagtaaattaaataaaattcgtgccatcaatcttgctgacaacaccatcacggttgatgcaggttgtgtgttgcaaaatgttcaggcagccgcgcaagaagcgggacgttttttccccttgagccttgcgagtgagggttcgtgtcaaattggtggcaatattgcgtgtaatgcaggtggtttgaacgtgttgcgatatggtacgatgcgtgatttggttgtggggttggaggtggtgttgccgaatggtgaattgatttcacatttacaacctttgcataaaaatacaacgggttatgaattaaagcacgtatttattggcagtgaagggacgcttggcatcatcacaggtgcaacgctgaaattatttgcgccagcccaaaccactgaaacggcgtgggtaggggtggagagcattcatgatgcagttaatttattaacatctattaaaaatcagtttgcggaacgcttatgtagttttgaattgatgagtcgttttgcactgcaattatcatcgaattttagcaaaataaatcagccagttgattcggattggcatttgttattagaattaacagatagcctaaaacgtgaagatttggggcatttgttggctgaatatttatatcaaaatggttatgaaaatagcgtattggctcaatccgagcaagaacgccaaaatttttggacactacgtgaaaatatttcagccagtcagcgtgatttaggcgtaagtattaagcatgatattgccatgcctattattcaagtagctgattttttagaaaattgtggttctgaattgcagctagaatatccagagatgcgcattgtggtttttgggcatttgggtgatggttcattgcattacaatacgtttttgccagtgaaagataatcgcgcttatgaacaagaaggcgcaattaatcagattgtttaccgccacattttagcgcaaaatggcacaattgctgctgaacacgcaataggcagcttgaaaaagcattggttggcgcaggttcgcacggctgatgaaattctattaatgcgtgccatcaaatcgcagcttgatccaaacaatttatttaatgcagacaaattgttgccatcagtttaatgagcagtaacttgacaatttttcaggttggctgtagagttctgttctttcggaataaatggcgaattagctcagtcggttagagcagaggaatcataatccttgtgtccggggttcgaatccctgattcgccaccaaatttttgggggtatagctcagttggtagagcgcttgcatggcatgcaagaggtcagcggttcgatcccgcttacctccaccatattaaacaaagacttaactttttaatgagttaagtctttttttatttccttttcgtggggttaataatgaggtagacaaaattttgactatattcagattccatcagaagaaattagaatatacttcctgcgaaactttttctttgttagaatacttacataaactacgaaaatagaaaaagtttcacagagattaaatttaaacgattagtaggtgtgaaaagagaaacttttgcacaaatgcttcaaataattatggcaactttacagtatctacgtgaatacagcacttacgaacaaattgctgctgattttggcattcactaaagtaatttaatctgcatttgaacgatacaacgtttgggcgagtatatgattttaatttatttaaatcaactttagcagacagtggttatcaaggtattactaaattatacccataagcccaaacacccattaaatccagcaaaaatcatcagctacatagaagaaaaagcatttaattaccatctttctagccaaagaatacaggtagaaaatactacattggctaaatttaagagattcaaagtattatcttgccgttatcgtaatcatcgcaaacgattaggatgacgcttgaaccttattgctggaattatcaacacagagagcttgagttttagtttctcaggaagtctattgttatgaaatatgaaaaatttaataattaaaacactaaagttccttgataaggacgaagtttttagatgggtattgttaatactaacaggtatatatgtatgggtaagttgggtaaaattagatgatattgctgaagaaaaggcgaaaatagcatctaatattcaagaagactgtgcatatgtagtatctgcttccccacaaaaacacaggtggattctttctattggcagccgaagttcttttaaagggtatgaggtagatagtataactaaaataccaaaaacatttcctttttttaaaaaaagaggagagttctatacatcgttacaccatgatgataaaacctgtcataaagtgaagtatattcgaataaattggattattgttagaagaacttatatatatgatattatttaattttggtagtgccctgaaaaaggtgtttaatctaaattctatttttctgacgtttacgccaatgacaagcattgatgtaggcaaagccaatccaatggcgaatagcacaattattgacttcaatggcttgggtatgctgtttacctgcccaccgttcattagtatctgcaaaaacagtatcaaaggattgccaatgatcactcgcaatacagtcataggtaatgttttgctcttttaaacgttgttttaattcaaaagccattttcaaatcatgcttaccccaaacaaaggcaaccatttgacctgtttatctggtgataggcataaaaatgaaacgccttgcgcaatcttcgcaagcataacgttgtttttgattgtcatcaaagccatttttctttatattgtgtcctttgcagtgatgacaataaacggtaatttgtgtatgcacaactcaaatataccttgttctcgctgctttttgtttggaattttttatagcacctttttcaggacaccatcaaatttttcatttaagaaagtaattaaaattgaaaaaaataaataaaaaatttttgatttgtattctttttattatagcatttggattttattattttcgtatttttctctctcccttacaaattttaagtattagtgaaattgagaaaaataagcaaggtatttgcttggcggaaaatcgtaaattaagtgaagatgaattacttaatcgtggtatgcagagctattttaaatatttacagacagcaaaaatatcactagatgaagcaaatgaagtacagatcccaaaatgcccagaaaattgtataattactcaattagaaaattataatttattagattatttgaggttaaataaattaaattataaagaaaaccacaaaggtaaaagaattatcccacagggagtaaaaattaattcatttccaattaatcaatttgggaattatataaattttagaaataaacaaaataatttgtttagtttatatgctagtcaaaatagatgggacgatttttatccaaatgattgttgtgaagtaaatacattagatttttataaaaaaaatggactttcattagagaatgcccctaaatattggcgtagtatcggtaaaggaaatttttatctaactattaaatatttaagtataaatgcagatactggaaaatcaattatattggattatgaaacaatttctttggataattacggtaatattaataaaaaatattttaatgaaaagaataataatgatgatttaaaaaaactagcattacagatttcaatttttttggtatttaggagaatggaattatattccgaaagagaaattagataatcaatgtgttctaatggatagtaaattaccacattttcttaaaggatatgaattagttgcctataatgatcaactatatttttgtaatttgaaattaggagacatattagattggaaataaggaaatttatttcttttaataacatgtaattttatggagttttaaaatggctaatttaaagttagatttgtcgcaagattatgcaacacaaatgctatctttttatttgtatggtgaggaaggtagnnnnnnnnnnnnnnnnnnnnnnnnnnnnnnnnnnnnnnnnnnnnnnnnnnnnnnnnnnnnnnnnnnnnnnnnnnnnnnnnnnnnnnnnnnnnnnnnnnnnacttggtagaaaacgcttttgcacgattaaagcattttcgtgcgctggcaacacggtaggataaattaaaacgtaattatgaaagtaccgtgtcattagcttgtgctttgatttggttgaaattatagctaaaatgtcattagcccctatgattttgtcaattaaattcttactgaggattcatgatgatggaaaaatttcactatgtattgggtttggatttgggtatcgcctctgtggggtgggctgccattgaaattgacaaggaaaccgaaacatcaatcggtttattggattgcggtgtcagaacatttgaacgtgcagaagtacccaaaacaggcgattctcttgccaaagctcgccgtgaagccagaagtactcgccgtttaattcgcagacgttcgcatcgcttattacgtttaaaacgtttattgaaacgtgaaattttcaggcagcctgaaacgtttaaagacttaccaatcaatgcttggcaattgcgtgttaaaggcttggatagtcggttgaatgaatatgaatgggcggccgttttattgcatttggtgaagcatcgcggttatttatcgcaacgcaaaagcgaaatgagcgaaacagacagcaaatctgaaatgggcagattactggcaggtgtggcggaaaatcaccaacttttacaacaagaacaatatcgtacaccagccgaattagcactcaaaaaatttgtgaaacattttcgcaataaaggtggcgattatgcacacactttcaaccgtttggatttgcaagccgaattgcatttattgtttcaaaaacaacgtgaattaggcaatccattcacttcaccagaattggaacggcaagttgatgatttgttgatgacgcagcgcagtgctttacaaggtgatgcgattttgaaaatgttgggtcattgtgggtttgaacctgaacaattcaaagcagcgaaaaacacattcagtgccgaacgttttatttggttgacaaaactcaataatcttcgcattcaagaccaaggcaaagaacgtgcgttaactgccgatgagcgtaccaaattgttggacgagccttataaaaaaagtaaattgacttacgcacaagttcgcaaattattaagcttgcctcaaactgctatttttaaaggtttgcgttatgatttggaacatgacaaaaaagcagaaaacagtacgttgatggaaatgaaatcctatcacaacatccgccaaacattggaaaaatcaggtttgaaaacagaatggcaaagtattgccacgcagcctgaaattttagatgcaattggcacggcgttttccatttataaaaccgatgaagatatttcgcatgaattaaaaacgtgcaggctgcctgaaaacgtattgaatgaattactgaaaaacatcaattttgatggattcattcaattatcgttgactgcattacgcaaaattttgcccttgatggaacaaggctaccgttatgatgaagcgtgtacccaaatttacggtaatcatcattcaggcagcttgcaacaagaatcaaagcaatttttgccacatattccgattgatgatgtccgaaatcctgtggtgttccgtactttgacccaagcaagaaaagtggtgaatgcgattattcgtcggtatggttcgccagctcgtgtgcatattgagatggcgcgtgaattgggtaagtctaaatcagaccgtgaccgaattgaaaaacaacaacaaaaaaataaaaaagaacgtgaaaacgcagtcgccaaattcaaagaagatttccctgattttgtgggcgaacccagagggaaagatattttgaaaatgcgtttgtatgaacaacaacacggcaaatgtttgtattcgggtcatgatattgatattaatcgattgaatgaaaaaggttatgttgaaattgaccatgccctgccattttcacggacttgggatgatagtcaaaataataaagttttggtacttggcagcgaaaaccaaaataaacgcaatcaaacgcctgatgaatatttggacggtgcaaacaatagccaacgttggcttgaatttcaagcgcgtgtacaaacttgtcatttttcttacggtaaaaaacaacgcattcaattagccaaattagacgatgaaaccgaaaaaggatttttagaacgcaatctaaatgatacgcggtatattgctcgttttatgtgtcaatttgtccaagaaaatttatatttgacaggtaaaggaaaacgtcttgtttttgcatcaaacggcggaatgaccgcaacattgagaaatttatggggtttgagaaaagtccgtgaagacaacgaccgccatcatgctcttgatgcgattgtggtggcgtgttccactgcttctatgcaacaaaaaataaccaaagcatttcaacgccatgaaagcattgaatatgtggataccgaaacgggcgaagtaaaatttcgtattccacagccttgggattttttccgtcaggaagtgatgattcgtgtgttcagcgaccaaccgtgtgaagatttggtagaaaaattgtcggctcgtcccgaagctttgcatgacaacgtaacgcctttatttgtctcgcgtgcaccaaatcgcaaaatgtcggggcaagggcatttggaaaccatcaaatctgcaaaaaggctgtctgaagaaaacagtatggttaaaaaaccattaaccacattgaaattaaaagatattccagaaatcgtaggctacccgagtcgtgaacctcaattgtatgccgcattgaaaacacgtttagaaacgcatgatgatgacccaattaaagcctttgccaaacccttttacaaacccaataaaaatggtgaattgggggcgttggttcgatcggtgcgtgtgaaaggtgtacaaaatacgggtgtaatggttcatgatggcaaaggcattgccgataatgccacaatggttcgtgttgatgtctataccaaagcgggcaaaaattaccttgttcctgtgtatgtttggcaggtggctcaaggaattttgccaaatcgggcggttacttctggcaaaagtgaagcagattgggatttaattgatgaaagttttgaatttaaattttcgctgtctcgtggggatttagtggaaatgattagcaataaaggaagaatttttggttattacaatgggttagatcgtgcaaatggaagtattgggattcgtgaacatgatttggaaaagtccaaaggaaaagatggtgttcatcgtgttggcgtgaaaaccgccaccgcattcaacaaataccacgttgacccacttggtaaagaaattcatcggtgttcatctgaaccacgccccacattaaaaatcaaatccaagaaataatctaaatggttatgcttttatctcaatcaagcggataaaagcataaccgtttttttcaggctgcctgaaacctttgcaaaacccattcccacgaatgctggaatctaatagcaaaatttagataattgattttatttgattgattaaaaatctatttaagattgaaaatggattaacgcttacgtggtaatgatgacggatagttttgcaaaggtttcagactaatagttttctttgatttgccagtaaccaccaaagccaaacgccaagctgctaatcaatttcgccattttttgcaacaagacggctatgaaatgttgcaattatcggtttattcgcggattgtgcgggggcgagatatgttgcaaaaacactacactcgtttgcaagcgcacttaccatcggaaggaaatgtccgttgtttagaggtaactgaaaaacaatttgtgagtatgaaaatgctgattggcaatccaagtccgcgcgaaaaaaaggttaattcggagcaacttttgttattttaagcgtaattttttaggtaagaaaatccccgaaagccttgatacatcaggctttcggggaggggtattatagcactacgagatgagagggggaactacaaccgtgaacgtgatagatgcgtgaacgtgataattatagcactacgagatgagagggggaactacaactgagtgatagatacgtgagtgcgtgtgttaattatagcactacgagatgagagggggaactacaactgagtgatagatacgtgagcgcgtgagtgaattatagcactacgagatgagagggggaactacaactgttggacgtagcaaaagccaaaggttgggattatagcactacgagatgagagggggggacgacaacaggctgcccagtgattcaggcagcctgaaaattatagcactatgagatgagagggtggacgataactaattcatctgacaacggtattgttgtggtatctaacgcatacgcataggttggctgatgagcagagttagcagtgtcagttgcggtgtgggttgggttggcggtcagcatattgggtaaggaatccgccaccacttcataatccaactgatggtcatcatgaattggggtatcatctgttgattgtgtggtggtttcggttaaatcatgctggctgatggtttcccatgttgcggtactgttcacaggttcgctgctgcttactgcatctttggtatcagctgccacatcgtccactacttcataatccgattcagcggtggtgtggtatgcgtacacagtattggcattgggttgaatgtcgtaagtgtatgcggtggctgattcatcggtagatgtggtttttgcagacaaatccgcataaacgctgttttgtacattgctgtctggcacataatattgatgcgcttgtgtatcggtttggctggtgttggacgcagcgcgatacacgttatcggcattttcatgttcatgatgtgtttgcccatcggtggcggataaagtatccattgccgtggtatcgtctaatgtacgcgtttcccattgtggtgcttggtaagccgatttcagacgagccgcagcggcttcatcaaaacggtattccaatgcagatgcgatattttttaatggattaccgtaagtatcttgcccagtggacaaggtaatatacggcgcacgcatattttgacctgctggcgaatattgcgacacgggttcaccaatcaaatctttggtggcaatttggaacgtgaaatcgcctgtaataccattggtttttgtggtgtaggtatgtccattgatggtggtggtgatggtgtgtaccatcttcaaatcattatcatcaaatctagatgctagttgacctttaacttcaatgtattcagcttttaattcatcggcactcaaatagttatcacccgttaaatcgtccaattggagttccatattggtagaaattttcacgaaatacttcaattctgtgttgacggtttgggtttcgccatttgcggtgtgggcaattaaagagccagtgagtgtacggtcgcttaatgttttacggcgtgttcctgtctcaaccatgtcatcagttggtaaatcaaaactgaatttaccatctgcttgaacggcttgtttgtatgttgtgccagcaagcgagatagacacgatatcaccagctttaaaatcaccaatgacagtgcctgttacacgagtggtggtgttttgttcgtattcggttcgggcgatgatgttgtcttctgtaaccttatcaaacaccacatcggccaattgagcttgataactggtattcaggctgcctgaagctttgttaccataattatcggttacattggctacgatagaaatatcattgctaccccaatgcgcgtttaattctgaccctgcaacagtaacagtccaattcctgcccgatacggttgcagcatgggttttgccattggcgatgacattgacttgtacattgctgtcgctggtgtcatatgtatcgtaatggactttcccagagaaagttacattgccttgtaaatcattcattttcaaggtgggtgcggtgtccaattgaatggttggagtactggtgtaattattcacatcataattggcgaatacttcttcactggttgttgtattgcccgccacgtcttgagtatccacaaaaacgctgtatgtgctattttgggctaataattcccctggtacagcaatattgtaggtattgccaaccaatttgccttcaaaagtaccattgttcccgcccaaagtgatggttactttatcgccatcgcgtgcatcggcgaccatacccgtgatgtttaccattacgccagctttggcttcatcggcattgatgttgttgtcgtctccaacttttccgatggtaattcttggcgtagtgatttcggtgatgacttggtaatcgcgagtggtttctacagtggcggtattgcctgcattgtccacatcaactttgactgccacttgccctgttttgccattgacggtatcagtggcatttttggctaacaggctgcctgaaatattttcaaacgtgaacgaaccatcattttgtactgttgtggtgtgtgtggttgtaccgatggtcagcgttactgtaccgcccacagcattggtggttgtacctgtgatgtttaccgaattcatggattcatttttgttaatgatattgtcttcggtaatgctgttgagcgaaatggttggttgcgcaatatccttaaccacttgataagtgtgagtataagtattggttgaagtattttgtgcgtcatcggaattattcacggttacggtgaattgtgcaggactgcgatccaattctttgcccgatactttgaataagaatgagccatcgtttgccaaaatggtgcttgggtaagatgtatcgccgattcgcaaaataaccgtgtcgccgacgcgtgtattggtcgcatgacctttaatttcaatgtctttggcttccattttgctttcttgcaaattgatgatgttgtcgcctgtaatattatctacggtgatatcgggtttcttcaattcaatatctacttgataattatgcgtaacttcattgctggtgctttggttgcctgcggtatcggtggcaataactttagcggttaattgggtttgggtaaccaagtcggcgttaggtacatcaattgaataagtgttgttcacgactttgccagtgaatgttttgccagcaacggtcaaaatcacttcatcgttatcacgcgcaccagtggttgtccccgatactttggtataagtttgattggattcttgtaaattcaatacattatcttcagtaatcggattgacggtaatggtgggttgagagagtgtggttttaatttcataagtctgtttagcagtcaattcagccgaattaccagcatcatcacgacctgtaacggttacgctgaattgaggcggcacttgggcgaccaataccgaagtcggtacagctacactgaatccactgtttttaaccgtaccaaaatatttatttgcgccaacataaatcaccacatcatcgccttcgcgcacatttttcaggctgcctgaaagcgtagtctgggctgctgttgattcgacacgattaatgatattgtcctgtgtaactgggttgatggtaattttaggttcaggagcttcaatgtcaactgtataaccaattagttggctattgcttgattggttacccaacgcatcacgtttggttacacggatttccactttagctgcgccagtactgtcggcggcttgtgctaattttgcgccgtccactgtgatttcaaaggttttggcttgagaaacttctgttttgccaatcacttctgtaccaatcaaggcttctaccaaatcgccattttgggcattttccactgtacctgtgattttttgttgggtggtggattcggttttgttgatgatattgtcgccgaatactggcaaattcacattcaaaacaggttgttcaatgctggtaatgacttggtaagtgtgttcataatgtgcggtagtggtattgcctgccttgtcgctggcagccacatcaatcacaattttgttgttggcggcagcggcagtcaaaacactgggttcaacatttaagctgaatccatgatttttaatcaaaatattttcatacactttatcgccgatggtcacggttactttgtcgccatcttgtgtattgctgatgctgcccacgactggaatattggctaaacccaattctgatgagctgatgatattgtcatgggtaatattgttgatggaaataacaggcgtttctgcaactaaatcaaccgtataagcacgatttgtggtacttgaatccacgttaccagccacatcagtgctgatggcagtggcttggacttttaaatcgttggcttgcaacaatacggacgcgggcactttttgcgtgaatgtgccattgaccacatcaaccgtttgtgtatacgaaccaatgaccagattcactttttcagtgctggcgatggcggtattttctttggtaacggtaacactgcctgaaatttcaatatcttgctgcgattctgctgcgttgatgatgtcatcggtggcaatcggattcagtttcacttcaaccgtgttggcggtgttgatgatttcataagttttgctgttgctggcggtaatggggttgcctacattgtctttgccattgacggtagcggtaaggcttttcacattggcattgagtaaatcagaagtattcatgtccaagctaaagtgtccattgacgactttagtggttttgtaataatcgttgccatcaatttggaaagtaacttcgctgcctgttggtactcctgacacgctgcctgaaaccgtgatgatttgtgaattggtttcatcgcggttaatgatgccatcttgtgcaatggcatctaaggttaaagtggcttgtccaacagtggtttgtacggcgtaatcggctgtattgctgcctggagtttgactaccaaattcatcggtagcaatcacttccacgcgaatttgtttagtggtagccgttgctaattctgcgccatttacatttacggtaaattggttgcctgccacttcgcccttgccaatttctttatcgcccagatacacttttaccacgtctttatcacgcgcacccgacacgctgcctgtaacaggtacttgcgtttgtgattcggccaaattcacggtgttgtcatcgccagccacgctggtcacggtaaccactggcgcgggaagtgttaccacttcgtatttgccaatttgtgaacctgttgcggagttgcctgcggcatcggtggcaatgacttctacacgtacttggctgttggtttttaaatccgcgccgttcacattcacattgaattgattggctaaaatttcgcccgaaccaatttctttatcgccgacataaattttgactttgtcgccatcacgcgcacccgacacgctgcccgaaaccgctacttcttgtgtggcttcattggcggtcaatttattgtcatcagccacgctgttgatggtaatgatgggttcggacaaagtaggggtggtgtaattttgggtttggctggcggatttttcgttgccaaatttgtctgttgcgatgacttccacgcgaacagatttatccgtagccactgccaaatccgcgcctttgacgttgacactgaattggttgcttgaaacttcgcctttgccaatttctttgttgccgacataaattttgactttgtcgccatcacgcgccccagacacgttgcctgaaaccactacatcttgtgtggcttcgattgtattgatttgattgtcttcggaaattgttattttgctaatcacaggtgttgccaaagttgccactgtgtaatccagtgattttgttcctgtaatctgttgattcaaattgtcttttgttgtgatttctacggttaattttggggttttggctgctgccaaagttgcgccatcaacttctacgctaaacgcatcagccgttactttacccttgccaatttccgtgccgtccagcaagacgcgtactacatcgcctgtttttgcgcccgacacgctgcctgaaatcaacactttttcggcagcttctttttcatttaaaacgtcatcgttggcaatttttgtcaacgaaatttgtggcgcagccaatgaatccaatgcgtaggttttgttggcggtaacggtcatgctgttgccagcgtcatcggttgccacgatttctacgtcaacggttttgttttgcgcttgaactaattttgcactatctacttcaatattaaatttattttgattaatttcacccgttgccaattctacgccgtccaacaatacgcgcactttgtcgccatcacgcgcttgtgagacgttgcctgaaatagcaacttttgcagctgcctcagcagaactcaatacaaaatcatcgccagcaattgcggtaattgttacggtgggttgatttaatttaactaattgataagcttgaatttttgtgccagttgctgaattgccagcgtcatcggttgccatcacatcaatgcgcacatttttgtcggttgcgtttgccaaatccgcgccgttgacattcacattgaattgattggctaaaatttcgcccgaaccaatttctttgtnnnnnnnnnnnnnnnnnnnnnnnnnnnnnnnnnnnnnnnnnnnnnnnnnnnnnnnnnnnnnnnnnnnnnnnnnnnnnnnnnnnnnnnnnnnnnnnnnnnnnnnnnnnnnnnnnnnnnnnnnnnnnnnnnnnnnnnnnnnnnnnnnnnnnnnnnnnnnnnnnnnnnnnnnnnnnnnnnnnnnnnnnnnnnnnnnnnnnnnnnnnnnnnnnnnnnnnnnnnnnnnnnnnnnnnnnnnnnnnnnnnnnnnnnnnnnnnnnnnnnnnnnnnnnnnnnnnnnnnnnnnnnnnnnnnnnnnnnnnnnnnnnnnnnnnnnnnnnnnnnnnnnnnnnnnnnnnnnnnnnnnnnnnnnnnnnnnnnnnnnnnnnnnnnnnnnnnnnnnnnnnnnnnnnnnnnnnnnnnnnnnnnnnnnnnnnnnnnnnnnnnnnnnnnnnnnnnnnnnnnnnnnnnnnnnnnnnnnnnnnnnnnnnnnnnnnnnnnnnnnnnnnnnnnnnnnnnnnnnnnnnnnnnnnnnnnnnnnnnnnnnnnnnnnnnnnnnnnnnnnnnnnnnnnnnnnnnnnnnnnnnnnnnnnnnnnnnnnnnnnnnnnnnnnnnnnnnnnnnnnnnnnnnnnnnnnnnnnnnnnnnnnnnnnnnnnnnnnnnnnnnnnnnnnnnnnnnnnnnnnnnnnnnnnnnnnnnnnnnnnnnnnnnnnnnnnnnnnnnnnnnnnnnnnnnnnnnnnnnnnnnnnnnnnnnnnnnnnnnnnnnnnnnnnnnnnnnnnnnnnnnnnnnnnnnnnnnnnnnnnnnnnnnnnnnnnnnnnnnnnnnnnnnnnnnnnnnnnnnnnnnnnnnnnnnnnnnnnnnnnnnnnnnnnnnnnnnnnnnnnnnnnnnnnnnnnnnnnnnnnnnnnnnnnnnnnnnnnnnnnnnnnnnnnnnnnnnnnnnnnnnnnnnnnnnnnnnnnnnnnnnnnnnnnnnnnnnnnnnnnnnnnnnnnnnnnnnnnnnnnnnnnnnnnnnnnnnnnnnnnnnnnnnnnnnnnnnnnnnnnnnnnnnnnnnnnnnnnnnnnnnnnnnnnnnnnnnnnnnnnnnnnnnnnnnnnnnnnnnnnnnnnnnnnnnnnnnnnnnnnnnnnnnnnnnnnnnnnnnnnnnnnnnnnnnnnnnnnnnnnnnnnnnnnnnnnnnnnnnnnnnnnnnnnnnnnnnnnnnnnnnnnnnnnnnnnnnnnnnnnnnnnnnnnnnnnnnnnnnnnnnnnnnnnnnnnnnnnnnnnnnnnnnnnnnnnnnnnnnnnnnnnnnnnnnnnnnnnnnnnnnnnnnnnnnnnnnnnnnnnnnnnnnnnnnnnnnnnnnnnnnnnnnnnnnnnnnnnnnnnnnnnnnnnnnnnnnnnnnnnnnnnnnnnnnnnnnnnnnnnnnnnnnnnnnnnnnnnnnnnnnnnnnnnnnnnnnnnnnnnnnnnnnnnnnnnnnnnnnnnnnnnnnnnnnnnnnnnnnnnnnnnnnnnnnnnnnnnnnnnnnnnnnnnnnnnnnnnnnnnnnnnnnnnnnnnnnnnnnnnnnnnnnnnnnnnnnnnnnnnnnnnnnnnnnnnnnnnnnnnnnnnnnnnnnnnnnnnnnnnnnnnnnnnnnnnnnnnnnnnnnnnnnnnnnnnnnnnnnnnnnnnnnnnnnnnnnnnnnnnnnnnnnnnnnnnnnnnnnnnnnnnnnnnnnnnnnnnnnnnnnnnnnnnnnnnnnnnnnnnnnnnnnnnnnnnnnnnnnnnnnnnnnnnnnnnnnnnnnnnnnnnnnnnnnnnnnnnnnnnnnnnnnnnnnnnnnnnnnnnnnnnnnnnnnnnnnnnnnnnnnnnnnnnnnnnnnnnnnnnnnnnnnnnnnnnnnnnnnnnnnnnnnnnnnnnnnnnnnnnnnnnnnnnnnnnnnnnnnnnnnnnnnnnnnnnnngaaccaatttctttgtcgccgacataaattttgactttgtcgccatcacgcgcacccgacacgctgcctgaaaccgctacttcttgcgtggcttctgcttcatttatgacgttgtcgcttgtaattttgacattgctaattttgggtttatctagagtgggctgggccgctgctggggcatcgttaccaccgctactactattactgctaccgctattactgctattaccgcctccaccacttgctgcagccgtcacgccagctaacgccactgcacccagcgcccccatcaaaattttgcttgatgatgtcgctaaagctgtactggaggcggattgggttgtactggtagacgaggtactcaccgccgtagttgtgctgacttcgcttgctaattgcgcggtggtttctgggacggcagttacaacattggttggcattagaggcatggcagctggagcgttggtgagagccaaggtagcatccatttgcattaaattcaggctgttggtaatgggtgaaaaatcgccgtagcctgttaacacaatttcaggtattttatcgtctgcgttgtctaaaaataaccataaatcattacccacttcttgcattttgggttcataaatcagtacacccttttcatttaaaatttggtaacgcgcgcctgcttgtgcaggaatcttcacggtttggttactggttaaatgaatggtttttgtttgattttgatgaataatgttaagtgtatattgagacatggctatggcttccaaaaaaagtttggctgaatacagaacttgagtgtatggatattgtttaatatggttaaaccaatttgacagtttagcacaaattccttatttttagggaagttgcattgaaaaatagtcc

SEQ ID NO: 2709 - DNA, 23168 bp, synthetic construct
  source 1..23168: mol_type = other DNA
  misc_feature 1..23168: note = Synthetic
ccgcggcttcaggagatattgatttagaagatcttatcgctcaagaagatgtggtagtgacactttcccatgaaggctatgtgaaatatcaaccgctaaccgattatgaagcccaacgtcgtggtggaaaaggtaaatccgcgacgaaaatgaaagaagaagatttcatcgaaaaactcttggttgccaatacccacgacaccattctctgtttctcaagccgtgggcgtttgtattggttgaaagtatatcaactcccacaagccagccgtggtgcacgcggtcgtccaattgtaaacattctaccgctacaagaaaatgaacgtatcaccgcaatcttgccggtttccgcttatgaagaagataaatttgtagtaatggcaacggcaggcggtattgtgaaaaaaattgccctcaccgaattcagccgtccacgttcaagcggcatcatcgccttaaatttacgtgatgaagatgagcttatcggtgtggatattaccgacggcagcaacgaaattatgttgttctcttctcaaggtcgagtggtgcgtttctcagaaaccgccgtacgtgcaatgggacgcttagccacaggggttcgaggaataaaactcgcattaaccaatgatatgtcggaagatgaaagtgcggtcgaaattgaagaagtttctgatgaaaacacagaagatactttagatctcaatatcgacaaagtggtttccttggtgattccaaaaggcgaaggcgcaatcttgaccgcaacccaaaacggttacggtaaacgcacacaattaagcgaatatccgacaaaatcccgtaatacgaaaggggtaatttctattaaggtgagtgaacgtaacggtaaagtcgtagcagcaactcaagtggaagaaaccgatcaaattatgctgatcaccgatgccggtacgttagttcgtacccgtgtaagtgaggtcagtattgtaggtcgcaacacccaaggggtacgcctaatccgcaccgccgaaaatgaaaatgttgttagtcttgagcgtgtatgtgatgtagatgaagaggaaatatcacaggattccgatactgaacaataactctaagcaataaaaaagtgcggttaaaattaaccgcacttttttcaatgtttgtgccttaacgatttacaccccaatgacgggtgtctttatcaaatttcatcccggaatgagatccttccgaaccattaaaatacacatctttgttggcacaagcagaaataatcaatgctcccacaacaacgaataataatttcttcatgacatctacctttgtttactatgatcaaatcgctccggattatagcataacccaacgactttcaggcaataataatgatttcccctcagcgtattttatttacgccgaaaatgcaaagtcccttgataaaatcctttatcccttctaaaatgctcgcccttatgtagttcgcaaacctcctacacaaaaaaactaggtacaacatcatgaatatttcaaacccaaatcacaatcgaaaagcggttgtgatcttttcaggcgggcaagattccaccacctgtttattccaagccatcgccgattacagcaaagaaaatgttgaagtgatcacctttcaatacggtcagcgtcacgctattgagctagaaaaagcacagtggatcgcccaagatcttggcatcaaacaaactttaatcgatacctccgtcataaaagccattactcataacgccctcatagataaacaggcgaaaatcgaacaaaaaaataatgaaatcccgaatacctttgtcgatggtcgaaatgcattatttttactttatgcggcgatttatgcaaagggacaaggcattcaagacatcatcacaggagtatgtgaaacggactttagcggctatccggattgccgtgatattttcatcaaatcgatgaatgtgactctcaaccttgccatggattatcaattcaatattaaaacgcccttaatgtatctcaccaaagcccaaacttggcaactcgccgatgaattaggcgtgttaaattatgtacgcaaccacactcatacctgctacgaaggtatcgaaggcggttgtaggcaatgcccaagttgccaattacgcaatcaaggcttatgggaatatctcgcacaaaagggggagcgcaatgtttaaaatttccaaagaatttagttttgatatggcacatttattagacggtcacgatggaaaatgtcaaaacctgcacggtcacacttataaattacaggtagagattatgggcgatttgtccccatctggtgctaaaaaatccatggtgattgatttttccgatctcaaaaccattgtgaaaaaagccattttagaaccgatggatcacgcttttatttacgatgaaaccaacgagcgtgaaagtaaaatcgccaaattgttacaagaggttgattccaaaatctttggcgtacctttccgcacaaccgctgaagaactcgctcgttttatttttaatcgcttaaaatatgatgaaaaacttgcggtttccaccattcgattatgggaaacccctacttctttttgtgagtattcggagtaaagtgcggtgaaaaatcaagctgttttagaaccgcactttaatattgtggaaatttttgaaagcctacaaggggaaggtttcaacaccggtatgcccagtatttttgtacgttttggtaaatgcaatcttgcctgcccttggtgcgatacagcgtataatcaatttgaacgtcaatccgcctcgcaaattctggcaaaagtgcggtcattttccgcaaagaatatcatcatcaccggtggcgaacccactatcgtgccgcatattgaatacttactcgaacaattcaaacaagcaggctattttcttgccattgaaacaaacggcttaaaatccgttccgccacaaattgattacatcgccaccagccctaaacgactttattcacacaaatacggaaaacaatgtgttgcctttgctaatgaggtgcgtattgtcgtggatgaaaatatcctgcctttctgtgaattgatcgagcaaaaaattcaggctgaacattactatctttccccttgtgaagtagaagggaaaatgaatttactggaaaccatcacccagttaggcaaactcaatcagcgcaccaacaaacccaaatggcaattaagtttacaaacccataaattagtggggattgaataaaatacaatcggaaaaataaggcggctacaattcactcactaaatgttttgggctagccattttttgttaaatttcgtactatacgccatctttttctcatttttttctttgacgatgaatcatcttgaacttgaacaacttcttaaccaaaccctcaattcaaaccaaatttccgactatgcgccaaacggtttacaagtcgagggtaaagcaaatatcaaaaaaatcgttaccggcgtaacggcaagccaagcgttaatcgattatgccgtcagccagcaagcagacgccctactcgtccatcacggctatttttggaaaagtgaaaatccctgtattcggggaatgaaaggcaaacgtattaaaaccctgttaatcaatgacattaatttatatggctatcacctgcctttagatgtgcatcctgaattaggtaacaatgcacaacttgccaaactgttagggattgaaaatctacgcccacttgaaaataacacaccaagtattcctgtttggggcgagttaaatcaaccggtaacggcggaggaatttgccttacgcattgaacaagtccttcaccgaaaacctctaatttgcacagaaaacggaccgcactttatccgtaaaataggaatttgcagcggaggcggacagggctacatcgacttggcagcggcacaaggttgtgatgcctttattacaggcgaagtatcagaacaaaccattcattccgcccgtgagcaagggatacatttttttgccgccggtcatcacgccaccgaacgttacggcattaaagcattaggcgaatggctggcgaaagaatatggctttaatgtggaatttaaggatattgataatccggcgtaatatccatatcactatataaaaatatagagcaaaaagtaaccgagaaaggttacttttttgttatttgattgatttttcaaggagagaaattgtttttcttagcgtttctaattctttctctttctgagctaataattcatctttatgactaagctgtaattttagtttttcaacttcgatactcattgaatcactactgttataatagctcgtttgcacattatgatcgctgttctcattcataaaaaatacaatacttttttcagaatcaactagatcaactacattaaggttaaaaatcttggcaatttgtaccaatttatcataatgaagttttgtttctccacgttcaagtttggcataaccgcttaaagacatattcattttatttgccatatcttcttgcgaccactgacgaatttctctcatcatacgaattttatcgtgcataaccatttcattctcactttttggattattttaagttaaaaatcggtagcttaaccaccctgtttgactatagaacagagtataacactatactactatagaaccgcattttatatgcttccattgatatttttacatatttattaaggttcaatctatgaaaaaattattaagaatttcatttcttacggcgactattggattttcaacaggctgtgcaacaatagtcagtaaaagcgagtatcctgtaaatatcacatcgaatccaaccggtgtagcttttgaaataaaaaatagagcaggaaaaattgtcactcatggtacaacaccacaaaatgttgtactaaaagcaggtgctggttattttaaaggtgaaaaatatgaaattacttttacagcacctggtatcaaaaaaggtaaaaagaccacccgaggtaaaaaacaaacctttgtgttagatacaaaactagatggttggtatataggcggtaacttgatttttggtggtttacttggatatctcattgtcgatccaatgactggtgctatgttcaaattaccagaatcattctatgcagatcttaatgaaggtggagcatcatcagcaacactgaatatcatttctattgatacattaacccctgaacaacgagctaatcttcaacctattcacttataattctaataaccaaggatatctctatgaaaaaactacttattagcacactcctagtaagtgcagcactatctgctcaggcaggtaacttctatatacaaggcgacttgggtgtatcaagaattgaggcatctcctgatgatgaggattattcgatcggctcaacagtctttgatcaacgtttaagctttggttacgattttaaaaaccagttccgcttagctattgactatcataattttaacaaagcagaattagatgagcaccgagtaaaaataaaatccctcgggataacaggtttctatgattttgaaatttccaacaaagattttatcccttatgttggtgttcgtattgcccataataaagcaaaaattactgaagaatactgcggttattcccattgttattctaattcatattcgtcttcctccggaggaatcggtattattggtggtattcaatataaattatcaagcaatttaaatgcaaatgtggcaatcgaactcaacagactcgcctctgatgttgcccaaggtggtataaaaatcggtttacgctataatttttaatcctattaaatgcctatttcaccataggcattttttatatcgttgctttactttgtattcaaatatattttcgattatactgttacacaattttttaacaagcaggaagaattatgggtttcttaacaggtaaacgaattttagtcaccggtcttgcaagcaatcgttctattgcttacgggattgcaaaatcaatgaaagaacagggcgcagagcttgcgttcacttatttaaacgaaaaattacaaccgcgtgtagaagaatttgccaaagaatttggttctgacatcgtgcttcctttagatgtggcgactgatgaaagtattcaaaactgctttgcagaattaagcaaacattgggataaatttgacggtttcgtgcatgctattgcctttgcaccgggcgatcaattagacggtgattatgtgaatgccgctacccgtgaaggttatcgtattgctcacgatatcagtgcatatagttttgtggcaatggcacaagccgcacgtccttatttaaatccgaatgcagcattactcaccctttcttacttaggcgcagagcgtgctattccaaactacaatgtgatgtgtttggcaaaagcctcattagaagcggcaactcgtgtaatggcagctgatttaggtaaagacggtattcgtgtgaatgccatttctgcaggtccaatccgcaccttagctgcatcaggtattaaaaacttcaagaaaatgctttctgcctttgagaaaacagccgcattacgccgcacagtgacaatcgaagatgtgggtaactccgctgcgtttttatgttccgatcttgcttccggtattacaggcgaaatcgttcatgttgatgccggttttagtatcaccgcaatgggcgaattaggtgaagaataattttcatctcatttgttttgggcagacttttcggtctgccttttctcttttttaaaatataactatgttccaagacaatccactactcgcacaactcaaacaacaaattcacgaaagcaaagaacgcattgaaggtgtggtaaaaagcaccgataaagcctatggttttttagaatgtgacaagaaaagctattttatctccccgccagccatgaaaaaagtgatgcacggggataaaattaccgccaccattgaaaagcaaggcgataaagaacaagcggagccggaatccttaattgaacccatgctgacccgttttattgccaaagtgcggttcaataaagacaagaaattacaagtattagtcgatcatccaagcattaatcaacccattggtgcacaacaagccaaatcggtaaaagaagaattgcaagaaggagattgggtggtggccaatttgaaaacccacccattacgggatgatcgctttttctatgtcacgattaatcaatttatctgccgtgctgaagatgagtttgccccttggtgggtcaccctcgcccgtcacgaacaatcccgttatccggtacaaggcgcagatcactatgaaatgcttgatcgacaagcccgtgaagatttgaccgcacttcattttgttactattgacagtgaaagcacacaagatatggacgatgcactctatatcgaacctgtggagcaaaatggggaacaaactggttggaaattagtggtggcgattgccgatcccaccgcctatatcgcccttgattcacaaattgaaaaagatgcaaaacaacgttgtttcaccaattacctccccggttttaatattccaatgttgccacgagagctttccgatgaactttgttctttaatagcaaatgaaacccgccctgccctagtttgctatattgaaacggatttgcaaggcaacatcaccgaaaaaccgcattttgtttcggcttatgtgcaatccaaagctaaacttgcctataacaaggtatctgattatttagaacaagcccccgatgcgtggcaaccggaaactgctgaaatcaacgagcaaattcaacgtttacaccaattcacactagcacgtatcaactggcgtaaaacccattcgttgttattcaaagaaaaaccggattattcttttgtgctggctgaaaacggaaaagtgcaagaaatcaaagcagaacgccgccgcattgccaatcagattgtggaagaatccatgattattgcgaatatttgtgcagcacagttcttaaacgaacaagctcaaacgggtattttcaatacgcatagcggttttgataaaaaattcttggaaaacgcccgtcatttcttaatggcaaatttagccactgaagaaaatcaagcagaactgaatgagcgttactcagtggaaaatttatcaactctgaatggctattgccaaatgcgtcacgatattgaacctattgaaggggactatttagagttacgcttgcgccgttatttaaccttcgctgaatttaaagcggaattatccccgcactttggtttaggtttggaaggctacgccacttggacatcaccaattcgtaaatattctgatatggtgaatcaccgcttaatcaaagccgtacttacccaacaaccttgtgaaaaaccacaagatgacgttttggcacgcctacaagaggcccgccgccaaaaccgcctcgtagagcgtgatattgccgattggttatattgtcgctatcttgccgacaaagtggctgaaaatgctgaatttgatgcagaagtgcaagatgtgatgagaggcggattacgggtgcaattattagaaaatggagcttctatgtttgttccggcttcaacccttcacaataataaagaggaaatccaagtaaattccgatgaactcgctctttatattaagggtgaacgcacatacaaaattggtgatattgtgcgcgtgaagctcacggaagtgaaggaagccaccagaagtattgtaggttctgtggtgatataatataagttccggaataaaaaatggcgtttaaaaacgccatttctgtttgggaaattgaccgcacttttctatcagattatcactgccgtacttacgaggattccttgtaaatccatatcgagagatgttcccacgacaaccgttgtgtcctcccctatttcttgccacagaatacgactaatttctgtaaactcttcaaaggtcatatccactccagctttaatattcattaagcaagattttgcttgtttaatataaggagattgttccattaaattattcatcacttcttttgccgccatttcagcccgactggatttatcatctcctgcttgataactacttgcaattaccgtgatgtcaaattcgggcaaaatatcggcagaaagttcaaaggtggaatagaaagaatatggcgaagatctatcataaaaatctcgttgttatcattttttccgataagataaatagtttctgccttatcaaataatcccaatgggctcatttgttgcgtatgaaatgtactggttgcttacactcataaataagtgagttaagttgtccaataattttaggatcaaaattagactgagaggaataacgaatacgcacattacgcatccacattttttcaggtgcatattgattaccgaaacgcaataccacattcgcatcgttaaaaagcggtgtcatagcacgtattaaattactcggaactttatcggctaattctttttcagccatcttgagaaacaccgcttgcgaaccacttaacgaagacattggcaatgatgaagagtatcgagaataaccatagggctgagcgcgcgtatcacattcactttcgtattcttccgctaacttttttagaactcgctgaacggttctcaaacttttatcaaaaccttgagtccgtagcgaatgatacaactcacttgccgttatctttgaacggtaaggaatcagttttaataatgtaaaatagaaaaaagttatctttatcagaagagcgcgccatatgataatagtcgaaagagtatgaatagttaaaaagatgcctcttgaaaccgaaatttcaagaggcagagctttgcgagaaattcatctcttattgtaacaacgtttttcatttcgcagtgctattacaacgggtagaattctaattatttgtttttcgcaagtcaagctggaaatattggaagaaattgatagaatccaatcatttaatgttcaaatagaataaggatcttgtatgcaaaataatccattaaattacattttagggttagatttaggcattgcttctattggttgggcggttgtggaaattgatgaggagagttcacctattcgcttaattgatgtgggcgtccgtacatttgaacgggctgaagtcgctaaaaccggcgaaagtttagcattgtctcgtcgtttagctcgttcatcacggcgattaattaaacgccgagcagagcgattaaaaaaagcgaaacgtttgttaaaagcagaaaaggttttacattctattgatgaaaaattacccattaatgtttggcagcttcgagtaaaaggattggaagaaaaactcgaacgtcaagagtgggcagcggttttattacatttgttaaagcatcgtggctatttatcacaacgtaaaaatgaaagtaaaagtgataataaagaacttggtgcattactttcaggcatagcaagtaaccatcaaatgttgcaatcctctgaatatcgtacccctgcagaaattgcagtcaaaaaatttcaagtagaagaaggacatattcgtaatcaacgtggatcttatacccatacatttagccgtttggatttgttggcagaaatggaattattatttcaacgccaagctgagttaggcaattcttacacgtccaccacattattagaaaatttgacggcgttactaatgtggcaaaagcctgctcttgcgggtgatgcgattttaaaaatgctgggcaagtgtaccttcgaaccaactgaatacaaagctgcgaaaagtagttattctgctgagcgttttgtgtggttaactaagctgaataatttacgcattttagaaaatggcacggaaagagctttaaatgacaatgaacgttttgctttgcttgagcaaccgtatgagaaatcaaaattaacttatgctcaagtgagagcaatgcttgctttgggtgataatactattttcaaaggggttcgttatttagacgaagataaaaaaacagtagaaagcaaaaccacgctgatggaaatgaagttttatcatcaaatccgcaaagcattagaaagtgcagaattaaaaaaggaatggaatgagttaaaaggcaataccgctttattagatgagattggtacagcattttcgttgtataaaacggatgatgatatttgccgttatttagagggaaaactatcaaaaaacgtattaaatgcattattggaaaatttaaatttcgataaatttattcaactttcactcaaagccttacaacaaattttacctttgatgttgcaagggcagcgttatgatgaagcagtttcagcgatttatgatgatcattatggtaaaaaatcggtggaaattaaccgcttgttaccaactattcctgccggtgaaatccgcaatcctgtagtattacgaacactgacccaagctcgtaaagtgatcaatgctgtggtgcggttatatggttcgcctgcccgtattcatattgaaacagcgagagaagtcggaaaatcttatcaagatcgtaaaaaacttgaaaaacagcaagaagataatcgtaagcaacgtgaaagtgcggtcgaaaaatttaaagaaatgtttccgcattttgtcggggagccgaaaggtaaagatattttaaaaatgcgattgtatgagctacaacaagcgaaatgtttgtattcaggcaaaccgttggaattacatcgcttgttggaaaaggggtatgtagaggtcgatcacgctttgccattttctcgcacgtgggatgatagttttaataataaagtactggtgcttgccaatgagaaccaaaataaaggcaatttaacgccttatgaatggttagacggtaaaaataacaacgagcgttggcaacattttgttgtacgagtacaaaccagtggtttctcttatactaaaaaacaacgcattttgaaccataaattggatgaaaaagggtttatcgaacgtaatttaaacgatactcgctatgtagctcgtttcttatgtaactttattgccgataatatgttgttggttggtaaaggcaagcgaaacgtgtttgcttcaaacggacaaatcacggcgttattgcggcatcgttggggcttacaaaaagtgcgtgaacagaatgatcgccaccacgcactggacgcggttgtggtggcttgctctactgtggcaatgcaacaaaaaatcactcgatttgtgagatataacgaaggaaatgtctttagcggtgaacgtatcgatcgtgaaactggcgagattattccattacattttccaagcccttgggcttttttcaaagagaatgtggaaattcgcatttttagtgaaaatccaaaattggaattagaaaatcgcctgcctgattatccgcaatatcatcacgaatttgtgcaaccattgtttgtctcgagaatgccaacccgaaaaatgacagggcaagggcatctggagacggtaaaatccgcaaaacgattaaatgaaggtttaagtgtgttaaaagtccctttaacacaacttaaattgagtgatttagaacgaatggtcaatcgagaccgagaaagtgcattgttcgaaggcttaaaaacacgtttagagcaatttgataatgatcctgtgaaagcatttgccgaacccttttataaaaaaggcggcactctagtcaagtcggttcgagtagagcaaacacaaaaatcgggggtattggtgcgagatggcaatggtgttgcagataatgcttcaatggtacgggttgatgtttttactaaaggtggaaaatatttcttagtgccgatttatacttggcaggtcgcaaaagggattttaccgaatagggctgcgacacaaggtaaagatgaaaatgattgggatattatggatgaaatggctactttccaattttctctatgtcaaaatgatctaattaaattagttaccaaaaagaaaacaatctttggatattttaatggattaaatagagctactagcaatataaatattaaagagcatgatctagataagtctaaagggaaattaggtatttacttagaagttggtgtaaaactagctatttcccttgaaaagtaccaagtcgatgaactcggcaaaaatatccgtccttgtcgtccgactaaacgacagcacgtgcgttaatttaatccctgcactttaacaagtgtggggatttttgtatttaaggaacaatctatgacgtggcgtagtattttaattagcaagggcggtaaactttctttgcagaaaaatcaaatgttgatacagcaagagagcaatgaatttactgtacctttggaagatattgcaattgtggtggtggaaagccgagagacggtcatcacgattccgctgttatcggcttttggtttatacggtattacgttgttaacttgtgatgagcagtttttaccttgtggtcagtggctgccgtttaatcagtatcatcggcaattaaaaacattaaagttacagctagaaactagcttaccgcagaaaaaacaactttggcaagcaatagtacaacagaaaattcgtaatcaagcgaaagttctagaaattcacaaatttaatgttgaatcgaaccgcttactaaaaatggcaaatcaagtgaaatccggcgataaaaataatttagaagcacaaagtgcggtcatttattttcaaactttgtttggtaaaggctttaaacgcaccgaagatgaaaatgcagtaaacagtgcattgaattacggctataccgtcatgcgttcagctgtggctcgagcattggttttgtatggttggctaccgcaaattggcttgtttcatcatagtgagctgaatgcgtttaatcttgccgatgattttattgagccgtttcgccccttggtagatttattggtgatacaactggcgaatgaagatagattatctataaacctatcacctatcctaaagcagcgtttaataaaagttctgaattaccaactattgtttaaacaagaaaaagtaaatacgttaaccgcaattgatagaatggttagcactttgcaagctgcattaattagtaaaaaggctcatttgctaaaattaccggaaattctaccgcttgcagagcatcaatatgagtgagaatatttttatgcgtatgatagtattattcgatttaccggttactactaaggcaaaaatgcgagcagcaaatcaattccgccaatttttacttaaggatggatatcaaatgctacaactatctatttacacaagaattgtaagaggaagagattcaatggaaaagcatcataaaagattggtcgcaaatttaccggaagaaggttcaattcgctgcattgctatcacagaaaagcaatttgctaatatggaaattttagttggagagaaaaaattacaagaaaaaaaggtcaattctaatcaacttctattgttttaaactgttttttcttttgataaaaaagccttggacccttacagttcaaggctttttgctctccaattatagcactgcgaaatgaaaaagggagctacaacactttgacagcatatgctaaaaaatttgatattatagcactgcgaaatgaaaaagggagctacaacagactggcgttataataaaaaccgcatcctattatagcactgcgaaatgaaaaagggagctacaacgctcaccacggcattattccgactatggtaattatagcactgcgaaatgaaaaagggagctacaacatctatcgccgactctttcaatgcttaagcattatagcactgagaaatgaaaaagagtgacagattttaaaagtattcaagttgatgaaaatttgactcttcacatcaaaatcttttctacttattaaataaagtatcaaaaacagcctcattctcaaccgcacttttctctaaatcacaacgcaatctcatccaaagagcgtccaaaacttggcataaatacctgtaagaaataatccatttctttgctgtaccactgttgcataagggtttcaagtctggttttagcggttttaaattcttgattgccattatccagttcaaactgggctttaatataggcacaaatgaggtcggcttgtttgactagatgcttctcttcatccgaaaaagtttcgctgtctaagtaagaagcgaaatcttcttgtaattcttgagggagaaggctgatcaaatggagttctgctgcactctcaatctgtttataggcttgggtaatttcagggttgaaatattttatgggggtcggtaaatcaccagtaaaaatttcagaagtatcatgatacatcgctatcacagcaatgcgttccgaattaaccttgccaccaaaaaatttatttttgataatcgctaatgcctgtgccacaaatgcgacttgcaggctatgttctgcaagattttctttttcaatattacgcattagcgaccaacgttgaatcaaacgcaatcgatctaaacaggcaaaaaaatgactggttttaatttccatatcacctctaattagacggaagctcttccaccatcacagataaatcaaatacccgtcccaaacgcatcactgtcacagtcactcttgtattaggcttggtattagagataatttgcatcatttcacgggttgaaattccctcttgattattaagttttaaaataacatcacccacttgaatgcctgctttagatgccgggctattcggggtaacgcctgtaatcaaaattccttgttctgcactggaattaatctcactttgtacaccaaaatagcctcgaattacccgtccatcacgaataattttatgcaatacatcatttgcgatatccattggaatagcaaaattcaacccttcggcaatttcggttgaggttttaccaatgctcaatgtactaataccgactaattcaccggcggaattaattaatgccccacctgaattaccacgattaattgaagcgtctgtttgaataaaattttgtcggccaagggaatcccccactgcacttcgccccacggcactaataatcccctgagaaacactttgtccaagattataaggattgccaatcgccagagccacatctcccacatgaacttggcgattcgcattttgtgggatagtggaaagattatcggcatgaattttcaacacagcaagatccgtcaaattatcggaaccgatgaggtttgcttcataaatattgccattttggagtgctacaacgatttgatccgcattttgaatcacgtgtttattagtgagaatatagccgtctttactcatgatcacgccagatcccaaattattcacttgcagttgatcattatcatcaatactggctgaagagaaagagcgattatacacatttaccactgcaggcgatgcgatacgtactgcatttttaaaagaaacaatatcatcagaggtaaaaatgttgctgctatttattcttggcacagcaaagagaattattccggctgcagctaatccccaaagagcagaataaaaaagttttctaagcatttaagatccttttggtgtgtaaattaattttatgtcatcaccaatttgttgaactttgtcaagttgccacagaggggcatcggctaattgtgttaaatgaggcaaactgcacagactacgggctttttcgcctaataatttcggggcaatataaaggatcaattcgtccaccaatttttgttcaatcaagctaccggctaaattttttcctgcctcgctccaaagggtattaatttgacgtttgcctaattcaatcattaattcggataagagattctctttaggtaaaataatttgttcacaaaaatcgggaaaattcgccagatcacgcgcttcacttgagaccaaccacaccggagcgtctgtttcaaataatttatagcttggctgaatacgatgttgcgaatctaaaataacacgcaccggctgacgtagcgtatctttcacatattcttttttgagatcattggaaaaatcttcccaacgtacatttaaactggggttatcggctaaaacagtggcagacgtggataaaagtgcggacgattttgcccgcattttttgcacatctgcacgtgaggccactccggtaatccatttgctttctccgcttgccatggcagttttaccatcaagactcatggctaatttgagttggacaaaaggctttccttccctcatacgctttaaaaaacctttgttgagtttttccgcagaatcctttaataaattgaccgcactttcaatgcccgcttcagcaaccattttcaatcccttacccgccacttgtggattaggatcttccatcgcagcgataactttcaaaactcctgcttcaatcaaacctaatgcacaaggtggcgttcgtccataatgggagcaaggttccaaagtaacataagcagttgcgccttttgctttttcacccgcttgtgcaagagcaacccgttccgcatggggctgccccgccttaaaatgaaaaccttcccccactatctcaccattcttaaccaaaacacagcccacggcaggattcggcgtggtggtataaacgccttttgccgctaaatccaaagctcgttgcataaattgatagtcttgagcggtaaattgatccgacataattaatcctttaggctttcaatttccttggtaaactggttgatattatcaaaactcaaatataccgaagcaaagcgaatataggctactttatctatttcttttaattcattcattgccaatttaccgactaattggctcggcacttcacgctcaccggtagcacgtaattgcaaaataatatgactaatcgctttttccacatcatccgaacttaccgggcgcttttccaaagcatgctgaataccactacgaagcttatcttcattaaaaggctcccttgagccatcacttttaataattttaggtatgaccaattcggcagtttcaaacgtagtaaaacgctcgtgacaatgaccgcactcacggcggcggcgaacttgataaccatccgagactaatcggctatcaataacctttgtctcttcagtggaacaaaatgggcagtgcatagggtatcctcctaaaaatgggtacttatcttagcaaaaaaagtctattttgacgattcacttcattcctttattcaaggattttggatcattttttgcaaataatacgccaaaccaatctgttgtttgttttagcaataccagcaagttttcccgattttcaaatttcatagtttgcgctaacaaacgcgcccaataaggatccgcttttttcttatagttgccccgtttctcatcttccgccaatttttgtagcgtcgtcaaaattccatcaaaatcgaccgcactttcatcttttataatgaaatccgatattttccctacggtaggaattggttgaatttccacctgactttgtaaataagcctgtacatagatttgcaattgtgccaatgcggtttcatatgatacttgaggaaattcaatcacttgatctttagtgattaatttgggcggtattgccgttttttgagtgatacattgaattaaataataaagccaagggcggatacgataacgatctttgtagcgggcaaaatgccattcaatcacctgttgtgtatcattgaaaagattatccatataaccaaacaagcgaatagcctgttctttttcttgccaagtaacattcagcgtaaaatcaaccgaacgatgagccggctcgccgagatcaataattttttccttaaattccagcacgatattacgggtattttccgctgccacccgcccaaattgagcacgaggtagcactccttttactgtggcttgtgcaaaatatttatcaaattgttgttcatctgcatataccaaatcattattgagcctatagttatccaatccgtccaaagtgaaattctcgctatcggcaatgcgctcatcttcatcacggaaatacacgccaagttgtttttcaaagaaaaattttacggggttttccacaaatcccactaaacgctccagctcaatttccgttatcttttcttgatgttccatcatcgaggcaaactcttttggctcagcctgcccaccattttttgccataggtaaccatttcgtggcaaaagagcggttgaaattatcctcatttttgaaattgctagggctgaatgccgtcattgcgtgctgttgaacctgtaacctctgctcatccctttgatttatgtagtcgagcagttgactcaccaatacggaaggttccctcgtttggttatcaataatggaacgcccgatatagctgatataacagtaatcacgtgcggcaagcagagcctcaaggaatagataacgatcatcatcacgacggacacggtcacttttttgatggtgatactgcatcaaatcaaaactgtttggcgtttgcgtacgcggataatccgcctcattcattcccagtaaacacaccactttgaaaggaacagcccgcatcggtagcaaagtacaaaaattcactttgcctgctaaaaatttcaagctattcggggattcttccagcttggtggtcattacatcggctatcacatccacttgcaaagacaaatcaaaatgaattgaggtgagctgctgtgtcacctcgttaattttctcttgaatataaaatagggtgtcattggtttgttcattttgtgcaaagaaatccgtcaaaagtgcggttaatatttcatgccatttttctattgagtgggcttgctggagcgttttatgccaatgagaaagaacagtgaaaaaacgtgacaatttccccgccaataagccttttaaaccatagctactatcaaaacctaggcaatcttgccaaatcccatgctcttcacgcatcgcatagcctaataccatacgttctaaacctgcctgccatgaattgaaattaattccctcttggtttttctgcaaaccaaaacgaatgcccacatccgagacccattctcgtactaaaggtaaatcggaaagggagatatcaaaacattcacgcaatgcaggaatatctaagaaagtcagtatttcttctgcactaaaggcactttcttttaagcgtaataatgccaaataacaggaaaccaacacatcactttccgataatttattatccgaaatggaaaaggggatcagaggtgtttcaccatttttctgaccgaaaaccgcttgaatataaggggtatattggttaatgtccgccaccatcactaccacgtctttcggcgtgagtgtcggatcttggttgaataaatgcaacagataatcttgcaacacttccacttcccgcatggcactatggcaggcatgcacggtcaaagagcgatcatttttttcaatgtttaagggctgattttctaaatgcaaaatatgagattgcaattgaccaagcaaggtcgaggctgaaatctcttcataagcattcactgagtaagtgggaatccgctcttcatcccgaatcaatgtataaagaaaatcacgccccatttttccccaagctgccaacaacgggttaccggtttgcaagtgttcattatgataagtggtttcgaccaatccttgctgcaaggcagtgcgttgttcttctgaaaagagcggttgaatttcagcgtttttttgatagtttcgacgtgtacggctagaaagatagtccatacgcaaatcacggatatcaccccaatattcttggctgggattgttaaaaaagaggtgaatatctacttccgatgacatggcttgcaaaatagacagataggcagtcggtaatgccggaataccaaaaataaaaaggcggcttggcaattttttcgattgatttttattatttaataaagcaagaaattgctcgtgtaaagccgcgcggtgagtagcattctcccccatatcggctttaatatccgaaactaaagcacgccacaataccccttgccatgccacattaccaagaatttgttgtaataaagtttcatttaaatgagcctgttgcgccttaatttgtgtgacaatacgttcgtcttcccctttttcccaagcaaaaatccattctggacgataaaccaaatattggtcaaaaagatctgcgatcttgcggcttaattgataacatttgtattgttcggaatgaggcgaggaagccaaataatgacgcaacggagaaaacccttcccttcctaaaaaatcgggcataagcctcattaaacgccacatcattgaatctttatcaaaaggattttgcaacgaaaccgccggcagattatccgcataaagttgccaaatgaaggttgccggcatgggaaaagccaaatgggcagaaacgccatttttctttgccaattccatctgtaaccattgtgccataccgggactttgcaccaagataatatcttgctgaaaagggtcctctcgcggaagagttttgaataattcggcaagaatatctttctgtttttcaaggtggttggaatagtaaacaataaacacaatggcaacctatcaaaataagcaaaaataatgttgcattctacctgttttttactcatttttcagggaaaattccccctgaggagaacgaataaccacccgattaccttgacattgtatttgaaaagctatgccattttgtttcacttgttgttcacaagataaacctaaaaattgccgctgcgcttgattctccgcaatctgtaatgcttgaaaatcatgataaattttcaccgcactttgacgttggctggccgtccaacgattaaacacaagaaacaatgtactaaacaccgtaagcgtaaacatcacggaagtcagcgatattcccttattcactagaggctttaaaatcactccaacttttctccgctaattgccattcactatattgttgcaccaagggctcaatgagctttttaccataggcgacagtaacaccttccaaagcaagacttccgcctgtaatcaccgccccgctcacccgcccgttaccacgcaatgttaaattcccttccgcgactaaaatgccttgcactgtaccgttcacctcccattccgtttgtttctctgggaaccaatataactgtggtgtgttattcgttgctaagggataaggtggcgttgagaagtgcggtcgaaatctatcaagattttctaagtggataaaatgagtcaacaagccttgattgtcgccttttgttggcgattttttgaatatcgcggtacgctgacaccacagcgaatactgaattgcatcttctgctccttccagatttatagaaatctgccgaacatgatccgaattatccaaaggcaatgatgaacaagctttgtgtttctctaatgatgtcattctttgcaaagctaatgttcgttccacataatttttacgctgcatttgctgtgcacgaaaaaaactcaaggtactatcatcaaaaagcaagatcacccccaataatcctgaaagaaagatcaaaattgtgagtgttaccacaccttttcttcctttttgttgcattattgattccacaataccaccaccattgatgtttcatattgaatagcaggatacctttttaaattaccggcaagctgaatttccactccgttcccttccgccaccgaattaaattgcaagtgagtaatttcatactcattttcatccaataaatccgtccaacctccgccggcattacaagcggtttgttgaagtgctttttgacattcatttgattgacacttagcattaaccgcacttttataagtttgtttcgtttcaatcattttaccattcaatttataaccaaaaagttctttttcaattcctttggctatattttgccgaccgtttaaacaagtgttttttgtatatttttcaccgatacaaccgttcccattgagatcgtaaaaaaataaggcacaactatttttgggtgcattgtcagcttgtgaaataatcagtgctaaacctttttcatctaattcaaacaaagcaacattactttcaattaattggttatttaaagcacgaaaaccggcacgacgaagatctttaccaataagctgaatcgtacgttgcaattc

SEQ ID NO: 2710 - DNA, 23162 bp, synthetic construct
  misc_feature 1..23162: note = Synthetic
  source 1..23162: mol_type = other DNA
atattaaattatatgataactattcaactattgagttacctcaaggcttaccaaaagatatgttaaagctatttggtaaaacacgtgttctaaataaacaaatgcaaatgtcgtttatgggggaatcacagggtgaagctcgtaatgatcgtggtagcgataaacgtggtggacgaggtcgccgtagtgatgatcgtggctctcgtggtggaaatagtggtagtggtgaacgtaaatttaaagaaaaaagcaaccgcacttttaacgaacgctcaagaaaagacggtcgtagatagtttaattaatctttaattatttaataaaaaggcaaaccaaaggtttgcctttatttgtttaaaaataacataaagcatagaaaattatcttgctacttttccataatccctgttgcacaagcataagctgaactccaagcccattggaagttgtaacctccgagccaaccagttacatcgatgacttcgccaataaaatataatccttttactttgttggattccattgtttttgaagagatttctttggtatcaattcctcccattgtcacttcagcggtacgataaccttctgtgccattaggataaaattgccaatgatgaattaaattctctaaattttttaaccgcactttacttaattgagctaatatttcatcttggaaaaattgttgatttaaccataattctactaattttgatggtaaaagccgagataatgctgttttaagttgtaattttggtgatgttaagcgtagtgcttgtaaatattccacgatattttgatttggcaataaatcgatcttgacagattctgtagcctgccaataatttgatatttgtaaaatagcaggacctgaaattcccctatgggtaaataacatattattactaaaggattttcctgattgggctgtaacagtaatgggtagagatataccagaaagtgcggtataaaatttatcagtttctctccaagtgaatggcacaaggcttgctctcggtgaaaatacgttcaagccaaattgttcggcaatttgatatccaaaagcagtagcacctaaggctggcatagaaagtccgccagtggcaataattaaattatggcaataatatgttttgctatttacttgtagcttaaatcgggcattttctggtttttcaatatcttctatattttcaatatgttctatgctttctacattttggcgtaattgaataatcgcattatgttgatcacattcattaacaagcattgatacaatatcttctgcaccattatcacaaaatagttgtcccagttctttttcgtgataaggaatttcatattctaaaacctgagcaataaagtcccattgggtgaaacgtgctagtgcagattttacaaaatgtgggttatgtgaaagataatgttgtgggctaacatcaagattagtaaagttacaatagccaccaccggacattaaaatttttcgtccaatctttttaccattatcaagcactaatgttggttgtttgtgctttgccagtttccctgcacaaaataatcctgaagcgccagcaccgatgataatgttttctataaaattttctttcacttaggtaaccttgattgtatttaattagtattttttattagaaatctaaaaatgaaaaatccgcttctttttggaaaagcattgtttcttttgttaatggatgactaatttgtaatgattctgcgtgtaagcatagacgaggagataaggatttagctaagggattcgcataaaatttatcgcctaaaatagggtgtccaagtgctaacatatgtaaacgtaattgatgagaacgccctgttataggggttaattttacgctagttgtgttattcggtaaacgagctaaaacttcaaaatttgtaaccgcacttttcccattttgaaaacaaatccgttgacgtggtcgattctcccaatcacaaataagcggtaaatcaaccgtaccacgatcttcttttaaatgtccccatattaatgcacgataatattttttcggctcacgttctctaaattggcgtttcaactcacgatcagcaagtttactcatcgcaaataataaaataccactggttgccatatctaaacgatgagcgggctcacaaaatccgtatttatctttaattctcgacattgcactatcataatactttggtttacttcctgaaacggagagtaaaccactcggtttatttatcaccataatatgattatcgtgataaataatgtctaaataaggtgtttgtggaggattgtattcaataagtgccataatagttaatttctgatgcgttttattacattatgtaaggagagttgggattatagcgtaattctgatggttgatgaaatagaattgaaataacaatactccctttctatattattctttattttatagaaagggaaagttttgaaattatgccaatttaggttgcagactttgtaaacctaatttacgcacaatatagctgagtaatgcaccataagctggcacaaataataataaaccaatagcaagtttaaagagataatcgacaatgccgatttcaacccaatgttcagccataaatggatcactacttgcgtagaatgccacagagaagaacataaatgtatctgccattgtaccgaaaatcattgagcaagaaggggcaacccaccaagcttttaattgacgtaagcggttaaacacataaacatctagtaattgacctaaggtataagccgcaaaacttgcaaaggcaatacggaatacaaacatattaaagtgagtaagcactaccattccttgatattgtgtatctgaaaataaagtagaaataatataactaatcaccagtgcaggaatcattacgacaaaaataatccatcttgcttcttttgctccaaacactcgaacggtaaggtcagtcgccaaaaagataaagggaaaagttaacgatccccaagttgtatggaacgaaaaatcatttaaaccaagtaaatgcaaaggtaatgtcatttcgaaagaaatttgtactaagtaattacttgctgtaatgataagaatatggaataaacttagaataataagcgaatagcgtttttgttgatcgctaacgatcgaagaaatagttttcatttttacacctttttaattaataaattggggtgagggaacccaatatgattttgttttaagtatatgcaaaagaaacaaatttaaagcttgtattttgcgagagccgaatattacggatttaaaaaaataattcaagataattttaataaaaattcttattttaaggaaaaaagttaggttttttgttatcctaagcaaaattgttttttggagatcattacaatatgaataacgaaaatttcgttgaaaatcaaccgcacttggataagcagacgactagtgaagaaacaacccattttggttttaaaacggtagctaaatcagaaaaacaaaaattagtggagaatgtttttaattctgtggcgggtaaatacgatttaatgaatgatttgttatcttttggtattcaccgtatttggaaacgttttaccattgattgcagtggtgtcagaaaagggcataaagtacttgatcttgcagggggaacaggcgattttaccgcaaaattttcccgcattgtaggcaatacaggagaagtagttttagcggatattaatgcagcgatgcttgaagtcggtcgtgaaaaattgcgtaacttaggcattgtaggtaatgtaaattatgtacaagcaaatgccgaagaattaccttttgccgataatacatttgattgtgtcgtcattagttttggtttgcgtaatgttacagacaaagacaaggcacttcgctcaatgctcagagtgttaaaaccgggtggacgtttattggttctagaattttctaagccgattttagatccattaagtaaggcctataatttttattctttcaatatcctgcctaaaataggtgaagctgtcgtaaatgatggtgagagttatcgttatttggcagaatccattcgtatgcacccagaacaagatattttaaaagagatgatggaagaggtgggatttgaacaagtatcttattacaatcttagtgcgggaattgttgcattacatcgtggttataaattttagggggaataatgaacgctaaccttgaatttttaaaatcgcagttattgtttccccaatggctcaatgctggcttagaaaccttacttaatcaactaattgatcgtacagcacattgtgaaccttattttcacaaattaaatggtaaagtgttagctattcgtttacaaaaattagcgactcctattcattttattttttcagaaaaacgtattgatttgttaaatcagtacgaaggtgatgttgattgtgccgtaacagttgcaccgagtttattgttaaaaatgcctaaaaaatcacaaattagtgaatatataaatgatcaatctattcaattacaaggcgatttacaagttttacaagattttgttgggctgattgagtttttagaaaaagatccagctgaattaatttcaccttatgttggcgatgtggtagcacatagtgcggttagttttttaggtaattttgtcgcgatcattaaacaaaaattaacacaaagcgaaaaatactggggggagcgtttaacagaagaatggcagttactttcaccaagtttagctattgcagatttctgtgatcaagtaaaaatcctagcaaaacagaccgcacttttagagcaaaaacttttacaattagaaaaataaataatgaaattaaacgatttaaagcatctatataaaattattcatacctttctaagctatggtattgatgaagtattaccagttaattcttatactcgagcaatgcgttatggacgaaaattatttttctggatccataatcaacataaggataaagcttttggtttacgactacgtttagcattgcaagaacttggtcctgtgtggattaaacttgggcaaatgctttctacaagacgtgatcttttcccgcctgaaattgcagatgaactagcattattacaggatcaagtagaggcttttgatggcaaaattgcaagggaacaaattgaacaagcgttgggtggaaatttagataattggtttataaattttgatgagaaggcattggcatccgcctctattgctcaagtgcatacggctatttttaatgataaacaagatttagcgggcaaagaagtagtaattaagatattacgaccgaatattcaaccgataattgatgccgatcttagtttaatgtatcgaatcgcaagttgggttcctcgtttatcttcggaaggttatcgtttacgagctacggaagtcattgaagaatatgagaaaactttgcgtgatgaattggatttacgaacagaaatggcaaatgcaattaagttacgtaataatttcttagatagtccaatgctttatattcctgaaatgtatcaagagttttgtcatcaaaatgtgattgtaatggagcgaatttacggtattcctgtttcggatattgaggctttaaaagaaaataataccaatatgaaattattggcagaacgtggtgtgcaggtcttttttacccaagtgtttcgagacagttttttccacgcagatatgcatccaggaaatatttttgttaatccaaatcattcagacaatccacaatatattggtattgattgtggtattgtgggcaagcttaacgaaagtgataaacgttatttggctgaaagttttgttgccttttttaatcgtgattatcgccgagtggcacaaatgcacgttgatgctggctggacaccagaggatacggatattgatgcttttgaagaggcatttcgtgaagtgtgtgaacctatttttgcgaaaccattatcggaaatttctttcggacaagtgttattaaatctctttaatgtggcaagggattttaatatgcaagtacaacctcaattggtattattacaaaaaactttattatatattgaaggcttaggacgacagttgtatcctgagttagatttatgggataccgcaaaaccatttttacaagattggttaaaagaacaaatgggagttaaggcatttgtaaataagctaaaacaaaaattaccttatttacaagaacatctgcctgattttccagaaactttggttgaggcattaagacaacaaaaattaattaatcagcaattaagagatattagtaaaaagttgagtttacaacagcgttggtggagaaaatcctttgcattacttgcagggggaatggtatttttagggacgttatggcagtatccaatattaccgagtagcttaagtgcggtattatttttatgtagttttattatttggttaatcggatttttattaccttaactaaaaaagatgttaaaataatcttatttagctattgttcactcaactcaaacacgttatattcagcaagatttagtaaattatttaacaggagataaaaatgggatttagttggcagcaattactgattcttttattagtggttatcgttatttttggaacaaaaaaattaagaaatattggttctgatcttggtggtgcagtaaaagattttaaaaaggcaatgaaagacgaatcttcaaaaggaacagaacaaacagatgcagagttcaagaaaattgaagaagatggcgttgaatctgttaaagctgaaaaagcaaaagaaaaagagcaggcataatccgtgtttgatattggtttttctgaattaattttaatttttgtagtggggcttgtggtattaggtccacaacgactgcctattgctattcgtactgtgatggggtgggtgcgtactattcgtggcttagctgcgaatgtacagagcgaattaagccaagaattaaaattacaagagttacaagaaagtattaaaaaagcagaaaaattaaatatacaacagctttcccctgagcttgctcaaacagtagaagaacttaaagtttcggctcaaaaagtaaaagctgatttagagcgtaaagcaagtgaaactggtacagatctacaaaagcaagttactgaattaaaaaatcgtattgaacaggaagataattcagaaaatactaaaaattcgaccgccctttctccagaagaaatcgcagaattagcagaagaagatgaagagatggtttatctcaatgaagattattatcctgatgatactttagctgatgtaaattcttcccaatcattaactacaattactgattctcgaaatgagcatactttagagaaagatgctttagataaaaaagaaaaagtataaacgataagagaaaattatgagtgttgaagaaactcagccattaattagtcatttattagaactgcgagatcgcttgttgcgtagtattgttgtagtagccattatctttttagggctagtttattttgccaatgatatttacagttttgttgcttctcctttattatccgttttgcctaatggcacaacaatgatagcaacaaatattgctacaccattttttacgccaataaaactaactgctgttgtggcaatttttcttgctgtgccttttttgctccatcaaatttgggcttttgttgctccagcgttgtatcaagatgaaaaacgtcttgtctatccattattaatatcaagtactttacttttttatttaggcgtagcttttgcttattatgtagtatttccgctagtttttgcctttttaacgaaaacggcaccagaaggtgtagcgattgcaacagatattagtagttatcttgattttgtacttgctctatttctcgcatttggtatttgttttgaagtgccagtggcaataattttactttgttgggctgatatcacaacgccaaaagcacttagaaaaaaacgtccttatattatcgttggtgctttttttgtgggaatgttattaacgccacctgacgctatttcgcaaaccctattagctatccctatgtggttgttatttgaagttggggttatattagcaggattttatcgttcaaaagaaaaagatgatgatgaacataatcagaaaaatgaagacgacattataaaataagtataatgaattaaaaaaactaggcgggcttaatgtccgcctaatttcatagaatgaattaaatagagggatattatgactcaacaaatttttacaggatttcctacccgtcgtttacgtcgtatgcgtaagcaagattttagtcgtcgtttaatggcagaaaataaattaactgtcgatgatttaatttaccctgtgtttatccttgaaggtgaaaattatcgtgaagcagtgccttcaatgccaaaggtggaacgtttaactatcgatcaattattaattgaagcagaattgttggtgaaatatggtgtaccagttgttgccttgtttccagtaatcgatcaaagtaaaaaatcagaaatggcagaagaagcctataatccaaatggtttagtacaacgtgcagtgaaagccctaaaagctaatttcccagaattaggagtactaactgatgttgcattagatccttatactattcacggacaagatggcattattgatgagacaggttatgttttaaatgacatcaccacagaagtattagtgaaacaagccctttctcacgctgaagctggggctgatattgttgctccgagtgatatgatggacggtagaattggtaaaattcgtaccgcacttgaacacaacggttttattaatacgttgataatggcatattctgctaaatatgcctctaattattatggtcctttccgtgatgctgttggttcttcagcaaatttaaaaggtggcgataaaaaaacttatcaacttgatccagccaatagtgatgaagggttacaagaagttgcattagatctgcaagaaggggcagatatggtaatggtaaaaccgggaatgccttatttagatttagtttatcgtgtcaaaaaccaatttggtgtccctacttttgcctaccaagtttctggtgaatatgctatgcatatggcagctattgaaaatggttggctaaaagagaaagaatgtattatggaaagtttattatgttttaaacgtgctggcgcagacggaattttaacttattttgctaagcaagtggcagaatggatatattttgaaaataatcattcagaaaaataaagttatttttccataaattctaaataaggaatgtttatgacggatactgatgtagtagcaaaagaatatctcctagagcaaaacaaaccttatatgattgtgacttatatattatttgcaataggaatttttacaggcggatttatcactatcattggtttagtattggcttatattaaacgtaaagacgttgtaggaacaatttatcatgatcatttaacttatttgattagaactttttggatttctgttattggtagcattctcagctttatattactttttattctgattggatatttaggttttattttattaagcctttggtatattttccgcatcgtttatggattgattcaattactcaataaacaacctgttactgcgacaggttggtttatgtaagtttatttaattagagaaaaggctaaatgttttaatatttagtctttttttaaggtaaaaaacaatcgttgaaaaataaaataccacaaaaatgatgccccttaaaacctaagtcttaaggggcagagcattacggtcattcttttcagaagccttattgtagcaacgtttctcatttcgctgtgcaacaacagggaaattttataaatttaagtaaaaattgtcaacaatttattcattttatgatagaaatataaccgtaaaactattcactttaattatatggggtttctatggaaaattcacaattaaattatattttaggtttagatataggtattgcttctgttggctgggcggtagttgaaattgataaagaagaaaatcccataggactaattgatgttggtgtgagaacatttgaaaaagctgaagttgctaaaacaggagaatctttagctttggcaagacggttagcgagaagtactcgtcgtttaattcgtcgtcgagcatttcgattgctaaaggcaaaacgcttgttaaaaaaatatgaaattcttacccaagatgattttatttcgtcaaaagaaattaagggattaccacataatccttgggaactacgtgttaaaggactaacacaaaagttatctcaaaaagagtgggctgccgttttattacatttattaaagcatcgtggctatttatctcaacgtaaaaatgaaagtaaaacggataataaggagcttggtgctttgaaaaaatgtatcgaccaaaatcatctacttttacaagataaagcatatcgcacccctgcggagcttgcactcaaatattattataaaaaagataagcatattagaaatcagcgtggtgcttatacacatacttttaatcgattagatttattagcagaattagaattattatttgaaactcaacgaaaccttggtaatcgctatacatcaaaagaattacaattagaattttcagaattattaatatggcaaaagccagcattattgggcgaagctattttaaaaatgctaggaaaatgtacttttgaaacagctgaatataaagccgctaaaaatacttatagcgcggaatattttgtatggttgactaaattaaataatttgagaattcttgaaaatggctctgatagaggagtttcagaagaagaaagagtcgtattgctaaaacaaccctttgaaaaagcaaaacttacttatactcaagtaagaaaattattagggttatcagaaaatgcaatttttaaaggattaaattatcgtaaagaaaatgcagaaaatacaacgctaatggaaatgaagtcttggcatagtattcgtaaagcattagaaagtaatggtttaaaaacagactgggaaggtttaaaaacacaaccagaattacttgataaaataggtaccgctttttctatttataaaacggataaagatataagccattatctacaaaatgatatatctaaagatatattaaatgttttattagaaaatattaattttgataaatttattcacttatccttaaaagcactgtataaaattttacctttaatggaaaaaggttatcgctatgatgaagcttgtaagcaaatttatggcgatcattatggacaaaaagaacaacagttagaaaatattagaaatcctgttgttttacgatctttatctcaagttagaaaagtagtgaatgcaattgtgcgtttatatggttccccttgtcgagtacatattgaaacaggaagagaagtggggaaatcttatgaagatcgttgtgaaattaaaaagcgtcagttagataatcaagcggataaacaaagagcggtcaaaaaatttaaagaatggttccctaattttgtaggtgagcctaaatcacaagatattttaaaaatgcgtttatatgaacagcagcatggtaaatgcttatattcaggtaagcctatcaaacatttagatcgtttattagaaaaaggatatgttgaaattgatcatgcattaccattttctcgaacttgggataatagctttaataataaagtattagtattagctgcagaaaatcagaataaaggcaataaaaccccttatgaattttttaatggaaaagaaaattcaaaaacttggaaaaattttaccgcacttgtattaggaagtggtttttcttacgctaaaaaacaaaaaattctaacccagaaattagatgaaaaaggatttagagagcgtaatttaaacgatacaagatatatagccagttttttgtgtaactttattgaaaataatacgcacttaattggtcaaggtaaaaaacgtgtatttgcttcaaatgggagtatcactgcatttttgcgtcattgttggggaattcataaagaaagagtagccaatgaccgccaccatgcgattgatgctattgtggttgcttgttctacggtttctatgcaacaaaaaattactaattttgtgcgttacaaagagatgaatttatctaagggggaaattatagataaagaaacaggagaaattcagcaagtttatttccctgaaccttggcaatttttcagaaaagaagttgaaattagagtatttagtgataatccacaagaggatctagttattcaactaccagatagaccacaagcgaatcatcaatttgtgcaacctttatttgtttctcgagccccgactagaaaaatgagcggtcaaggacataaagacacagtgaaatcagcaaaacgtatagctgaaaatatcagtgtaatcagagtgcctttaactcaattgaagttagaggagctcgaatgtatggtaaatagggaaagggagccagaattgcatgaagctttaaaaactcgtttagaagcatttaataatgatcctgcgaaggcttttgatcctaaagaaagacctttttataagaaaggtggacagcaggttaaagctgtaagagttgagaaactgcaaaaaacaggggtattggtttataataaaacaggggttgctgataatggagcaatggttagagtagatgtctttattaaaaaaggaaaatattttttagtgcctgtctatgcttggcaagtggctaaagggatattgccaaatcgagccgttgttaaaaataaagatgagtcagactgggaaattatggatgaaacggctatattccagttttccatgtatcctaatgatttagtagaagttaaaacaaagaaaggagtagtgaaggggtattatgtaagtatgggaagagctaatggaaccattaatattagggagcatgatttagataaaacaaaggggaaagaggggatacaccaaagtattggtgttaaattagctatttcatttaaaaaataccaaatagatgtattgggaaaaaatatattcttatgtaaaacttcaaaataccgttctattaattaatattatccctgctagttatagcagggattttttattgaaaatataaggggaaagaatgagttggcgaagtctaattattagtaaacctggaaagctatctctgaggcaacaacagttatttattcagcaagaagtgaatgagtttacagtaccactagaggatatagctgtcattgtggtggaaagcaaagaaattattattacggctccattactttcagctttaggaatatatggaattaccttattaacctgtgatgaacaatttctaccttgtgggcaatggttgccattctcacaatattaccgtcaattaaaaaccttgaaattacagcttgaagcgacaaagccgcaaaagaaacaactttggcaaaaaattattcaacaaaaaattcgtaatcaagcatttgtgttagctcagtcaaaatatccgaaagaatcccaaaaactattaaatatggctgatagagtgaaatcaggagataaagataatttggaagctcaagccgctcaaatttattttcaaactgcttttggagctgattttagacgttggcaagaaaaccatattaatgcacatttaaactatgcttataccatattacgttcagcagttgctagggcattagtacaatatggttggttgccttatttggggttatttcatcgaagtgaactgaatgcatttaatttagctgatgattttattgaaccttttcgtcctttagttgatttgcaagtatggaaattatggcaagaaggaaaaattagtaatggactacaacctaagactaaacaatcgctagtagcattactccattatcaaatgcaatttcaaggacaaacatttactgtacttgcttcaattgatcgatgtgttggttctttacaaaatgcatttattaataaaaatgctaatttgcttaaattacccgaaatgttaccacttaaggaacatttatatgagtgaggctaaatttatgcgattaatcgtttttttcgatctacctgttacaaccgtcgctaagcgcaaagctgcaaatcgttttcgtcattttttaattaaagatggttatcaaatgttacaactttccgtttattgccgaatcgttagaggaagagatgctttagaaaaacataataaacgtttacaagagaatttacccgaagaaggatctatacgttgtttagaagtaacagaaaaacagtttgcaagtatgcatattttacttggaaaattaaaaattcaagaaaagaaagtcaacacaaatcaaatgctacttttttaaattttttaatgtttttatctatatctactatacataaaaattttttctgtttgcttgttttatatacagagataataataaaaaacaagtctttttagaaaaataagataattttatctatattatcgttctttttttccttcaaaaaatcagaaaaaaatataaaaaaatgatagaaagcaaagaaatttttttataattaaaatcgttgaaagcccttgatataagggctttcacaagggctattgtagcacagcgaaatgagaaagggagctacaactatcgttatcagtgcctccactgctactttattgtagcacagcgaaatgagaaagggagctacaacgcaagaggcttgtgtagagattatgagtaaattgtagcacagcgaaatgagaaagggagctacaacaaagcctgatgacaccgctcaaatattacaattgtagcacagcgaaatgagaaagggagctacaacaataaagcctagatatttacggtatctaggattgtagcacagcgaaatgagaaagggagctacaactatctttggttattggcataaaaattaagtattgtagcacagcgaaatgagaaagggagctacaactaacagtttcttcttgtacttttttccacgattgtagcacagcgaaatgagaaagggagctacaacacgatcaagaattgtgaaatttctgaattaattgtagcacagcgaaatgagaaagggagctacaactctgaaacatataagcgtaatgtttctccaattgtagcacagcgaaatgagaaagggagctacaacagaagttggaagcgatgagatttgaattgaattgtagcacagcgaaatgagaaagggagctacaacccacaagcgatcgctatgtgctctaccattattgtagcacagcgaaatgagaaagggagctacaaccatcacattgccctgcaactaaacgtcttaattgtagcacagcgaaatgagaaagggagctacaacggttatatatgcgttaaaaatgggttaaatattgtagcacagcgaaatgagaaagggagctacaacggcagggcttggcatataaatggcaagcaaattgtagcacagcgaaatgagaaagggagctacaacaagcaccatttgttataacagtattataatattgtagcacagcgaaatgagaaagggagctacaacattttatgccccttattttttagtttctgtattgtagcacagcgaaatgagaaagggagctacaacaaatcatctggtacagtttgacctgcaataattgtagcacagcgaaatgagaaagggagctacaacctatcattgagtcatcttcaataatctctgattgtagcacagcgaaatgagaaagggagctacaacaaactagctaaccgctttgaaatatcagacattgtagcacagcgaaatgagaaagggagctacaaccgaggattaaatggtttggtaatataatcaattgtagcacagcgaaatgagaaagggagctacaactaccattaccgccactgcgcgaacaagcgcattgtagcacagcgaaatgagaaagggagctacaacatagaaatatagcaagatggataggatataattgtagcacagcgaaatgagaaagggagctacaactcaatctctgatactgggtttactacagggattgtagcacagcgaaatgagaaagggagctacaaccttactaattttcgtagagatattgaaacaattgtagcacagcgaaatgagaaagggagctacaacttctaatatagccaatccttgttcaatatgattgtagcacagcgaaatgagaaagggagctacaaccatacaccattgacaatacctgtgcctgttattgtagcacagcgaaatgagaaagggagctacaacgcgtttcgtcaagctcttcagagaaaaaatattgtagcacagcgaaatgagaaagggagctacaactttcggcttgtaatggtgattgagataactattgtagcacagcgaaatgagaaagggagctacaactgatgagtaattgggtagattgcctctaagattgtagcacagcgaaatgagaaagggagctacaacgtattatctgggtttgatgtttctcgtgttattgtagcacagcgaaatgagaaagggagctacaactgcaacaagcacttgttgaaatgaatattgattgtagcacagcgaaatgagaaagggagctacaactcttgtaaatcatcattaccaagacgtcctattgtagcacagcgaaatgagaaagggagctacaacaccaccaactgttttttgtagctcttttaaattgtagcacagcgaaatgagaaagggagctacaaccctgtcatccacttgtttgcagcagctctgattgtagcacagcgaaatgagaaagggagctacaacgctcattttaatcaagtaactaaatttgagattgtagcacagcgaaatgagaaagggagctacaacattcccgcttacgctaaaaaaacaggaatgattgtagcacagcgaaatgagaaagggagctacaacacgaagcaattaaattaatttataaaataaattgtagcacagcgaaatgagaaagggagctacaacatactcatttaaaatatgcaaccttggataattgtagcacagcgaaatgagaaagggagctacaactagaaacgttgaataagagattttatattgattgtagcacagcgaaatgagaaagggagactgtcagatcgagtttgaccttctacatctaaatccttccatttttcacccgttggcgagcgttcattatcaaaagcctcttctgactcttctcgtaaaacattagctatttttcgagaaatatctgtaccactcatcacttttcttaagtgcgtgatttttctgataacgtcttcatcttcaaatttgaattctaaaatcatttgacttttccttttggatgattttatactgttagaaagaagtaaattcgtgtcagttaatggtaaactaacaagaaattgtcactgtaggttcaacccctaccacgaatttaacagcgggatagtttatctatcccgtttgttttacggctcaccctctaatactttataattttcacctgatatttcagcaagaacacttttataatttaataatttataagcattaatgacaacatcaagcttttcttttggttttaatttttctttacctgaaacatctactaacacttttattgttttatctttattgaaataaattagagatccttttctatcccaaaccactagactaggagttgctataatacgtgaaatacttgcatattcattatcatcaagcctaacaccacctgtgtgatgtttcagactatttgcatgagctaaacgcttttcactcatcacaagtacacgttgagataattcttgcccaacaatttgattaacagcttgagcaatattttcggatacaaacccagccgtaatataacgattacttgctccttgtttgcctaaattttcttttacccacttttcaaaatattggtgtcttagttcgctattattaatcgcttgaatgacttcttgacgtagttgtctattttgaatttgttgtaatttacgaataatagcaatatcagagcctactgcagatttaccaacattataattccaacccggacccgttttaattgtgcctttatctgttgtgaagcgacttacttttgcatgggtttcttcacccgttgatttatcaacaccagcaagttcccaatctgttttaatgttaccctcgcttttacttacttttaagccttgttgttttagtctgaattcacttaatgcacggacacgacaacgatagccccagtcattaggcggatacatcgtatcccagataggatcatcataacgatacattttacagtgtaacgctaaatgacttgcacgagtgcgactatcacgcacggcaacatattgccagtagggttgctcatcgacattttccatttgatgtgcataacgtccgacgtgataagccgtgattttatttgttcttaaaattgttcgtaaacgacgaggtgagtcaagttgtacttgttctgcattgcctttgctatcaattacaatttgttttccccaccaacttaaacgctgtaattcaggcttaagatttttgataaattcccgctctgatgtgccattctctattgcacttactgttgcctctcgaatagtttctaatatatcagcacgggttactttagcgacggtaaacgctttaacatgagcttcttctagctgttcttgccagttccacgtaatgttgtaacctttggcttttaaataatcaacagctagctttggcgcaagtcgtaacatataaccatgtcgatttattggagttctgagaaatggaaaaggagctacgggtaacttgatgtaataatcaacgcttataaaattaattttgaacaggatatagagaatgtaattcaagggggattatgtggttattcaagtgagtaagtgttacggtgggagttgaacccacatacccatttgccctttcggggtatggcgactttaccattaagcgtacgtaacactattacatagttaaaatttaatcttattttttagagatgtcaaatgactttagaatttaagtttgaagatgaggcagagaatattgttggtaataaacgctctctgactagtgaaagaggagaaatttttggaatggttggtattgctaagaaatatggacagagtcatatgtttggtacctaaaagtatcagtaggagatttatacaatggtaaatttattaatatagattattttaaatataaattttgcaatttatgtatctgttttttcataaaataaaaaatacctatttctgatatgtcccccaaaagttggacacaattttttgggggatatattaattaatattacgatggtttttgacgttttttattctagagtaataactaatctactagtttcacaccataaaaataagaataaccaaatggactttgtttatagtcttgtactcgtttgctcattggtgcaaagttaattgagtgtgcaacgttaatccaaggtgcttgttcttttaacaatacttgtgcttgctcatagatttttgctctttcagctttattcgataaccctattgctttatctaataatgcatctaattctgggctattaaagcgagcatagttactattaccaatattatcacttcctaaaagtggtgaaaggaaattatcaggatcaccattatcgccagaccagccataagtccctgttgttagttcacctgctttggttcgttttatataatcgccccattcgtaactaactagctcggctttaacgcctactttattccaatcgctttgtactagctctgccattcgacgtggatttgggtttgaagctcttaccactggttgcacccaaatttttgtttcaaatccattctcaaagcccgcttcttttaaaagtgcttttgctttttctggattgtattcataatctgtaatttcgttattatatccccaaatagtcggaggtaatggatttttggcaacaacacctgctccacgatatacggcatcaatgattgcatttttatctaccgcataatttagcgcttgtcgaacttttacattatcgaatggtgctttttcagtattaaatgcgatgtaagcaatattcaaacctggttgagatagtactttaactttaggatcttttttcattttatctagatcagctacattcggtaagtctatcatatcacagcttccagcttgtaattttgcatatcgagtagtcgcatcagggacaatatcaaaaattaaacgatcaatatctgctttccctttccaatagtctttattggcgagaaaacgaattttttgatctaattgataacctgaaaatacaaatggacccgtaccaatagggcttgtatcaacattttctggcgtaccttttttcaacattgtatcagcgtattcagctgaataaatggaaataaaatccatacctaaactagataaaaaagtggcatctcttttattcaaaagaatttttactgtataatcatccaccttctctactgattttaataatttagggaatttcatcgctttaaaataagggtatgtaccgttagatacattgtggtatggatgttctttatttagttggcgttcaaatgaaaatatcacatcatctgcgttaaattcacgactcggtttaaattctttattgctatggaattttacacctttacgtaaataaaatgtataagccaatccatcatcactcacttcccaacgttcagccaaagctggctctatttcagttgagcctcttttaaattcaactaagcgattgtaaacttgttgtgagcttgcattataagaagttccatccataaccaatgctggactgaatcctgtaggggaacggctaacgcagtttattaacgttttatccgatgcttgtgctaacgttgatataaacaatgttgtagcaattaaagaaagtttcattttcaatttcatgatgtctcctatattaaattttaaccattttttataagatacctattttatttctttaggtcaaagaactaaaggtagtttcttataactaaaaattataagtaataataacggttatcttgatgataaaatttgtttaggttttatatattgaaagaagataatattgaaaggttaatttattatgtaatactgactaaatagtacattttacagatactaatgattcatattagtatctgtaatatattagtaatatcaattagttattggaacaaaggatagctttatttttccattttcagtaacagataaatgaattgcagataaatcataaattactatttcatttggaaattttgatggttgataggttgtcgccaaaacaattacttttgccccagcacgatgtcctgcttcaatgccaccaggtgcatcttcaattacaatgcaattttttatatctacatttaattcttccgcggcctttaaataaccttctggatcaggttttccttttgctactttttctgcggtaattaaagaagtcggtataggaagtccacaataagataatctttctctagcaatactttctgtggatgaggtaactattgcccacttatctttagggatattgatgagtaaatcttttgcacctgttatagttgtaacatctttttcttttgcttcctcgatagaaaaaagtttaacagctgcttttatatcagcattttcaccaagaacacttagtgcggtatcttctggacggcgaccatgggattgatgaataacctcatctttatttaatccataatattcagcccaacgtccccaaattcttgcacaagcttggctcgaatcaattaaagttccgtccatatcaaataatattgcgtcaacttctagagatattttttttgatttatccatatttttctcctaaatactgataaaattttatgttgatatatatgaagaaaatattgttaatatattaacaatatttttaaaattatcatttttgtttgcatgatgcaatatttttatcattttgggtgagtagatattttctcagtaagatagttattgtatgtgtgagatatgtttattattaaaataaattctataaataggctacattaaaagtgtatttatatttttctaattgttatttatatctaataataaatatcacaatagggataggtattttgtgtgatgaagttgaatgtagctaatataaagaatttactcatattctaaaggatattacaaaatatagtttgcttgtatttgtacataatattattgtgataatgatatcaataaaatcaaaactcaccttgaaattaaaaaaattgtacatatttaagataataataagatgttagtgtggataaccatactgataatataaaaaaggagagttttatgaacatagaaaaatttacaagtaaattccaacaagcccttgccgaagcacaatctttggcattaggaaaagataatcaatttattgagcctgttcatttgatgattacacttttaaatcaacaagatgggtcgattagtccagtgcttacatcaagtggtgtgaatcttgcgttattacgtaatgaactaaatatggagttaagtcgtttaccacaagtttctggtaatggtggcgatgtacaaatttctcgtgctttacttaatttactcaatctctgcgataaattagctcagaagaaacaagataaatttatttcatctgaattatttttattagctatttttgaagaaaaaggggcattaagtaagattttagaaaagtgcggtgtaaaaaaagcaagtttacaacaggcaatagaacagatgcgtggtggtgaaaaagtgaatgatcaaaatgctgaagaaaatcgtcaagctttagaaaaatatactattgatttaacagaaagagcagaaagcggtaagttagatcctgtgattgggcgtgatgatgaaattcgtcgtgctattcaagtattacaacgtcgtactaaaaataatcctgttttgattggtgagccaggggtagggaaaa

SEQ ID NO: 2711 - DNA, 21920 bp, synthetic construct
  source 1..21920: mol_type = other DNA
  misc_feature 1..21920: note = Synthetic
cgcctccttatgcaaataatgccaattgggtgtgctgattacggcttttgcgttgcaacaaacccaaatcaaagagtttccgtaaccgtaactcaagggcgtgtttacctaaatcgagcagcttgccgatttcgctgttttctagccccatctcacggtataaaataattttttcacattccggataaacggaaaataaagcttgccgtgcttgtttttgtagtttagcaatttcattcgggttattgcgaagaaaagccggtattgccattaattgttgttttaagcggggaagttctgcccttgctttgttgtcgttttcaataaactgctgacggatttgataaccgatttcggtgttttccattaagcataaatgcttggcggtatcgagggtgaggtggtaatctttgactgttttttctcgttttccaaagaaacctgactcggtgatcataattgtctgaacaccgataaaatctacattctcttgcaatccacgcacatttaaacgggattttatccaatcagaaaaatgctgtttactttggagagctttgtgaaggtctcgggcattaattaaaagagttggttgattttgaatagaaccattgaaggttttaatagataagtttgtcatgtttcgttcctcttgtaagagaccctatttttggtagggcggtcgagagccaaaaacagcgaaacaagctgcggagttattcccttgcggtgttgtattcctcacactctcgaccataaataagattttttaatttttctgaccgcactttatggaatgcaggcaaaaaaataccataaataacgctttacggcgtgcgtgtttcggcttttttggaaccttgatcgcaaaattaaacgtttttaattcagaaatcaaggtttaattgcccgtttatgcaaaatattttacgatttttgtttttggtgatcatacaccgacaacatctgcaccacctttctcaactgccaaggctgcaaccaatgcacaacatccactttaaaggaacgttttgcaatgccgtctgcatattccttcggtaagccgtgtttagctaaaagtgcggtgatttttgccagataaattttcttatcatctctcggggcggcacggttgccccaaaatgccgaccgcacgttaaagcctttttgtttcatggcattcaatactagctgcaactctccctcattcatcaaggcacaactggctatgcccgtagtattcacaagcaattggcgataggtatcttcatccagccccaatcgggttttgccaatatggattttggcgattaagtttttacgctgcataccctttctcctgctgtgttttccatgctttccaaactgcaaattcaggtatattttccacaaattgcaactgaccaagtgtggcgtagcgttcaatatattgaatagctgccacgcggttatcttcttccacctgctgcgcattttttacttccgctttgccttcattacgcaccacggcaaacaatggtttcgccccttcatacactttctttaagtagttatggtttgccaacgcttgaatattgcgtgtttcacggcgatttttcatcacagactgcacggtttcattaagcgcatgagcgagcagggggcttggttgatacatttccaacacttcacgcattaattttaacgcccgactattggataaccctgatttttcagggcgaaacaacccaatataactcaccaatgcacgtgcattacgcccacctaaattggcaatcaatcccaacatctcacgtccggcatcatcttctaataattggtcaagatgaatatcagaatgacaaaccgggcaacggcatagtttcattctttattccttgtttgataaaacacattactcagcccacttaaaatgtggtttaaataggctgtaaatgtactttattttgctcgctgaataattttatcaataaccggatcttgtgtgagaatccgctgtataacgccaattaacgtgcgaccaatttcattcggattatctactttgcaactaacatcgtattcatcatcaacagaatgacaaaaatcaaaatggatgttgtgcgagaatcctttttctacattgggatctattcgttcaaaagcttcccaaccagcctgtacaacatttgggagtttaaacatcaaacaactcattgcgtcttttacataatgatttggtgcattatggtatttcgtgttgatattgaatgttaaatcatcaggttcaaccgcaaccttaaactccagtgtagtagaatatgttctttcgctcatttactctctccgtattgaaaccccaccttgacgaaatatgacatttcgatcgtctttggttagttcttgcattaattgataagttttagggtatctaccagtgcctttttcttcgttgagtaaacgttctaattcgtcccaatgttctaccaattttgtccaaatgggggaaatcgctttcatcttataaagataattgcgcatttcaggcactcgcactaacagcttcacacaacgtgataaatcgctcggatcaagcggatagtgtttacgtcttggcacaacatcaaacccaacaacaaacgccatacacttactacttagcccaacatcttcatcatcagccagccattgaatgatttttttctgcatttttgctccttattaattgaaaacacattattcagcccacttaaaatacgattaaaatgggctgtaaatgggttttaatgcgctatatatccttcaggggggagaggtaacggtcgccaatgggttattttggtacattctccattaaagccataaaaccgatttccgcttaccatataagcaagtacataagtttcgctatcatccggctcctcaataccgaaacacatcacaacatcactacgttcaaacccattatgatcatatatctctggtaactgttcagagcatttaatccaactgttattatttccgctcatcttttaaaccctctctctgttaaatctattgtcagcattacagcttctactacatcaggatgaaatacagctctaactttctctttatcatatttgtagtgcgcataaaccgttttaataaatgaaagagccgctatgtccgattcattttttaagtcaattgcattactgggtctcgctagtttcatcttgcatatctccattcatctttcggcattatttcggttacatcggcttccgcccattttaaaaatttggttacgctaattttggggtaatgctttccgtttttgactgacgggctatcgtattgaagtccttcgacaaatccttctttattgtcataaatcagccccatccataggatttgtctatctcctaacaggggtggaaaacaatattctttcggtttttttgccgagtaaacgtgtccgacttttaaatcatctttggtaagtggtgttgtcattttatccctccaatatcggtgcaattcgccacgccactgttttcatttccagacttgcccgatgcaatactttcagagcatcgtcatttttatcttccaacaaattatctttagcaatttctaacagcgtttgaatatcgacaatttgttgggctacatctgtttttttcatatttcctccccctcaatcacactatcaatttccacaactgctcctgttaatggcggtgcagtatttaaatcgcaaagttcaatggcttgctctaaactttccgctttcatttttacttcgatgacgccgtacaggcgcacgatataatcgctcatcactgcctcctaaaatggctttcttaacactcggtcacaaaacgccgcacgacgtttgcaccattctctgttttttaaatccatagcgttgagttctgccactgcccattgttccttagcatcttgcaattcgcctttacgctcattttttgccgcttgttcgctgtaatacttaaagcgatcaaatttgttgatgtttttgttcatctttttctcctagtttgggatgtcaccgttattgcaggtgtaaggataaaaatccgcattcacttttggcgtaataccgcctttgctgtaaccttcgtaaaccaaatacacaactccactaatacaagtttcgtgtatagttgctttaattgaggcttttttgacttgctgttgcgtagctctatcacaagcagttaatgcacaaagtgcggttaaaataaagatcgcttttttcattgttgctccttaatcatcttcactttctactgcgtaattaattctaaatttaaaatcaacgccatatagctctgatatttcactgaatatttcgatagcataggcttttgcgtcttcttcattttccgcctctgtattaaaatcacaggtagcggtaatattcacgttgtagatcatcattttctcctgtcagttaaaacactttataaacgccccttaaatcggatttaaagagcgttgaaaagggttttatttcgattcaagccaagcaatccacgcaataagtaggcatcctatggcaatcattatgataaaatcacccatctacacccccgccacatctaacgcaatcggcacatactgatcgctttcgcccacacgctcataaagtcgaacataagccttactgctcaccacctgcacactttcgctaatcgcttgcatcgcgttttgccagcgttcgtcttgaatatccacacggcgtaaccccaaaatgcgcgaggtattcaaattgccttctttatccacattaaatgcccgttcaattaaggcttttaattcagggcgggaaccttccgaccattcattcaagcattcatcaattagcacttttgccgcttgaatacgctcgtcaaattgcaaatggtcattaatggcacgctgaattttgtatttgccgtcatagctaaataacgtgatattgccttttgtgccgccaatcttggcttgatacttctcggcggaaagctcaataaacgcctgaatatcatcaaaaacaccgcctttaaattcactaatgctttggctgacggctttgcctttttcaatccattcatgcactaaggcatcacgtgctttatcaatctctttcaccaattcatccggcgttaaattacccttgacatcacgccagtatgctttgccttcaatcattacctttgccatttttacacctcttctttatctaatttgatcacaattaatcgtttattgaattgtcttcgccaagcccctttttgcgagctcatgtttcgtatcgttttagggcgtttccccagtttttttgctaattcttctgctgtgccgtcgcccaagttctcttcaccccgatagacggcataaatttgacgacgtgccatttttcctccttaccagtaaagcgtaacaccttgttcatttgccatatttcgcaccgttcttacgccatttttataagtcgtcatctgtacacttttttgttttaaacgacgactcggatttaaaataaccattcgtgggaaacgcccgtctttactttccacaatctgcacgccctcacgtcttaacacatacgcgacacggttcatttgttcactcatttttcaccccttaactaattaacatcttgctgtattgttcaatcattgctgcactaatttcgctatcattaatttccgccgaccgcaccacaccccgcattaatttgcttaagcgacgtgcgttacctttacaggcttttatcagcggttcattaaactcactggtatttagcgcactttccgccaacatcgctaaatcttcatcgggtagggcattacctagatcacaagcgaaccccacacgactataaagctgtgccaattcgttgtttttccctttcaaattcaccaaaaggcgtggcattccggctaaaatcacaccacaatgggttaaatcatggatacggcggacaaactctaatgcacgggtggagagtagttccgcttcgtcaatcatcagcaagcgttccgaccccttgagtttttccacaatgctagacaatacatcgttattaattccccgactgtttgcgcccactgcctctgcaatcttgcgtaacaataccttcggattgcagctcggatcggtttcaatcaataccgcagaactatgttctttcgcatattgtttaagcatctgcgtttttcctaaacctgccgcgccataaatcacgttaatttcaccttctgcttgggcaaactgcatgatttccatccctttttttgccgtcatggttgggacaaaagtgttgttatatttcgcttccaccacttttgctttttggcgggctaaaagctcatccactttttcatccagccacttggtatctgttgggtatttaccgtttaaatactggctcaccgtggtaatggatacatcaaacagcgtcgccacttgtttttggttcattttgtgcatatccataaaggcttttaattcttggcttttcattgcatttccctcattcattcactaacttttttcgtttctcccacgcctctttttctgttttcgtcaaaaaaatcggagtaggtgtttctttcggtttggctttggggcgtaacaactcaaagccttgttgatgttcaatcgtgatcaccggatttaattccgcattaatttcatcaagctgttcctgtttcaatttcgcacggcgtgcatggcgttctttgcgagttttctcaacaaacgacactgggaacgcatcacgtttattgccatctagttcggcataacacacaaacgagccgtctttttttctcacaatcacctgtgacggatcatgaatatcaaacatcacctgcactttttgtccgtccacatctaacaacttcatactgaagtaatcattgttaaacaactgcaaccaacctcgctgtgccacgcgtaacacactcggacggaataaatcccttgcctctatcggcgtgacaaacactaaatcttcttttttcattttcgccattaattggcgacgctttgcggcgggtgtcatatatccaatttcactatgcttgtgttcgttgttgtaccaatcaatcgcttcttgcaccgcatctaaaaacagattccagcttggcaatttacccaccgcccatttttgctttgatgtcagctccgttgcgcctttgcgtttggctttatccagtgaaatcactgcttggcttacttggcgaaccgtatctcgatcagcccctgaaccgtggtaggtctcaaactggcgtgccacacggtataaaatcgttttatgcacccgttcgataatcccacgcccttgcgggttgcccggtatccccgtttggtgattaatccctaagcggggcaacatccccgtaatatcggcatcaagtacccagtttttctcacctcccccgttatcggagtaataaattgccggtatgccgtagcgttccacgccatggcgcagggcatctgccaccgctaacacgttttccgaaagacttgccgaccaacccacaataaagcgacttgaggtatccataatcaacgtcacctccggaataaaagggcgaccatgttcaggatgtgccacttttaatttcatggagtgaccatcacccacccacacatcattcaccagcaacacgctccaatcccgttttacataagtgtgtaatgcacgcaattcagaaccggtcttacgcccgatttctttgatatgccgtggcagttttgctaatgccgcacgcacttggtcgaggctcggtttcatttcaaggcgtaacggttcatccgcaaatcgtctgtcccattctttcgagaaatagtagtaggcttccgccacattaatgccgttagtttggcgatataccgccaaaaaatcaggcaaccacacaatttcctctgccttttttgccacccgttgcataggcgcaagggctttcaaacgggcttccggtgtgtccgctttctcataatccagcacccactgatttaaagtgcgggaggacaaggtgcgatttttacctttcttgttgttagccagttccactaattccattaaatctgcggaaacttcgccttgtttaatccgttcgcataaaaacttaatggctttatagcggggctgtgcctgttcaagctctgccaccttcgccaccaatgccatccttgcgtccgctacctcacgttgttttgccgttagtttttttaattccacctgacggagagcggcagggagagacttggcttttacagcagaaaccgcaaatttagtgcggatttcatcttgtaaatgttgcggtaaagaacaaagcaaatattcaaccccgccacctttgccaacgcgtttacggcattcccagttttcgcgcttggctttgtctaatacgtttttgtgtgcctgtggtaacgatgaaagtttaagtttcaataattccgcaacggaataatgcgtttttaaagaaatttcactcataaacgatcctttttgtttcttttacgtttaaattcctttaagattaaaacttattcgttaaaacaggtcttcggttacgttaagctcgttccttagaacgtgcagcccaaatctcttcgggtgcaacacccactgcatttgcgataagccgctccatctttggataaggtttatcaagagcagtcttcaaagtgttgtaactcacgtttccagcttgagccaaagaacgtaaagaccaaccgtttttacgcaacgcagccaaaatatccgctcgatgccaatcactcgttgcggtttttttcgtgttgcctaatacactcattaaatacacccccttttatgtatctgatgcgcgtattaaaccgtaaaactttaaacaaatcaaccgtaaaactaaaatcatttaaaatatttcttgctttacggtttaattttaacaaaatcaatgtgttaaagatttgctttacgattaatgaaagttagtgagaaccgtaaaagatgagcaagccaaacatttacgatgaaaacttctcaaaccgaatgaagttgatcgcagaaaaaagctttaagagtaattacagtgaatttgccagagccgtgggcgtagcccaagcctcattagcacgttgggtgaaaggagaagcagatccttcccgaatgaatttaataaaaattgcagatgcgtcaggagtaagtcttgaatggttagcccttggtgtaggtgatatggaaggcaaagcaccacaacagataaagcctgatgtgaatttactggcaagcaacgacgaaacctttgtagagatagaggactgccgagaggtgcggttatctgcaggcggtggcgcgtttaacaatgactaccaagaaacctgcacaaccaaagtagagcgtgcgtggcttcaagcgcgccgtctaaaagccaaagactgcgctatgttcttagttagcggtgatagtatgcatccaaccttaagagacggcgaagaaattattgtggatcgctcaaaacgccaactacaagaaggcaaaatcttcgtactaaaccacgcaggggcaatgttagttaaaaaagtgcagttcacttatgagggagtagaattattaagcgacaacaacgcataccgcccaataaaaattactagcgaagaagctgacaccctaattgttatcgggcaactcgtgcgaggttatcgggatttttaaggcgattcccattacggaaaccgccttcttttaactttaccccaaacaaggggtaaaccttaaactctatttaaaccagttttaaaacaaactttaaaattttaaaactgtttaaaaatcaccaattcatcgacaatttttatgcaaaataaaacccaatttccgcccattttcaaccaatccccaccatttttattttttgcataaaattcagctctcaaatcgcccaacccccaccacacaagcctcaagccaattttttcgacccaaattttttctttttctttatgcaaatattgtcactaccccatactttcactcaaagccttacaacaaattttaccgttgatgttgcaagggcaacgttatgatgaagcggtttctgcgatttatggtgatcattatggtaaaaaatcggtggaaattaaccgcttgttaccaactattcctgccggtgaaatctgcaatcctgtagtattacgaacactgacccaagctcgtaaagtgatcaatgctgtggtgcggttatatggttcgcctgcccgtatttatattgaaacagcgagagaagtcggaaaatcttatcaagatcgtaaaaaacttgaaaaacagcaagaagataatcgtaagcaacgtgaaagtgcggtcgaaaaatttaaagaaatgtttccgcattttgtcggggagccgaaaagtaaagatattttaaaaatgcgattgtatgagctacaacaagcgaaatgtttatattctggaaaatctttagaacttcatcgtttgcttgagaagggttatgtagaggtcgatcacgctttgccattttctcgcacgtgggatgatagttttaataataaagtactggtgcttgccaatgagaaccaaaataaaggcaatttaacgccttatgaatggttagacggtaaaaataacagcgagcgttggcaacattttgttgtacgagtacaaaccagcggtttcccttatgctaaaaaacaacgcattttgaaccataaattggatgaaaaagggtttatcgaacgtaatttaaacgatactcgctatgtagctcgtttcttatgtaactttattgccgataatatgttgttggttggtaaaggcaagcgaaacgtgtttgcttcaaacgggcaaatcacggcgttattgcggcatcgttggggcttacaaaaagtgcgtgaacagaatgatcgccaccacgcactggacgcggttgtggtggcttgctctactgtggcaatgcaacaaaaaatcactcgatttgtgagatataacgaaggaaatgtctttagcggtgaacgtatcgatcgtgaaactggcgagattattccattacattttccaagcccttgggattttttcaaagagaatgtggaaattcgcatttttagtgaaaatccaaaattggaattagaaaatcgcctgcctgattatccgcaatataatcacgaatgggtgcaaccattgtttgtttcgagaatgccaacccgaaaaatgacagggcaagggcatatggaaacggtaaaatccgcaaaacgattaaatgaaggtttaagtgtgttaaaagtccctttaacacaacttaaattgagtgatttagaacgaatggttaatcgtgatcgtgaaattgcattgtatgaatccttaaaagcacgtttagagcaatttggtaacgacccagccaaagcctttgccgaaccattctataaaaagggtggggcattagtcaaagcagtccgattggaacaaacacaaaaatcgggggtattagtacgtgatggtaacggtgttgcggataatgcttcaatggtacgggttgatgtttttactaaaggtggaaaatatttcttagtgccgatttatacttggcaggtagcgaaagggattttaccgaatagggctgcgacacaaggtaaagatgaaaatgattgggatattatggatgaaatggctactttccaattttctctatgtcaaaatgatctaattaaattagttaccaaaaagaaaacaatctttggatattttaatggattaaatagagctactagcaatataaatattaaagagcatgatctagataagtctaaagggaaattaggtatttacttagaagttggtgtaaaactagctatttcccttgaaaagtaccaagtcgatgaactcggcaaaaatatccgtccttgtcgtccgactaaacgacagcacgtgcgttaatttaatccctgcactttaacaagtgtggggatttttgtatttaaggaacaatctatgacgtggcgtagtattttaattagcaagagcggtaaactttctttgcagaaaaatcaaatgttgatacagcaagagagcaatgaatttactgtacctttggaagatattgcgattgtggtggtggaaagccgagagacggtcatcacgattccgctgttatcggcttttggtttatacggtattacgttgttaacttgtgatgaacagtttttaccttgcgggcagtggttgccgtttaatcagtatcatcggcaattaaaaacattaaagttacagctagaaactagcttaccgcagaaaaaacaactttggcaagcaatagtacaacagaaaattcgtaatcaagcgaaagttctagaaattcacaaatttaatgctgaatcgaaccgcttactaaaaatggcaaatcaagtgaaatccggcgataaaaataatttagaagcacaaagtgcggtcatttattttcaagttttgtttggtagaagtttcaaacgaatagaagatgaaaatgcgataaatagtgctctaaattatggttatagtgtgatgcgttcggccgttgcacgagcgttagttttgtatggttggctaccacaaatcggactatttcatcatagtgaattaaatgcgtttaatttggcggatgactttattgagccattccgtccattggtagacttgttggtgattcaactggcgaatgaagataaattatctataaacctatcacctatcctaaagcagcgtttaataaaagttctgaattatcaactattgtttaaacaagaaaaagtaaatacgttaaccgcaattgatagaatggttagcactctgcaagctgcattaattagtaaacaggctcatttgctaaaactaccggaaattctaccgcttgcggagcatcaatatgagtgagaatatttttatgcgtatgatagtattatttgatttaccggttactactaaggcaaaaatgcgagcagcaaatcaattccgccaatttttacttaaggatggataccaaatgctacaactatctatttacacaagaattgtaagaggaagagattcaatggaaaagcatcataaaagattggtcgcaaatttaccggaagaaggttcaattcgctgcattgctatcacagaaaagcaatttgctaatatggaaattttagttggagagaaaaaattacaagaaaaaaaggtcaattctaatcaacttctattgttttaaactattttttcttttgataaaaaagccttggacccttacagttcaaggctttttgtctctccattatagcactgcgaaatgaaaaagggagctacaacaaaacgacattatatcgcgcattactttcgattatagcactgcgaaatgaaaaagagtgacagattttaaaagtattcaaatagtaactaatttaatagttgatgaaaattttactcttcacatcaaaatcttttctacttattaaataaagtatcaaaaacagcctcattctcaaccgcacttttctctaaatcacaacgcaatctcatccaaagagcgtccaaaacttggcataaatacccgtaagaaataatccatttctttgctgtgccactgttgcataagggtttcaagtctggttttagcggttttaaattcttgattgccattatccagttcaaactgggctttaatataggcacaaatgaggtcggcttgtttgactagatgcctctcttcatccgaaaaagtttcgctgtctaagtaagaggcgaaatcttcttgtaactcttgagggagaaggctgattaaatggagttctgctgcactctcaatctgtttataggcttgggtaatttcagggttgaaatattttatgggggtcggtaaatcaccggtaaaaatttcagaagtatcatgatacatcgctatcacagcaatacgttccgaattaaccttgccaccaaaaaatttatttttgataatcgctaatgcctgtgccacaaatgcgacttgcaggctatgttctgcaagattttctttttcaatattacgcattagcgaccaacgttgaatcaaacgcaatcgatctaaacaggcaaaaaaatgactggttttaatttccatatcacctctaattagacggaagctcttccaccatcacagataaatcgaatacccgtcccagacgcatcactgtcaccgtcactcttgtattaggcttggtattagagataatttgcatcatttcacgggttgaaattccctcttgattattaagttttaaaataacatcacccacttgaatgcctgctttagatgctgggctattcggggtaacgcctgtaatcaaaattccttgttctgcactggaattaatctcactttgtacaccaaaatagcctcgaattacccgtccatcacgaataattttatgcaatacatcatttgcgatatccattggaatagcaaaattcaacccttcggctatttcggttgaggttttaccaatgctcaatgtactaataccgactaattcaccggcggaattaattaatgccccacctgaattaccacgattaattgaagcgtctgtttgaataaaattttgtcggccaagggaatcccccactgcacttcgccccacggcactaataatcccctgagaaacactttgtccaagattataaggattgccaatcgccagagccacatctcccacatgaacttggcgattcgcattttgtgggatagtggaaagattatcggcatgaattttcaacaccgcaagatccgtcaaattatcggaaccgatgaggtttgcttcataaatattgccattttggagagctacaacgatttgatccgcattttgaatcacgtgtttattagtgagaatatagccgtctttactcatgatcacgccagatcccaaattattcacttgcagttgatcattatcatcaatactggctgaagagaaagagcgattatacacatttaccactgcaggcgatgcaatacgtaccgcatttttaaaagaaacaatatcatcagaggtaaaaatgttgctgctatttattcttggcacagcaaagagaattattccggctgcagctaatccccaaagagcagaataaaaaagttttctaagcatttaagatccttttggtgcgtaaattaattttatgtcatcaccaatttgttgaattttgccaagttgccacagaggggcatcggctaattgtgttaaatgaggcaaactgcatagactacgagctttttcgcctaataatttcggggcaatataaaggatcaattcgtccactaatttttgttcaatcaagctaccggctaaattttttcctgcctcgctccaaagggtattaatttgacgtttgcctaattcaatcattaattcggataagagattctctttaggtaaaataatttgttcacaaaaatcgggaaaattcgccagatcacgcgcttcacttgataccaaccacaccggagcgtctgtttcaaataatttatggcttggctgaatacgatgttgcgaatctaaaataacacgcaccggctgacgtagcgtatctttcacatattcttttttgagatcattggaaaaatcttcccaacgtacatttaaactgggattatcggctaaaacagtggcagacgtggataaaagtgcggacgattttgcccgcattttttgcacatctacacgtgaggctactccggtaatccatttgctttctccgcttgccatggcagttttaccatcaagactcatggctaatttgagttggacaaaaggctttccttccctcatacgctttaaaaaacctttgttgagtttttccgcagaatcctttaataaattgaccgcactttcaatgcccgcttcagcaagcattttcaatcccttacccgccacttgtggattaggatcttccatcgcagcgataactttcaaaacccctgcttcaatcaaacctaatgcacaaggtggcgttcgtccataatgggagcaaggttccaaagtaacataagcagttgcgccttttgctttttcacccgcttgtgcaagagcaacccgttccgcatggggctgccccgccttaaaatggaaaccttcccccactatctcaccattcttaaccaaaacacagcccacggcaggattcggcgtggtggtataaacgccttttgccgctaaatccaaagctcgttgcataaattgatagtcttgagcggtaaattgatccgacataattaatcctttaggctttcaatttccttggtaaactggttgatattatcaaaactcaaatataccgaagcaaagcgaatataggctactttatctatttcttttaattcattcattgccaatttaccgactaattggctcggtacttcacgctctccggtagcacgtaattgcaaaataatatgactaatcgctttttccacatcatccgaacttaccgggcgcttttccaaagcatgctgaataccactacgaagcttatcttcattaaaaggctcccttgagccatcacttttaataattttaggtatgaccaattcggcagtttcaaacgtagtaaaacgctcgtgacaatgaccgcactcacggcggcggcgaacttgataaccatccgagactaatcggctatcaataacctttgtctcttcagtggaacaaaatgggcagtgcatagggtatcctcctaaaaatgggtacttatcttagcaaaaaaagtctattttgacgattcacttcactcctttattcaaggattttggatcattttttgcaaataatacgccaaaccaatctgttgtttgttttagcaataccagcaagttttcccgattttcaaatttcatagtttgcgctaacaaacgcgcccaataaggatccgctttttttttatagctgccccgtttctcatcttccgccaatttttgtagcatcgtcaaaattccatcaaaatcgaccgcactttcatcttttataataaaatccgatattttccctacggtaggaattggttgaatttccacctgactttgtaaataagcctgtacatagatttgcaattgtgccaatgcggtttcatatgatacttgaggaaattcaatcacttgatctttagtgattaatttgggcggtattgccgttttttgagtgatacattgaattaaataataaagccaagggcggatacgataacgatctttgtagctggcaaaatgccattcaatcacctgttgtgtatcattgaaaagattatccatataaccaaacaagcgaatagcctgttctttttcttgccaagtaacattcagcgtaaaatcaaccgaacgatgagccggctcgccgagatcaacaattttttccttaaattccagcacgatattacgggtattttccgctgccacccgcccaaattgagcacgaggtagcactccttttactgtggcttgtgcgaaatatttatcaaattgttgttcatctgcatataccaaatcattattgagcctatagttatccaatccgtccaaagtgaaattctcgctatcggcaatgcgctcatcttcatcacggaaatacacgccaagttgtttttcaaagaaaaattttacggggttttccacaaatcccactaaacgctccagctcaatttccgttatcttttcttgatgttccatcatcgaggcaaactcttttggctcagcctgcccaccattttttgccataggtaaccatttcgtggcaaaagagcggttgaaattatcctcatttttgaaattgctagggctgaatgccgtcattgcgtgctgttgaacctgtaacctctgctcatccctttgatttatgtagtcgagcagttgactcaccaatacggaaggttccctcgtttggttatcaataatggaacgcccgatatagctgatataacagtaatcacgtgcggcaagcagagcctcaaggaatagataacgatcatcatcacgacggacacggtcacctttttgatggtgatactgcatcaaatcaaaactgtttggcgtttgcgtacgcggataatccgcctcattcattcccagtaaacacaccactttgaaaggaacagcccgcatcggtagcaaagtacaaaaattcactttgcctgctaaaaatttcaagctattcggggattcttccagcttggtggtcattacatcggctatcacatccacttgcaaagacaaatcaaaatgaattgaggtgagctgctgtgtcacctcgttaattttctcttgaatataaaatagggtgtcattggtttgttcattttgtgcaaagaaatccgtcaaaagtgcggttaatatttcatgccatttttctattgagtgggcttgctggagcgttttatgccaatgagaaagaacagtgaaaaaacgtgacaatttccccgccaataagccttttaaaccatagctactatcaaaacctaggctatcttgccaaatcccatgctcttcacgcatcgcatagcctaataccatacgttctaaacctgcctgccatgaattgaaattaattccctcttggtttttctgcaaaccaaaacgaatgcccacatccgagatccattctcgtactaaaggtaaataggacagggagatatcaaaacattcacgcaatgcaggaatatctaagaaagtcagtatttcttctgcactaaaggcactttcttttaagcgtaataatgtcaaataacaggaaaccaacacatcactttccgataatttattatctgaaatggaaaaggggatcagaggtgtttcaccatttttctgaccgaaaaccgcttgaatataaggggtatattggttaatgtccgccaccatcactaccacgtctttcggcgtgagtgtcggatcttggttgaataaacgcaacagataatcttgcaacacttccacttcccgcatggcactatggcaggcatgtatggtcaaagagcgatcatttttttcaatgtttaagggctgattttctaaatgcaaaatatgagattgcaattgaccaagcaaggtcgaggctgaaatctcttcataagcattcactgagtaagtgggaatccgctcttcatcccgaatcaatgtataaaggaaatcacgccccatttttccccaagctgccaacaacgggttaccggtttgcaagtgttcattatgataagtggtttcgaccaatccttgctgcaaggcagtgcgttgttcttctgaaaagagcggttgaatttcagcgtttttttgatagtttcgacgtgtacggctagaaagatagtccatacgcaaatcacgaatatcaccccaatattcttggctgggattgttaaaaaagaggtgaatatctacttccgatgacatggcctgcaaaatagacagataggcagtcggtaatgccggaataccaaaaataaaaaggcggctgggcaattttttcgattgatttttattatttaataaagcaagaaattgctcgtgtaaagccgctcggtgagtagcattctcccccatatcggctttaatatccgaaactaaagcacgccacaataccccttgccatgctacattaccaagaatttgttgtaacaaagtttcatttaaatgagcctgttgcgtcttaatttgtgtgacaatgccctcgtcttctcctttttcccaagcaaaaatccattcgggacgataaaccaaatattggtcaaaaagatctgcgatcttgcggcttaattgataacatttgtattgttcggaatgaggcgaggaagccaaataatgacgcaacggagaaaactcttcccttcctaaaaaatcgggcataagcctcattaaacgccacatcattgaatctttatcaaaaggattttgcaacgaaaccgccggcagattatccgcataaagttgccaaataaaggttgccggcatgggaaaagccaaatgggcagaaacgccatttttctttgccaattccatctgtaaccattgtgccataccgggactttgcaccaagataatatcttgctgaaaagggtcctctcgcggaagagttttgaataattcagcaagaatatctttctgtttttcaagttggttggaatagtaaacaataaacacaatggcaacctatcaaaataagcaaaaataatgctgcattctacctgttttttactcatttttcagggaaaattccccctgaggagaacgaataactacctgattaccttgacattgtatttgaaaagctatgccattttgtttcacttgttgttcacaagataaacctaaaaattgccgctgcgcttgattctccgcaatctgtaatgcttgaaaatcatgataaattttcaccgcactttgacgttggctggccgtccaacgattaaacacaagaaacaatgtactaaacaccgtaagcgtaaacatcacggaagtcagcgatattcccttattcactagaggctttaaaatcactccaacttttctccgctaattgccattcactatattgttgcaccaagggctcaatgagctttttaccataggcgacagtaacaccttccaaggcaagacttccgcctgtaatcaccgccccgctcacccgcccgttaccacgcaatgttaaattcccttcagctactaaaatgccttgcactgtaccgttcacctcccattccgtttgtttctctgggaaccaatataactgtggtgtgttattcgttgctaagggataaggtggcgttgagaagtgcggtcgaaatctatcaagattttctaagtggataaaatgtgtcaacaagccttgattgtcgccttttgttggtgattttttgaatatcgcggtacgctgacaccacagcgaatactgaattgcatcttctactccttccagatttatagaaatctgccgaacatgatccgaattatccaaaggcaatgatgaacaagctttgtgtttctctaatgatgtcattctttgcaaagctaacgttcgttccacataatttttacgctgcatttgctgtgcacgaaaaaaactcaaggtactatcatcaaaaagcaagatcacccccaataatcctgaaagaaagatcaagattgtgagtgttaccacaccttttctccccttttgttgcattattgattccacaatgccaccaccattgatgtttcatattgaatagcaggatacctttttaaattaccggcaagctgaatttccactccgttcccttccgccaccgaattaaattgcaagtgagtaatttcatactcattttcatccaataaatccgtccaacctccgccggcattacaagcggtttgttgaagtgctttttgacattcatttgattgacacttagcattaaccgcacttttataagtttgtttcgtttcaatcattttgccattcaatttataaccaaaaagttctttttcaattcctttggctatattttgccgaccgtttaaacaagtgttttttgtatatttttcaccgatacaaccgttcccattgagatcgtaaaaaaataaggcacaactatttttgggtgcattatcagcttgtgaaataatcagtgctaaacctttttcatctaattcaaacaaagcaacattactttcaattaattgattatttaaagcacgaaaaccggcacgacgaagatctttaccgataagctgaatcgtacgttgcaattccgcctgaagtttcaatctcaagaaaatctgctgattctgaacctgtatattggtgtaaaaccgtgatatcagcagcaaaagtgcggctgaaattgctaatgaaatcattaacgccaataaggtttgcccttttttcattctattatctcgtacaagcactggcggattgatttggtttca

SEQ ID NO: 2712 - DNA, 21551 bp, synthetic construct
  source 1..21551: mol_type = other DNA
  misc_feature 1..21551: note = Synthetic
acgccatcgaaaaagaattgcgcgaaacctgcatccaaaaacgcctcgataccgaaatcctgccctttctcggttcggtgcaaaaccgcacgctgctcgaacacgtcatgaccgccttttccgttgcgaccgtctatcacgccgccgcctacaaacacgtccccatggtcgagttcaacaccgtcgaaggcatacgcaacaacatcttcggcacactcgagtgcgcgcttgccgccacggcatcgggcgtaagaaccttcgtcctcatctccaccgacaaagccgtccgccccaccaacaccatgggtgccggcaaacgcatggcggaactctgccttcaagcgctcgccgccgaacccggacaaaaaacccgcttcagcatggtgcgtttcggcaatgttttaggttcgtccggctccgttgtccctctgtttgaaaaacagattgccgaaggcggcccgcttaccctgacccaccctgaaatcacgcgctatttcatgaccatacccgaagccgcccaactcgtcatacaggcaggtgcgatgggtactggcggcgacgtattcgtcctcgatatgggcgaatccgtcaaaatcatcgaccttgcccgccaaatgattaccttaagcggcctcaaacccaaaacacccgaacaacccgacggcgacatcgaaatcctcattaccggactgcgtcccggcgaaaaactctacgaagagctgctcatcggcgacaacgtccgcaaaaccggccatccgcgcattatgacggctgacgaggcgatgctgccgtggcacgagctctctgtcctgctcgaccgcatccgtgcggcctgcgaccgttacgaccagcaggcaatccgcaccctgctcatcaacgccccgaccggctttaccccaagcgacggtatctgcgacctgctttgggtacgagaaacacacagaaaaaatgccgtctgaaccttcagacggcataacgtacaaaccaacctgcctgacacacacacggagtttgatatgcagttttcagcattcggcgaaaaattcacgcaacacagcggcatcctgcaactgatggacgacctcggcgacgcgctcaaaagcgacaagcccgtcaacatgctcggcggcggcaacccggcgcgcattccggaaatcgatcgggcgtttgccgacatattctccaaactggcggcagaacatgccgtcgaaaacatcggcaactactccaacccccaaggcgatgccgcgctgattgacgcgctggccgccttcctcaaccgcgaatacggctggaacctgaccgccgacaatatcgcgctgaccaacggttcgcaaaacgcgtttttctatttattcaacctcttcggcggcaaattcaacctttcagacggcacatccgcagaaaaagccattttgttgccgctcgcgcccgaatacatcggctatgccgacgtgcatgtcgaagggcagcacttcgtttccgtcaagcccaaaatcgaaaacgtcgaacacgaaggcgaagcaggcttcttcaaataccgcgtggactttgacgcactggaaaacctgcccgaactgaaagaaggcaaaatcggcgcgatttgctgttcgcgcccgaccaacccgaccggcaatgtgttgaccgacggcgaaatggcgcgtttggacgctttggcgcgtgaacacgggattccgctgattatcgacaacgcctacggaatgccgttccccaacatcatttacagcgacgtaacgctgaattggcatgaaaacatcatcctctgcttcagcctttccaaagtcggcctgccgggcgttcgcaccggcatcatcgtcgccgcgccggaagtggtcaaagccgtcagcagcctgaacgcgattgtgaaccttgcccccacgcgcttcggcgcggccatcgcaacgccgctgctggaaagcggcgagatgaaacggcttgccgacaacgtcatccggccgttttaccgcaatcaggcgcaaaccgccgtctcgctgctcaagcgcgagctgggcgcgtacccgatgaaaatccacaaacccgaaggcgcgattttcctgtggctctggtttgaaaacctgcccgtttcttcgcaaaccctgtacgaaatgctcaaagccgaaggtacgctgattattccgggcgagcatttcttcgtcggcatcgacacgcgggattacccgcacgcgggcgagtgcatccgcatgagcatcgcgcaggacgctcaaacgctggaaaaaggcattgccgccatcggtaaaaccgtccgaaaactgtacgacaacgtttaaaccgcaaaaaatgccgtctgaaaggttttcagacggcatttttatctgcattcaatatcgggaaaaatgcgcccacaccggcctgcagttttccggcagttcgggacacgcgccgagaatgccgccgctaaagtcgtttaaacggtggaagtcgctgcccgcgctggcgagcataccgaagcgttctgccaaaagcgcgtagttgaggcggtcgtttttgcagcagttgccgctgtggacttcgatgcctgcgccgccgaggtttttaaattcttcaaacagattgcgcttggcggtggcggacaaatcataacgcatcggatgggcgatgaccgccaacccgcccgcgccgttgacggcggagacgcagtcttccagcgtcgcccattcgtggcggacggcgcaggatttgccgtcgcccaagtatttggtgaacgcctgctgcttgtttttgacgtgtcccacccgaatgaggaactcggcgacgtgtgtgcggctgaccatttctttgtttgccgccagcgcgagcgcgccgtcgtatgcgcccgaaatgccgcgtttttccagcttggcggcgatggcttcgaggcgtttcagacggccttgccgcacttgcgccaacaggttttgcaggttttcgtcttgttcgtcaaagtctaagccgacaacgtgtatggtacgcccgcgccacgttacggagatttccacgccgttaatcaggcgcaaaccgagcctgtcggcttcggcacgcgcttcggcgatgccgccggtgtggtcgtggtcggtcaacgccagcagcgtgcagccgttttgatgcgcgaggcgcacaacttcggcgggggagagcataccgtcggaaacggtggaatggcagtgcaggtctatcataaggcgttatgtgcgtggtaaatggtgggcagggtgtttcaatattgtcgggcggtgtggcggcggtgatttcaaaaaacaggtgtatggcaaatgcaaaggaaaagccgctatgccgtcattccagcgcaggcgggaatccagactttgatttattggaaatgtttaaggttaaccgctatttcaaacttccggattcctgctttcgagggaatggcgatatgaccgttttcaattttaatctactataaaagactgtctgaaaacgtggttttatagtgaattaaatttaaaccggtacagcgttggctcgccttggctcaaagagaacgattctctaaggtgctgaagcaccaagtgaatcggttccgtactatttgtactgtctgcggctcgccgccttgtcctgatttttgttaattcactatatcaagccgaaccgttttcagacggcatcgtccgaccaacccgcttctttcaatttccgccgttgcgcgtcgtagcgggccttatccgcccaataaatcgtctgaatacacgcctcgccgcagtcgctgccgcagcattcccacgactcgggtcggacgggttcgtctaaaagcggctcgcccaaaagggcttcggctttatgcttcagggtcatatccatcggcgatttccaagcgcgcaccgtcaaactcgatgacttcgccgccgcgtattttggcggttttacgggtttcggtttcgccgttgcgcgacaccaacccttcggcaatcaacgccttcgcctgtccgccgctttcggcaagtccggccaatttcaagaggtcgcacagggcgatgtattcgttgtcttcgagatagacggtggcttccatgatgttcccttgcagaaagagcccgttattgtagcacctgccgccgccgtacccaaaattaccgcaaaaccagcgatgtatccgcaccgcctgttccgtaaaaatgccgtctgaaaccccgtatgccgccagccggtcaaagaaatcctgtccggcggcaggctgcaaatcctgttccccgacgaatccacattgacgctgatgcacctcctcaaacgcgaactgcccgatacaccagcaatcggcatcaaaacgaaatcaaaaacctgtttgaacgtaaaattaatttaactgcttgccatccgtccgaataaggtatatagttccttataactagtttgatagtcctttatatctatcaatactccttgggaagcctccgccatacggcaggaggcatttttttgccgtcgtaaaagttcaaaaaaccatttgcaggcaatgccgtctgaacccgaaacggcattacctacaccgccatctaaagacaaccctgctacaatacgccttttattgttcacgccgattttgccatgaccgagccgacctacatccccttgcgcctgcataccgagttctcaattaccgacggtatggtgcggattaaaaaactggttgccaaagcgcaggaatacggtttgcctgctttgggcatcagcgatttgatgaacgaattcggcttggtgaaattctataaagcctgccgcggcgcagggattaaacccatcggcgcggcggacgtgtggataggcaatccgaatgcgcccgacaagccgtttcgcgccatgctgattatccgcaacgatgcgggctatctgcgcttgagcgagcttctgacggcggcttatgtcggcaaagaccgcaatatccatcatgcggaactcaatcccgaatggctggaaaacggcgacaacagcggcttgatttgtttgagcggcgcacattacggcgaagtgggcgtgaatctgttgaacggcaatgaagacgcggcgcgtgcggcggcgttgaaatatgcggcatggtttcccgatgcgttttatttagagctgcaacgcctgcccgaacgccccgaatgggaggcttgcgtttccggcagcgtgaagctggcggaggaactgggtttgccggtggtggcgacccacccgacgcagtttatgagcagcgatgatttcaacgcgcacgaggcacgggtgtgtattgcgggcggctgggtgctgacggacaaaaaacgtccgcgcgatttcacaccgggccagtttttcattccgccggaaacgatgctggagcgtttcgccgatttgcccgaggccttggaaaacacggtagaaattgccaaacgctgcaatctgcacatcacattgggcaaaaacttcctgccccttttccccacgcccgacggtttatcgcgcgatgactatctcatcaaactctcaaacaagggcttgcaggaacgcatggttcagctttatcccgacgaggcggagcgtgcggcaaaaatgccggaatatcaggaacgtttggattttgagctgaacatcatcatccagatgaaattccccggctatttccttatcgtacaagactttatcaactgggcgaaaacgcacggctgtccggtcgggccgggacgcggttcgggcgcgggttcgctggtggcgtattcgctgaaaattaccgacctcgacccgctgaaatacgcgctgctgtttgaacgtttcttaaaccccgaacgcgtctccatgcccgacttcgacgttgacttctgtcaggcaaaccgcggccgcgtgatcgaatatgtgcgcgataaatacggcgctcaggcggtcagccagattgttaccttcggcacgatgtcgtccaaagcggtcatccgcgacgtggggcgcgtgttggagctgccgtttatgctgtgcgacaaactgtccaagctgattccgttggaagccaacaaacccctgagtttggacgacgcgatgaaggcggagccgcagattcaggaattaatcgaagcggaagaagcggacgaactgattacgctggcgaaaaagctggaagacctgacgcgcggtttgggtatgcacgcaggcggcgtgttgattgcgccgggcaagatttccgattacagccccgtgtatcaggcggatgaatccgcctctcccgtatccatgtacgacaagggcgacgtggaagacgtgggtttggtgaaattcgactttttaggtctgcgtaacctgaccattatcgaaatggcgcagaacaacatcaaaaacaccaccggcgacatcatcgatgtcggcaaaattccgctcgacgaccaagccgcctaccaaatcttccgagatgcgaacaccaccgccgtgttccagttcgagtcgaccggcatgaaaaaaatgctgaaaacggcgcacacgaccaagtttgaagaactgattgccttcgtatcgctctaccgccccggcccgatggacaacatccccgacttcgtcgcgcgcatgaaaggccaggaattccaatacatccatccgctgctcgaaggcatcctcgcgccgacctacgggattatggtgtatcaggaacaagtgatgcaggcggcgcaaattatcggcggctactcgctcggcggcgcggacctgctgcgccgcgcgatgggtaagaaaaagcccgaagaaatggtgaaacaccgcgaaatctttgccgaaggcgcggcaaaacaaggcatttcgcgcgaaaaatccgacgaaatcttcaactacatggaaaaattcgccggctacggtttcaacaaatcccacgccgccgcctacgccctgatttcctaccagaccgcatggcttaaagcccactatcccgccgaatttatggcggcgaccatgtcgtccgaattggacaacaccgaccagctcaagcatttctacgacgactgccgcgccaacggcattgagttcctgccgcccgacatcaacgaatccgactaccgcttcacgccgtatccggacatgaaaatccgctacgcgctcggcgcgattaaaggcacgggcgaagccgccgtcgaatccatcaccgccgcgcggcaaagcggcggcaagtttaccggcctcttggacttctgcgagcgcgtcggcaaagaacacatgaaccgccgcaccctcgaagccttgatacgcggcggcgcgttcgacagcatcgaacccaaccgcgccatgctcttggcaaacatcgacctcgccatgaacaacgccgaccaaaaagccgccaacaccaatcagggcggacttttcgacatgatggaagacgccatcgaaccggtgcggctcatcgacgcgccgatgtggagcgaatcggaaaaactcgccgaagaaaaaaccgtcatcggcttttacctctccggccacccgttcggcccgtatgcccaagaagtccgccaaatcgcaccgaccaaattaggccgtctgaagccgcaagacagcgtgcgcctcgccggattcgttaccgccgtacgcaccatgatgggcaaacgcggcaaaatcgccttcgtcagcctcgaagatttgagcggacaggttgaaatcatggtcggcggtcagacgttggaaaactgcgccgactgcctcaaagccgaccaagtgctgattatcgaatccaaagtcagccgcgacgactacggcggcggcgacggactgcgtattctggcaaaccaagtcatgaccctgcaaacggcgcgcgaacgctacgcccgcagcctcagcctcgccctcgccccgcatcacgacatcggcggactggtacaactgctcgccgcccaccaactgcccgacacgccgcgcatcccgctgcaactgtcgtatgccaacggaaaagcgtcgggcaggcttcaagtgccgccgaaatggacggttacgccgagttccgcattgttcggcgaactggaaacattgctcggcagccggtcggtgcgcgtgaattggtaacccaaaatataaatgccgtctgaagcccaaaaaccggtttcagacggcattttttaactgaaataaacgatgccccttaaagcagaagctttaaggggcagagcgttgcggcacatcttttcagacggccttattgtagcaacggttctcatttcgcagtgcgacaatatgtttgggattctagccgttgtgagatgataagtcaataatctatttgtatataaataagacaatcagatatattatcattatttgcaacgttgtttacggagtaataaatggctgccttcaaacctaattcaatcaactacatcctcggcctcgatatcggcatcgcatccgtcggctgggcgatggtagaaattgacgaagaagaaaaccccatccgcctgattgatttgggcgtgcgcgtatttgagcgtgccgaagtaccgaaaacaggcgactcccttgccatggcaaggcgtttggcgcgcagtgtccgccgcctgacccgccgtcgcgcccaccgcctgcttcgggcccgccgcctattgaaacgcgaaggcgtattacaagccgctgattttgacgaaaacggcttgatcaaatccttaccgaatacaccatggcaacttcgcgcagccgcattagaccgcaaactgacgcctttagagtggtcggcagtcttgttgcatttaatcaaacaccgcggttatttgtcgcaaagaaaaaacgagggcgaaactgccgataaagagcttggcgctttgctcaaaggcgtagccgacaatgcccatgccttacagacaggcgatttccgcacaccggccgaattggctttaaataaatttgagaaagaatgcggccatatccgcaaccaacgcggcgattattcgcatacgttcagccgcaaagatttgcaggcggagctgaatttactgtttgaaaaacaaaaagaattcggcaatccgcatgtttcaggcggccttaaagaaggtattgaaaccctactgatgacgcaacgccctgccctgtccggcgatgccgttcaaaaaatgttggggcattgcaccttcgaaccggcagagccgaaagccgctaaaaacacctacacagccgaacgtttcatctggctgaccaagctgaacaacctgcgtattttagagcaaggcagcgagcggccattgaccgataccgaacgcgccacgcttatggacgagccatacagaaaatccaaactgacttacgcacaagcccgtaagctgctgagtttagaagataccgcctttttcaaaggcttgcgctatggtaaagacaatgccgaagcctcaacattgatggaaatgaaggcctaccataccatcagccgtgcactggaaaaagaaggattgaaagacaaaaaatccccattaaacctttctcccgaattacaagacgaaatcggcacggcattctccctgttcaaaaccgatgaagacattacaggccgtctgaaagaccgtatacagcccgaaatcttagaagcgctgttgaaacacatcagcttcgataagttcgtccaaatttccttgaaagcattgcgccgaattgtgcctctaatggaacaaggcaaacgttacgatgaagcctgcgccgaaatctacggagaccattacggcaagaagaatacggaagaaaagatttatctgccgccgattcccgccgacgaaatccgcaaccccgtcgtcttgcgcgccttatctcaagcacgtaaggtcattaacggcgtggtacgccgttacggctccccagctcgtatccatattgaaactgcaagggaagtaggtaaatcgtttaaagaccgcaaagaaattgagaaacgccaagaagaaaaccgcaaagaccgggaaaagccgccgccaaattccgagagtatttccccaattttgtcggagaacccaaatccaaagatattctgaaactgcgcctgtacgagcaacaacacggcaaatgcctgtattcgggcaaagaaatcaacttaggccgtctgaacgaaaaaggctatgtcgaaatcgaccatgccctgccgttctcgcgcacatgggacgacagtttcaacaataaagtactggtattgggcagcgaaaaccaaaacaaaggcaatcaaaccccttacgaatacttcaacggcaaagacaacagccgcgaatggcaggaatttaaagcgcgtgtcgaaaccagccgtttcccgcgcagtaaaaaacaacggattctgctgcaaaaattcgatgaagacggctttaaagaacgcaatctgaacgacacgcgctacgtcaaccgtttcctgtgtcaatttgttgccgaccgtatgcggctgacaggtaaaggcaagaaacgtgtctttgcatccaacggacaaattaccaatctgttgcgcggcttttggggattgcgcaaagtgcgtgcggaaaacgaccgccatcacgccttggacgccgtcgtcgttgcctgctcgaccgttgccatgcagcagaaaattacccgttttgtacgctataaagagatgaacgcgtttgacggtaaaaccatagacaaagaaacaggagaagtgctgcatcaaaaaacacacttcccacaaccttgggaatttttcgcacaagaagtcatgattcgcgtcttcggcaaaccggacggcaaacccgaattcgaagaagccgataccctagaaaaactgcgcacgttgcttgccgaaaaattatcatctcgccccgaagccgtacacgaatacgttacgccactgtttgtttcacgcgcgcccaatcggaagatgagcgggcaagggcatatggagaccgtcaaatccgccaaacgactggacgaaggcgtcagcgtgttgcgcgtaccgctgacacagttaaaactgaaagacttggaaaaaatggtcaatcgggagcgcgaacctaagctatacgaagcactgaaagcacggctggaagcacataaagacgatcctgccaaagcctttgccgagccgttttacaaatacgataaagcaggcaaccgcacccaacaggtaaaagccgtacgcgtagagcaagtacagaaaaccggcgtatgggtgcgcaaccataacggtattgccgacaacgcaaccatggtgcgcgtagatgtgtttgagaaaggcgacaagtattatctggtaccgatttacagttggcaggtagcgaaagggattttgccggatagggctgttgtacaaggaaaagatgaagaagattggcaacttattgatgatagtttcaactttaaattctcattacaccctaatgatttagtcgaggttataacaaaaaaagctagaatgtttggttactttgccagctgccatcgaggcacaggtaatatcaatatacgcattcatgatcttgatcataaaattggcaaaaatggaatactggaaggtatcggcgtcaaaaccgccctttcattccaaaaataccaaattgacgaactgggcaaagaaatcagaccatgccgtctgaaaaaacgcccacctgtccgttaaattaatctgtccctgcttcagacggcctgaagcagggattttttatatcaaaataaggggaaaacatgacttggcgcagcctacttattcaaaacggcggcaaactatccttgcaacgccggcaactgctgattcaacaaaacggcgagtcccataccgtaccattagaagacatcgccgttatcatcatcgaaaatcgcgaaaccctgattaccgccccgctcctatcagccttagctgaacatggcgcaaccctgctgacctgcgacgagcagttcctgccctgcggacaatggctgccttatgcccaatatcaccgccaacttaaaatcctcaaactgcaactgaacataagcgaacccttaaaaaagcaactctggcaacatatcgtccgccaaaaaatcctgaaccaagcatttgtcgcagacgaaacaggcaatgatcttgcagccaaacggctgcgcactttggcatctgaagtccgttcaggcgatacaggaaaccgtgaagcccaagctgccgccctctactttcaagccctctttggagaaaaatttacccgtaatgacaacaacgccgtcaatgccgcattgaactacacctacgccgtactccgtgccgcagttgcacgcgccctgaccttatacggttggttacctgcattaggcttgtttcatagaagtgaactcaatccatttaatctcgccgatgactttatcgaacccttacgcccattggccgacctgaccgtgatacatttgtacgaacaaggctgtctgaaaactgaactgacgctcgacatcaaacaacacctcatcaaaatcctctactatcaaaccagcatcgaacggcaacatttcagcaccttggctgccatcgacaaaatgatttcgtcatttcaagccggcgtaaccgataaaaacgccaaacaactgaaactgcctgaaatcctaccattgaaagaataccaatatgagtgaggccaaatttatgaggattatcgtcttcttcgacctaccggttatcacggcggcaaagcgcaaagccgccaatcaattccgccagtttttattaaaagacggataccaaatgctgcaactttccgtatacagccgtatcgtcaaaggccgcgattcgttgcaaaaacaccacaatagactatgtgcaaaccttccgcaagaaggctcaatccgctgtttggagacaacagaaaagcaatatgccgccatgaaactgctgttgggcgagctgaaaacccaagaaaaaaaggtcaattcagaccaattattgttattttaagcccattttttcataacaaataaaacgggaaacccttatgaaataaggatttcccgtcgaagtattgtagcactgcgaaatgagaaagggagctacaactacttaatacatactcactttcaatcgttaattgtagcactgcgaaatgagaaagggagctacaaccattgatgcgtaaactcgccgttattgcgtattgtagcactgcgaaatgagaaagggagctacaacacgcacccccagcacagttatcatcttctgattgtagtactgcgaaatgagaaagggagctacaacactaaaataatataaattaaaactttggaaattgtagcactgcgaaatgagaaagggagctacaacgatgggaacttagttcttaaatctttctcaattgtagcactgcgaaatgagaaagggagctacaacatctgcggacgcgcattgtcgggcagcaaaattgtagcactgcgaaatgagaaagggagctacaacacgccatcgaattcatagacgaactcccacattgtagcactgcgaaatgagaaagggagctacaactgtatagaaaaaatcaaaatcaaaaatttaattgtagcactgcgaaatgagaaagggagctacaactatatgccgaagccattactgaagtgaaagattgtagcactgcgaaatgagaaagggagctacaacgatgggaacttagttcttaaatctttctcaattgtagcactgcgaaatgagaaagggagctacaacgaagctgctgactatgaaaatgatttgcttattgtagcactgcgaaatgagaaagggagctacaactcgtgcaggattcggttttccacctcccaaattgtagcactgcgaaatgagaaagggagctacaactcggtcaggtcatagacggctttgttgtcgattgtagcactgcgaaatgagaaagggagctacaactcaaaccttcgttgtaaagtcggtctgattattgtagcactgcgaaatgagaaagggagctacaactgacggctttgcccgtgccgcccaaatgctattgtagcactgcgaaatgagaaagggagctacaaccaagaagtccgccagttcgtgtagtgacggattgtagcactgcgaaatgagaaagggagctacaaccttaacgccatacaaatagtgtcaatgctcattgtagcactgcgaaatgagaaagggagctacaacaccgaaaaggcacgccgtatgccatccgccattgtagcactgcgaaatgagaaagggagctacaaccgagtaagtcaggcagcttttataatagaaattgtagcactgcgaaatgagaatgggcgctacaaccagccgttgcgataagcgaacgtgcgttaaagtcattgagacacagtgcaattatggcaagaaaggcgacagatattgtgtcacagatttgaaataagaaaaaaccgcccactcacagagtaggcggaaaacttgcgtttttttgattgtggtcgggttagctactgcattgacttaacagcaaagcaatcgctaaaatgaacttgtggttcacttcaacggacagcagcaactttttcccacgcataaggaatttaagcattttagcttctcctagtgaagttaatcacacaggcgagagccgaacaaaaatccccgttgcagcggggatttttgctgttccctgtttgatgattaaactaaaatcttgcaaaatgtatggttcattttcagcatagcgaaaagaaacattttctatttgaatatcaaagtgttctaaattttcaggcagcctgaaatcattgttctgctcgttttctgtttcttctagcacaatatccgccaaacgttcagcgtgcaatcctagcattttgatttgcacaaactggtcaatcaatgaccctgctttactctcaaactgacttttgtaggacataaacgccattaacgccccaacggtaaaaacaccgtccaacacagaaattgcaccaacaaatccattaagcggcgtaatacattagctttccattgaatattcaaagaggtagataagtacatacccgcccaagtttgtaacaatgataccaactgctgcacaatcatcaacaagccaaaacccaatgccaatgtcagcaataaatcacggtctgccgatacaatggcatggtctattacccattgcataaaaaaagggcttgccaaagcaaatacctgtaatacagtagccaacggtaaaagctgaaataaagatctttttaatcccaccactccgcgcaacatcggtagtacacgaattttacgcgtttcgtgtttctcttcaaattgcgtgttaggaaatagttccaatgctacacctgtaaaacagcgcgagacttcttccatacgcactttttgccaacccgaagcagggttcataatcataatgtgattgcgatgaacttcatgcaacaccacaaaatgatttaaatcccaatgcaaaatacagggtacgcgcaaatttgctaactcatctaaatccaaccgaacagcccgagcggttaaattcatgctattagcaaaccgtaccaaatccgccaatgttgcgcctttaagcgacaaagaaaaacgcgcccttaaatggcgcaaatccgtataaaaaccatgaaaccccaacaccgataccaaacacgctaatccacattcggctgcttccgtttgcaaaataacgggcaaacggcgcgagaaactgaatgataggcgagagagatatgttggcattagagttcctattttattttttatttaaaaaaaattattattaccgataataatactgataataaaaaaataaaactattttcatttgattacgacttaatggaggctgatgtattaatccgtaatgtacagataagccaaccaaaaaaatcaaaacaagaaagaaagccatgagtacttggtaaggattcatcaatgctattcctataattttgtttaataccctgttccatcaccgtaatcattacctgatcgatcattatccaaaatgctttcaatacctcgtccgatcacaccaccaatggcagatccagctcctgccccaattacagaaccaaccttaccaccatattgttgtccagctgcaacaccaactatagtaccacctggaccaaatggagagcctagaattcccccgatggttccaccacctgctttccctgcaatatatccagcaccaccaccaatagcacctcccactcctgtagtgaaatcagcaatgggaccagcaccactaactaattcaagttctacaatagagagttcatacatttttatttacctcaaaataaaatttaataataaaaaagaaatgagttagacagaatagtatcactataaaaatgatagaataaatattcatattaaaataaaaattttcctgtctaaatagagttattaaggcaatatacaaaataaccataaaataaaaagtaaatatttttacaaattctattttattttgatttttatttattcctcgtgcaaaaattaccattttataaatcaaaagcaatgttgaaattataaacgaaaatgctattaatatagaaatatgatttacaaaaggtatagttgataaattaaatctaactttactgtatataatgtatacgttcaataaaataaatgatattgaggatatattgattaaaatttttgtgttatttaataaaacacccattgattacctcacgatttcaataacatctaataaacataactccctaactaatttcttaatattttcttgttcatcaacactaaacaacgataatattcagctagggatatcatgtaaagcaagaaagaaagccatgagtacttggtaagcattcatcaatgctattcctataattttgtttaataccctgttccatcgccataatcattaccagatgcatcattaaaattttggtctagtcctgttaatttatcaactcctgaacttaaccaatcgcctaatggcgtttcatgatataaataagtacctgtattccagcctgctatgcctgccaaaccaattaatccacctcgagcagcacttcttgctatcatatccccagttgcagtagctgaaacagctctccatccacctgtcgctgcactagttacaccaataacatcaagagaactaaaatactttggttccgaaccacctgaaactatttccaggtcagaaatatttaattctttcattgctttccctttttaacaatcttatttttcaatatgattgaatagtacgctcatgccaataccaatcataatactaaatactatattaatgtaatctccgtcataattaggatgaagacgccaccctcctaattctgataatttcataaaaatatatattacaacagaatatccaattgcatgtaaaaatgttttcatatattttatatcctaaaatattaaatccatctcatcttataatttcaattatatctaactctcctagctgccaaactaatttattaatactttcttgttcgttagtattaaataacgataacatttcagttaaggggattatgtgtttattaactaaaatcgttaaaaatttcatactgatttcatcaatatttactttaatgccattcgcaataaagtatccttgtgaaagagttgagcaatcattactatttaatcttaaaaagcaatgctcaggtaatgtctgattatgagcatttccaaacaaatccatattgaatgctgtattggtgcgctgatttcccaaaaaatcttgcataaatgcttgataattttttgggttattcatcatttcagtaactgcttgagctgaatcatctagattttttttggtcatgttcccagcctatgaaattttgacgaatactctgaatatcaggtatttttttcatcaaccattccatatagttataaccgtttggtggaaatgtaccaatagctaaatggaatgtttcacaattcattggcataggattatgccaccaaccacgtggaatatatagaatatctcctgcttctaaaatgacttccatatccactgttttaggtggagtaatgtgcggcatatcttttgcttgctgcatatacaacggcatatcaaaatttggggcagaaattgtccaatgttttttgccaatcaattgtactgcaaatacatctcgagtatcccaatgattacgatatgatgatgagctaccaaaagctaaataaccactaacaacagtttatgcttgagcaaactgagcaatttgtttagcaatactatcaacaaatggctcattatcaatacggttataaaccattgtcgcgccatcttgcaaatactgatacacggctgttttattaaatcgatgacgtatcctacccacatcattgaatgattcaacataggcttcttttggaattatttccccttttcggaacttaaattgccaatcagtagggtctgcacgttgatacaattcattgatttctttccacgaaatacaacttacatctaaagattttttaaaaataaatggctttttatataaataattttcatggaaatatttgcgttccattgaaaagttaataagcacaaataatccttgttattaataatgattttgagtataaaaataaaatattagaacgtcaaatttcgttaagtatgtttaatttttttgaaaagtaccacaaatttaagccacaattactctcctaaaatttttcaagatattaaagtttttccaagtcatcggccgttaatttaaacattctcatcacaagttccatttatttaatggcatcatcattcatcatgcttttaaaatctatatacataatcagttgtttataaacatattcgttccagtcgttaccgaaaaaaattgtgcctttttcttttggtacttcctgctcaatatcttcttctgtgtactgaatgggtaaatctacacgttttctagccctttttgcgcgttcttcttgttgaaaataattataaaaattttttacaaatcgcgcatcaatatgaaccgtaccttgctgccgtgccgtttggaaaatttgcttgaatgtgccttttcccacttgctcaaatatctcattgatgacattttcttgctgtttgggagacaatacttcaaactgctcaatcaaaaattttctttgttcttcaagcttttgcttttctttttcttttctagcttgttctgcctgttcttcggcttttttccgctcacgttccgctttttcaattttggctttctcttgctgtttagccaaaatatccagctcccaacgttcggcaatggcttttttcgtgatgttggaacggtagaagtcgctaattagctcgcctttctgttcttgccgtttgatgtatagtggattaaattcaaaccagtacggcgttgcctcgccttagctcaaagagaacgattctctaaggtgctgaagcaccaagtgaatcggttccgtactgtttgtactgtctgcggcttcgtcgccttgtcctgatttttgttaatccactataatcatcaattcgggcttgaatggctttgcactcaacatctgaaaaatcggcgaacaaatcaagctcgggcgcaacttttggcagttcaggaactttttcaggctactgctgttgctttctcgtgaattcaaagcgaaaaccagtaataacgcgcccattttttctttgttcgtaagtagcggttaaatcagttttcttattgatttcattgatagaataatcaataaccctagttttaaaatttcctattcttgcatattcattaggaagtagaccaaaacgaaaacgcaaatcaacaagggaaacttcaagccagccttttcctgtttgtttatcaaagtactgcataaaaaactcgtacaagcgcatagcataaccactagacaactgtgcgacttgctcaatttcgtacacggtaaaccgtttttctatctccattaaaaaaagaatgattaaggaatgattgcagttgaaaaagtaaatcgtacaagtccttcattcctaacatattatgctgattgagtaaattcttcataacgaacagcaatattactttttcattgatgtactgataaccccattttgcttcaaataatcccatgactgcattttttaggcttccataggcagtgtgtttttctaccttgaaagtgtttatgtaatcatctgcacaaatagttagctctttatctattgtatagtggattaacaaaaatcaggacaaggcgacgaagccgcagacagtacagatagtacggaaccgattcacttggtgcttcagcaccttagagaatcgttctctttgagctaaggcgaggcaacgacgtactggtttttgttaatccactatattttccgatgcaaaacaaagcagtcatatatttaattccccctacctctgccaagccttcctcaaatattcgacgcaatcggtcagcgagtagaacgagacattgccgtggtcggcattcggatattcccggaaaaagacggcggccccgtgcctgtccaactctgccgccatgcgttcggacagtcctgccatatcgcgttcttccctgcgtttgcaaccgctaccccgttcgagcgcgccgatgttgaggcagacatcgatgccgtttagccggttttcagacggcataaaatcgagtatccgcctgttgtgccaccaaatcgatggggatacgagccaatgccgtctgaaacggcggtgggaaagcagggaatacagtccgaacagtgcgccgaacgagtgtccgaatacggcggtttcattgcggttgagggtgtagcggctttctaaaaaggcggtcagctcgctgtcgataaaggcggagaagcggtctgcctgtccgaactgctgccgttcgtctgctgtggcgttgtctccaagcggcggcgtgtagtcggcggcacgttgtgccaaatcgcgcacactgcctgtcgtgtagccgataccgacaatcaggcagggggcgttgcttcgggtaacggggttgggcatcagcgactgcatgatgttgaaaagtgcggggaaaaaggcttcgccgtccaaaacgaagaggacgggatagccttcagacggcatttcgccgagtgtcgccgtctgaatccgatagattcgccccgtgcaggtggatttgatttcggtttcaaaggcttggggcagtatggcaggttggaatgtgtcggtcggtatgggtttcatgatgttcggcttgtgggtcagactggcggcaagcggtaaaaccgaaccggcaaagcggtctgcctgccggttcggtctgttttccttcgcaatgccatactccagttgtgagagcatagggtatgcagcgcagcttgttgtagtttgatgatgctgcggctgccgtttcagacggcatattggtctttaaaaactgtaacgcaggtttgccgtcaggctgcgctccgaaccgggaatgttaaaggtgttcgcgccgccgacgcgggcgtagtaatggcggttgaagatgttgtcggcgttgatttgcagcttcagcttgggcgtgaagcggtatgccgccatcgcatcgaacgtggcataaccgcctgcatgcatccctgcagatgaagtaatgccgctcatcgcgttcactccgccgccgatgg

SEQ ID NO: 2713 - DNA, 21521 bp, synthetic construct
  misc_feature 1..21521: note = Synthetic
  source 1..21521: mol_type = other DNA
aatgctacacctgagctagcaaaaaagatttctgaacgtctttacatttcattaggcgatgccactgttggacgctttagcgatggtgaaatccaagtgcaaattaatgaaaatgtgcgtggtgcagacgtgtttattattcaatccacttgtgcaccaacgaatgacaacctgatggaattaattgtaatggttgatgctttacgtcgtgcatctgccggccgtattactgccgttgttccttattttggttatgctcgtcaagatcgtcgtgtgcgttctgctcgtgttccaatcacagcaaaagtggtagcagatttactttcaactgtagggattgaccgcgtattaacttgtgacttacacgcagagcaaatccaaggtttctttgatgtaccggttgataacgtattcggttcacctgttttacttgatgacatcttgaagaaaacggatcttgtcaatcctatcgttgtttctccagatatcggtggtgttgttcgtgctcgtgcagttgcgaaattattaaatgatacagagatggcgattatcgataaacgtcgtccacgagcaaacgtatcacaagttatgcatattatcggggatgttgcagatcgtgattgtatccttgtggatgacatgattgatacaggtggtacattatgtaaagcggctgaagcattaaaagaacgtggtgcaaaacgcgtatttgcttacgcaactcacgccgtattctctggcgcagctgcacaacatttagcgagcgatgccattgatgaaatcgtggtaacggatactgtgccactttcacctgaaatgaaagcacttggtaaagtacgcgtgctgactctttcaactatgcttgctgaagcaattcgtcgtatcagcaatgaagaatctatttcagcaatgtttgaataattctttcgcttagtattcattttaaaagtgcggtcagaaaatccaatgtttttttgaccgcacttttttatgcttcaactaaaaataaggcaaaaaaaagtgccccactggggcactactcggaaagcaaaatagatgtcggctatttaaaaatagcacttgtttttagtgatttaagaatacggcaaagtcctttatattgcaaatagcaatgttcaaatttgtgagctaaatcacgctttttcttcacttttttatgtttaatcgttttcctataaaaaaagaggagcatacagctcctcttctctagaaatagaattaaattaaccgttaataaatttttcgcctaattcaatatctgcacgcaatgttggtaacattgcttctaaagcgtcttgttcaaatttgcttaaggtaccgattggtaaaatttcttctacaccttctttacctaaacgtactggttgagcgaagaaacgtgcatatttaccatcaccttctacataagtacattcaaccacagtttcgccacttaagcctttcactaatgaacgcgcaaaacgtgctgcagcttgagccatagaaagtgtcgcagaaccgccacctgcttttgcttcaaccacttcagtacctgcattttggatacgttttgttaatggtgcaatttcctcttctttccactcagcatattgaacttgtgaaagtaatggaagaatagttacacctgagtgtccaccaataactggtacgcttgtacgagaaacatttaagccttttaattcagatacgaatgtttcagaacgtaatacgtctaaagtggtgacaccgaataatttacgtttgtcataaacacccgcttttttcaatacttctgcagcaatcgcaacagtcgtgttcacagggttggtaataatacctacacaagcttttggacaagtttttgcaatatgttcaattaagttacgcacgatacccgcattgatattgaaaagatctgaacgatccatacctggtttacgtgctacccctgcagaaattaaaacgacatcagcacctttaagtgcaggtgttggatcttctcccgcaaaaccttccactttcaccgctgttgggatatgactcacatctttagccacaccaggtgtcactggtgcaatatcgtaaagcgataattcactttcagcgggtaattgtaatttaagtaataaggctaatgcttgaccaataccgcctgctgcgcctaatactgcaactttcataaaatactcctcatgtattaattaatcctaactaggtagaattttaaagtcttagtcattaaattacaaacagagaaattcaataatgcgatctagctcaaacttttcaaactgtaaatttattttaattgcttaaaatgaatttttatgcaattcttatgcagattcccctatacgagaataactatgtcagatcaattaacaaaagcatttaaagaactgctccatcaagaacgatttgcttctcagagtgaaattgttgacgccttaaaaaaccaaggatttcaaagtattaaccagtctaaagtttcacgaatgctaagtaaatttggtgcagttcgtgcgagaaatacgaaaatggaaatggtgtattgcttaccaagtgaattaagtgtacccgccaccagcagtccattaaaaaatctggttttggatattgatcacaatgatttcgttatcgtcattaaaacctctccgggtgctgcacagttgattgcccgcttattggattccataggtaaacctgaaggtattttaggcacgattgcaggagatgacaccatttttgtgacaccaacaaaaggcgctacaattaaatcgcttttagaacaaattcaaacgctctttgaaagcaatctataatgaatatcttagtaaccggtggaaccggatttgttggtaaacccttagttgaggcgctactttcacgtggcgatagcattaccgtattaactcgctcgattgaaaaagcccaagctgtttttcctgaaaaaacaccgaaatttttgaccgcactttccacactcaaagacttaaatgaatttgatgcggtcattaatcttgccggtgagccaatcttcgataaaagatggacaattcaacaaaaagagaaactgcgtcacagtcgcgttgatttaacccaacagattgttaaactcattaaccaaagtgagcatccgcctttcttgatttcaggctcagcaaccggaatttatggagacggtggcgaagatgtactcaccgaaaattcgtatccaagtagtcaatttaccgcacaactttgtattaattgggaaaatgcagccaaacaagccaacacaagagtttgtctagtcagaacgggattagtgctttctccaaaaggcggcgcttttgcaaaaatccttccgctctatcgcttcggattaggcggcaaattagggaatggcgagcaatattggagctggatcgcattagaagatatggtaaaaggacttctcttcttacttgaccataatgattgtaaaggtgcatttaattttactgcgccacatcctgttaaaaacaagacattcaaccaactattaggtcaagcattacatcgcccttgttttgctcaagtacctcaatttttactcacctctcttctcggtgaacgcgcttgcattatattagacagtcagaatgcctatccaaaacatttgttagattgcggatttacattccaatactcagaattaagggattactttcacaaaatactttaaaaacaaaaggctggtcaaaaccagcctttattatatccattaagccaaatattctaaaaattcccctacggtgtggaaagatccaaataccagcacaatgtcatttttatctacatttttaaccgcactttgtacacctttagctacagaatcttcagaaacactttttgctgatgggcaaactgtttttaattttgcatttaggtcatcgccagattgaccacggtaaccacctaatgtgacacaataccattggtcaataacagaagtaagttgagtaaataccgactccgcatctttatctttcagcataccgcaaactgcaatgatacgacctgaaatctgtgctttaagtgaagtcaattttttggctaaatattttgctgcatgagggttatgccccacatcgatgatcacttttggcaactgtgaataagggacattcaagcggactgccagtttttctaactgattgcctttcaattgttgaaagcgccccactaattccacttcaattaatgaacgtttaatggtctcgacagaaatatcaaaaggtaattgctcaacagccgccaaagcggttgctgcattggctaatggaatttggcaaaacggcaaattttctaaccgcactttgttgctctgccacatccaagtttgctcattggctttaaacgaccaattaacatctcggcgtgaaacgtagcaatgtaattcctccgcttgttctaacataggttgcggaacattgggctcgccaatcacaaccggtttgtttgcacggaaaatacctgctttttcaaagctaatttcttcacgtgttgaacctagaaaatccgtatgatcaatatcaatactggtgataacggccagatcattatcgacaatattggttgcgtccaaacgcccaccaagccctacctcaagaatcacaacatcaagtttcgcttgtttgaataaatgcaaagccgacaacgtgctaaattcaaaataagtaagagactgagttttatgattttcgataaaatcaaaagaagcggtatgcatttcatccggcaagtcttgattttgaatacgaatacgttcgttataacgtaataaatggggggaagaatacacacccacacgcaagccgtgatttaacaaaatggtttcaagcaaacggcaagtcgtgcctttaccatttgtgccccctaccgtgatcacataagacgtgggattcaaaagatccaattcttctgccactgacttaatacgctctagccccaaatcaatcgctttgaagtgactgttttccaaataagaaagccactcagcgagtggcgaagtggcttttaaattcattgtattaggcattttcaacaacttctacttcaacaaaaggtgaaggttgattggtgagtttgcttaaaaggtttccaagggttgaacgcatttctgaacgtttcacgatcatatcaatcgcccctttctcaagtaagaattcactacgttggaagccttccggtaatttctcacgtacggtttgttcgataacacgtgggcctgcaaaaccgattaatgcttttggctcagcaatgtttacatcacctaacatggcaaaacttgcagataccccacctaatgttgggtcggttaataccgaaataaacggcacgcctttttcacgcatttttgctaacaccgcgctggttttcgccatttgcattaaggagaaaagggcttcttgcatacgtgcaccgccacttgcagagaaacaaacgaatggacaatttaattccattgctttttctgccgcttttacaaattttgctcctacaaccgagcccattgaaccgcccatgaagctaaaatttgaagccgcaacaacaataggcatattgtaaagtgtaccggtcattgtgattaacgcatctttttcgcccgtttctttttgagcagcagaaatacgatctttatatttttttaaatctttaaatttaagaatatcttttggttctaaatcagccgatagttcttggcttgaaccttcatctaataaggctaaaaggcgctcacgagcatcaatacgcatatgatgaccgcattttggacaaacatataaattacgttttacttcttcaccgtaaagaacttgttcacaagaggtacattttgtccaaaccccttctggtacgttagctttacgtgatgcagaggaagaggttcctttgctaaaaattctatcaatccagctcattttttaccttttttattaactagaaaagtttgcgtatttaatcataatttagcgaaatttgctagtcagatgagattatcttctaaaaacaatggccctaaatttttctgtggaatcgcaaatttttcagggtaaatggcattcactaaatataagccttcgggtttcgctgttggagcagctaatttacgatctttttgctctaacaaccatttcatccactcaacaggttgattgcctgcgccgacctctatcaagcttcccacaatattgcgtaccatatgatgcacaaaagcattggcttgaatatccacaataatgtactgcccttttcgcaccacatttaaatgatgcacatttcgccaaggggtattcgattgacattgtgccgcgcggaaagaggaaaaatcattttcgcccaataaaaactgccccgcttggtgcattttcttttcgtctaaatctaaatggcaatgggtaatcccttccggcaaaatggctgaacgtaatttattacaatacaaaatataacgataacgacgcgcagttgctgaaaaacgagcatgaaattcatcatttaccacttttgcccaactcaccgaaatatcatcaggcaaattcgcattggtcccaaatgcccaagctttttcagggcgaaccgctgtagtttcaaaatgcaccacttgtcctgtgccatgcacacctgagtctgttctacccgcacaaaacacttcaattttttcatttgccacaaaagataacgctttttctaattcctcttgtacgctacgcactttctcttgtcgctgccagccacaatactgttttccgttatattcaatgcctaaggctatcttcattggaaaatactcctaaaacgatttcaaatttgaccgcactttgcccgaaaagaaaaaacaccaataactcatcattattggtgttcttatcacaagctaaaaattaagcacgtttgaagtcaatgtgaaccaattttggtttgaatgggtgacgttgcattgcttgaactttcactgcaacttctttaccttcaaccactaaagtgattacatcgctatagaaagaatcgtgagcttgtgcgttgtttaattcatcatgatttaagatgattgaaacaggtgcttcgctgccaccataaatgattgcagggatttgaccgttgtgacgcaggcggcggctcgcacccttaccttgcgcttgacgaacttcagcgttaaatttaaatgccattttaatgttctctttattaaaagtttaaaataaaaaattgcaggcgacccagcaattttcctaaatttgctcaaagacaaactttgagagcgacggattataaaatattcagccccacaatgcaaatttacacagcaaattttttctaggcttttcaaggcaaagcgattaaaataaatcccaatttttaattaattttaactaactgattgtaagtgggtttcaaatggaatttcttatcagcttttttaccgattacggttattgggcggtgctatttgttctgattatttgtggctttggtgtacctattccagaagatatcacgcttgtttccggtggtgtaatcgctggcctctatcctgaaagcgtcaattcccacttaatgttagtcgtgagtatgattggtgtacttgccggtgactcaaccatgtactggcttggtcgcatttacggcacacgcattttacgtttccgaccaatgcgtaaaatcgtaacattagaacgcctcaaaatggtgcgtgaaaaatttacccaatacggcaaccgtgttttatttgtggctcgtttccttccaggattacgcgcaccaatttacatggtttcaggcatcacccgccgcgttagctatacgcgcttcgtattaatagatttctgtgcggccattatttccgtaccaatttgggtttatcttggtgaatttggtgcgaaaaacttagattggttacacgaacaaattaaaaaaggccaactcgtgatttatatcctaatcggtgttttagctctgtacctattttggaaatggaaaaaagcgaagaaacaggctaaataatttcctataaagtgcggtcaaaaatttataaattttcgtcaattaaaaaaacgcttaataattttattaagcgtttttttgttttagttaacctactctcacatctttattttctaaataagcagaaaaaagatgtcccttgaaacttacattccaagggacagagctttgcgagaaatcttttctcttattgtaacaacgtttttcatttcgcagtgccattacaacgaggtgaattctatctatttatttttttatcgtcaatatattttttatacaaaaatctgttaaaatttaaacaaaaaaaactaataaaaaggaaccaaccttatggaaaataaaaacttacattatatccttggtctcgaccttggtatcgcctctgttggctgggctgtagttgaaattgacgaaaaagagaatcctctgcgtttaattgatgttggtgtacgtactttcgaacgagcagaagtgcccaaaacaggggaaagtctcgcactttctcgccgcttagcccgctccgctcgtcgattaactcaacgtcgcgttgctcgcctgaaaaaagcaaaacgacttctaaaatcagaaaatatcctattatccactgatgaacgtcttcctcatcaagtttggcagctacgtgtcgaaggtctagatcgtaaactagaacgccaagaatgggctgctgtgttattgcatttaattaagcatcgtggttatttatctcagcgtaaaaatgaaagtaaaagcgaaaataaagagctaggtgcgttattaagcggtgtagctagtaaccatgaattactgcaacaaactacatatcgtacgcctgcagaacttgctgtaaaaaaatttgagatcgaagaaggtcatatccgtaaccagcaaggcgcatatactcacacgtttagccgactagacttactcgccgaaatggaacttctcttctctcgtcaacaacactttggtaatccattcgcttcaaaaaaattattagaaaatttaaccgcacttttaatgtggcaaaagcctgccttatctggtgaagccattttaaaaatgctcggtaaatgtacttttgaagatgaatataaggcggctaaaaatacctatactgcagaacgttttgtttggataacaaaattaaataatttacgtattcaagaaaatggcttagagcgtgctttaagtgataatgaacgtttaatgttaatcgagcaaccttatgaaaaagctaaattaacttatgcacaagtacgttcaatattaaatttatctgatgaggcaatctttaaaggcgtccgttattccggtgaagataaaaaagccattgaaaccaaaacaacattgatggaaatgaaagcctatcaccaaattcgcaaggtattagaaggtaataacctaaaagctgaatgggcagaattaaaggcaaatccaacattattagatgaaattggtacggcattttcattatataaaactgatgaagatatcagtgcttacttagtggacaaactctctcaacctgtattaaatgccttattggaaaatcttaattttgataaatttatccaattatctcttaaagctttatataaacttctgccattaacgcaacaaggactacgctatgacgaggcttgtcgtgaaatttatggcgatcattatggtaaaaaaacagaagaaaaccatcacttcttaccacagattccagctgatgaaatccgtaatcctgtggttttacgaacactcacgcaggctcgtaaagtgattaatggtgtagtgagtatatggttcgccagctcgtattcatattgaaacgggacgagaagttggcaaatcttacaaagatcgtcgtgaactagaaaaacgtcaggaagaaaatcgtaaacagcgcgaaaacgcaatcaatgagtttaaagagtacttccctcattttactggtgaacctaaagccaaagatattttaaaaatgcgactttataaacaacaaaatgcaaaatgtttatattccggcaaacctatcgaattacaccgtttattagaaaaaggctatgtagaagtcgatcatgccttgccattctcccgcacttgggatgatagcttcaacaataaagtactagtgcttgctaatgaaaatcaaaacaaaggcaatttaaccccttttgaatggcttgatggtaaacataacagcgaacgctggagagctttcaaagcattaattgaaacgagcgcattcccttatgcgaaaaaacaacgcatcctaagccaaaaacttgatgaaaaaggctttattgagcgtaacttaaatgatacgcgctacgttgctcgtttcttatgtaactttattgcagataatatgcacttaacaggtgaaggaaaacgtaaagtctttgcttccaacgggcaaattactgctttacttcgtagtcgttggggattagcaaaatcacgtgaagacaatgaccgccatcacgctttagatgccgttgtggttgcttgctcaacagtcgccatgcagcaaaaaatcacacgttttgttcgttttgaagctggtgatgtattcactggtgaacgaatagatcgtgaaacgggtgaaattattccattacacttccctacaccatggcaatttttcaaacaagaagttgaaatccgaatttttagtgataatcctaaactggagctagaaaatagattgccagatcgtccacaagccaatcatgcatttgtccaacctctgtttgtatctcgaatgccaacacgcaaaatgacaggacaagggcacatggaaaccgtcaagtcagcgaaacgcctaaatgaaggaataagcatgattaaaatgccactcactaaattaaaattaaaagatttagaattgatggtaaatcgtgaacgtgaaaaagatctttatgatactttaaaagctcgtctagaggcttttaatgatgatcctgccaaagcgtttgctgaaccttttatgaaaaaaggtggggctattgttaaatcagtacgagtagagcaagtacaaaaatctggcgtattagtccgtgagggtaatgggatcgcggataatgcctctatggtgagagtggatgtcttcactaaagatggaaaatattttcttgtgccaatttatacctggcaagtagctaagggtattttgcctaataaagcaatagttgctctcaaagatgaaaatgagtggatagaaatagacaataaccacatattcttattttctctatatcaaaatgacttaataaaagttaaaacaaaaaaagatgaactctttggatattttaactcgttaaatagagctaccgctgctattgatataaaagttcatgaccttgacaagtcaaaagggaaaaacggtatttatcaaagtgtaggagtaaaacttgccctttcctttgaaaaatatcaaatagatgaactcggtaaaaatattcgtttatgtaaaccaagtaaacgccaacctgttcgttaatctcaatttaatcctcatacgtactacgtatggggattttttttgtaaggatatattatgacatggagaagtcttcttattagtaagggaggaaaactctctttgcatcagcaacaaatgctgattcaacaggaagggaatgaatttactgtccccttggaagatattgctattgttgttgtggaaagccgagaaacggtgattacccttcctttactctctgcattcggtttatacggaatcactttattaagttgtgatgaacaatttttaccttgtggtcaatggctcccttttaatcaatattatcgacaattaaaaacccttaaattacaacttgaaaccagtttgccactgaaaaaacaactttggcaacgcattgtgcaacaaaaaattcgtaatcaagcaaaagtcttatcactctgtcagcatcaagaaaaatcagaacgattactccggcttgctaatttagtgaaatcaggtgataaagataatcttgaggcacaaagtgcggtcatttatttctctggattattcggcactcatttcagacgaaaagaagaagacaatgcaattaatatacatctgaactatgcttattccgttatgcgttcagctgtggcaagaagccttgtactttatggttggctacctcaattaggtttatttcatcatagtgaactgaatgcctttaatttagcggatgattttattgaaccttttcgccctcttgttgatttgcttgtatggaacttgcttgaaaaaggattactcaccacaaatctcagtcctatatcaaaacagcaattaattaaaatcttgcatcatcaactatgctttaaccaagaaaaagtgagtgtattaactgctattgataaagctattgcttctttacaaattgcacttattcaaaaaaatgcagcattattgcagttacccgagatcgatacattgcaggaatatcaatatgagtgaggaggtatttatgcgtatgatcgtgctattcgatttaccggttaccactaaagcaaaaatgcgggctgcaaaccaattccgtcaatttttacttaaagatggttatcaaatgttgcaactttctatttacactcgaattattaaaggacgagacgcgttagaaaaacatcataaaagactcgtcgcacacttacctgaagaaggagctattcgatgtttatctattacagaaaaacaatttgcgagcatggaaattttagtgggagagaaaaaaccacaagaaaaaaaggttaattcaaatcaattactgcttttttagccgttttttaggcaaaacaaaagcccctaaaccttgtggcacggggctttttgctgtccctattatagcactgcgaaatgaaaaagggagctacaactagtgtagaaaaagaatatgcggaattttaattatagcactgcgaaatgaaaaagggagctacaacataaacttcacattgaagaacggatttacaattatagcactgcgaaatgaaaaagggagctacaactcaatcggttcaattaaatacaccgcaccaattatagcactgcgaaatgaaaaagggagctacaacgaaattattgtaggcaagtatcaatgttggattatagcactgcgaaatgaaaaagggagctacaactaatcaacaaaaggatcttattatggaaaaattatagcactgcgaaatgaaaaagggagctacaacatttttatatcattttcaccatcttgatgaattatagcactgcgaaatgaaaaagggagctacaacccatctactacgcctatcgcaaattgatttattatagcactgcgaaatgaaaaagggagctacaacgatgccataaataacgccataagagatgtaaattatagcactgcgaaatgaaaaagggagctacaacccttttgtgttgatctttgtcggtggttctattatagcactgcgaaatgaaaaagggagctacaactacatgttggctcaattgattatgttaaaaattatagcactgcgaaatgaaaaagggagctacaactcattgaatcaacctatggaaaacgctttcattatagcactgcgaaatgaaaaagggagctacaacataacctgtatgctcaaaacacacatattcattatagcactgcgaaatgaaaaagggagctacaacagatcggattttggggtgtgtctgcggcgaattatagcactgcgaaatgaaaaagggagctacaacagatcggattttggggtgtgtctgcggcgaattatagcactgcgaaatgaaaaagggagctacaacaacaacttaagacttatgatgacccaaaagattatagcactgcgaaatgaaaaagggagctacaacaagaagagctcgaagaaaagatccgagcgcattatagcactgcgaaatgaaaaagggagctacaacataacggtgaacatttaggaatggtttatgattatagcactgcgaaatgaaaaagggagctacaacgtgcgccgcttgctcgtttgagattggctgattatagcactgcgaaatgaaaaagggagctacaaccaaacgccaacgcgaacacttccgcaatgtattatagcactgcgaaatgaaaaagggagctacaactatgttaacggatagaaacgacagaattgaattatagcactgcgaaatgaaaaagggagctacaactctttcgcttttgagttggcattatcggatattatagcactgcgaaatgaaaaagggagctacaacgccttaaacagtttggatctgattttaggcattatagcactgcgaaatgaaaaaggggctatccattccttcggaagaataaaaagtgcggcaaaaaacaatattgttttctaccgcacttttttttattctaattaagctttagctgctaaataccgctccactgtatccacaatcgcttgtgtttgcggatcaatttcgatattcactaaatcgtcaatttgacgcttaccgataagtgttcggtgtaaggtttctggaattaaattcacgcagaattcatcgtctttcacttcaccaatagtaagactgatgccgtcaatcgcgataaatcctttcgtaagaatatatttcatcacgtctttagtaggtaatttaaaccaaacctgacgattgttttcgctttcgataatctgtgaaacgcttgcggtacaataaacgtggccagataaaatatgcccaccaatttctgcgcccatttgcattgcacgttctatattcacaaaatcccctgcttttaagctgccgagattggtgatgcgcaaggtttcctgcattaaatcaaagcttacaagatcatcatgaatttcagttacggttaagcacacgccattattcgccactgatgcaccgatttctaaaccttttctcatttcagctggtaattttacgatctgtgttctaaaattatcgctgtctttaattgcatgaatttgggcgatgccctgtacaatacctgtaaacattattattccttcattaaaaatttttccaatattatagcaaaatttatgaattctcgtcttttttctcaataccgtattgatattaaaaaacttatccgaattgcgacacctatcgggcttgcccagttagctcaaactggcatgggcaccgtggatgtgattatggctgggcgtgtgagctcagctgatgtaggcggtgtcggtattggtgcctccatttggctacctttggtgcttttcggacaaggcttattactcgccttgccaccaacaatttcctatttaaatggatctggacagcgccatcgcattgctcaccaagtaagacaaggtctttggatttcatttttagtgatgattccccttgcactcatcatctatcataatgatttcatattacagtttatgaatatggatgcccacatggcatatgtgacgatgaattatttgcgtgcgatggcgtggggcttacctgcctatttattgctgattaatttccgctgtttgaatgatggcattgccaaaacaaaacctgccatggtgattaccttcatggggttaatgctgaatattccgctgaattatatgtttatttacggcaaatttggtgcacctgcattgggcggtgtcggttgtggtgtggcgacggctattgttaactgggaaatggcaattttgatgattacctattctgccaaaaactataatgaacgtagtttaaaagtctttgaaaagattgttgaaaagccagatatcaaaacactgaaaaaactgaccgcacttggcttgcctattgccattgctctgtgtagtgaagtctcactgtttgccttgagtagtttattactttccccattaggtgcggatgtggtcgctagccaccaagttgccttaaacacgagctctgtcgcatttatgttcccagtgtcaattgcaatggcggccactattttagtcgctcaagaactcggtaatcatgccccacaaaaagctaaaatcatggcttacgccgcgattattcttggcttaattgtggcaacgggattagctttggttatttggttatttagcgataaaattgcggcattaattgttggcgataacacaacggtgattgctctttcgggaagcttattaacgatagctgcaatttatcaattctcagattcggtacaagtagtagttagcggtattttacgaggctataaagacactaaaattatcctttatatcacgttacttgcttattggggcgtaggtattccagttggttatattctttcccgcacggattggatcgtaccaagcatcggtgcaaaaggtttctgggtcgcatttatcattgccttaaccattgccgccgctttactctttatacgtatgcgaaaaatccaatcacaacctgatgaaaccattattcaacagttagaaagattgaagtagttaaagataaaagtgcggtcaaatttgaccgcactttttattcttgaatttaaaattagatgctttttaaacttctctatacccttcatattcccaatcaaaatatttttgtaactgaataacaatatcatcccaggtttctcctgatatactatttatcatgagtgacaaataattttctatgtcatctaatgttttcagagcaacaaccattcctttatttatcaccaagaccttttctctttgcaccattcctacattaaaaacattagtataaaaatagtcactcccagaatttccttttgttcctattgctaatgttaaatttaagcaataagctggcttaagaactagtaaggatgcctcatccctcgttgaaaagccataatcaatccattttaaatcagctataagcatttactttccctatgaactctaaactatacgttttataaatgaaaacttatcaacaagcaattaaaaactaacatcagaaaatttatgccattaaaaagtaaaaaataatttgtacagagtactttcacacacaaatataaagtgctccatcatgctattttgtttttcttttagttgttagaaatataataggaagaatgaggatatgaagtttcaaacttgctactattgcctcttttgttagaagaacataatttatgttattaacttccgcatcaaattgaacataaaaaatagcaacaaaataaatcaaagaaaaagccagaatactcgcaaaatatccaaaaacatatttcattattctattacctttgagtcactcatattctatctaagtttaaggataaaaagtgcggtcaattttgaccgcacttttgtcttttacatcaccaccacatcaaactgttcttggttgtagtactgttctgttttgacttgaacctgtttgctgataaacatttcgatctctggcaataaaccgtgcgattcttctttgattaaataatctgccacagctggagaggcataaaccacaaattgttcactcgagaataagtggttaacgcgaatgatctcacgcataatttcatagcataccgtttcgacggttttcacgcgtccacgaccttgacaagttgggcattcatcacacaaaacgtgctctaaactttcacgagtacgtttacgcgtcatttccactaagccaagttgagtaaaaccatttacattggtttttacgcgatctttcgatagggcctcttccaaggattcaatcacgcgattgcgatgctcatcggtttgcatatcaataaagtcaattatgataataccgcctaaattacgcaactgtagctgctgcgcaatggctttagtggcttcaatattagtgttaaaaatggtttcatctaaatttcgatgaccaacgaacgcgcccgtattaatatcaatggtcgtcatggcttcggtttgctcaataatgagataaccgcccgattttaaattcacgcgtttctctagggcattttgaataccacgttcgacaccataaatatcaaaaatcggttgactacccgtataaagcatcaatttttcacttaattccggcataaattcatcggtaaattctttcacttcgttaaaacaaagtttagaatcaatatgaattttctctaaattagagccgataaaatcacgcaaaatacgctgtggtaatgcgggctcgccataaattttagaacgggttggatatttgcctttacgctcaagcactttacaccataagcgttttaaaaattctgcatcttggcgtaactcttcttccgttgcaccttcggtggcggtacgaataataaaaccgcctaactcatcacaaaaaggctcaactaacgcttttagtcttgcgcgttcttcttcgctttcaatacgttgtgaaacaccaacatggctattctctggcataaagacgagataacgagaaggcagtgtaatatcggtggttaatcttgcacctttggtgcccaaaggatcttttaccacttgtactacgatatcttgcccttcgcgtacgagttcagaaatactttttgcacggaattgcttttgctcgttcacatccacacattcggtatgtgaaacaatatcggatgcatgtaaaaatgccgctttttctaaaccgatatccacaaacgcggactgcatccccggtaaaacacgagttactcgccctttatagatattccccacgatgccacgtttggcttgacgttcaatatgaacttcttttaaaacgcccgtttccaccaacgcaacgcgggtttcattgggcgtaacattcattaataattcaacagaatccattttttcgaccttagttttaatggtataagtctatcgaaaaggaaaatagaataatagacccaaataaggtaaaatatgacctttctcaaattttcatgactttttttggggtacttaatgtttggtttagacccaacacttattacttttagtatttatattttcggcatgattttaatcggagtccttgcctattattatacaaacaacttatccgattatattttaggcggccgtaaactcggaagttttgtgacagctatgtctgctggcgcatctgatatgtcaggctggttattaatgggtctgccgggtgcggtgtatgtatctggtctggtagaaggttggatcgctattggtttaatcctcggggcttattttaactggttgcttgtagctggtcgtttacggatctataccgaatttaacaacaatgcactcacattaccggaatatttccaccatcgctttggcacatcacataatctcttaaaaattgtgtctgcaacaatcatcctagtattcttcaccatttattgtggttctggtgtggttgcaggggcgaaattattccaaaacctattctcagtcgactactcaacagctatttggtacggcgcattagcgactatcgtctatacctttatcggtggatttttagccgtaagctggacggataccattcaagccacattgatgatttttgcactaattttaacgcctctctttatctttttaagtttgggtgatgcatcacaatttattggagtgctacatcaagcagaaatcgcagcaaataaagactttactgatttatttagttctactacaccattaggtttattaagtttagcggcctggggcttaggttattttggtcaaccgcatatccttgcgcgttttatggcggcttactcggtgaaatctcttattaaagcacgccgtatcagtatgacatggatggtgatttgcctcgcgggtgcgattggtattggcttcttcggtattccttatttctttgctaaccccaatgtggctggcgtggtaaataatgaaccagaacaagtatttattgaactggctaaattactctttaatccatggattgccggtattctactgtctgcaattttagcggctgtgatgagtacactttctgcacaattattaatttcttcaagctctatcactgaagatttttataaagggtttattcgtccaaaagcgtcagaaaaagaattagtgtggttaggccgtgcgatggttttagttattgccgctatcgccatttggattgcgcaagatgaaaacagcaaagtattaaaactcgttgaatttgcctgggctggctttggttctgcatttggtcctgttgtgcttttctccttattctggaaacgtatgacttcatcagcggcgatggcgggcatggttgttggcgcagtggttgtctttgcttggaaatccgtgattcctcaaaccagtgaatggtttaatgtgtatgagatgatcccaggattcatcctcgctagcctggcgattattgtggtttctctcctttctgcagaaccagaaaatgaagtcaaagaaacctttgagaaagccgaaaaagcttataaggaagcaaaataatgattgattttcgtcctttttatcagcaaattgccaccaccaatttatctgcttggctagaaacattacctttgcagctaaaagaatgggaaaaacaaacccatggtgattatgctaaatggtcaaaaatcgtggactttcttcctgatttgcaggcagataccatcgatttaaaaaatgccgtgaaatctgaccgcacttccccactttcagagggcgaaaaacaacgcattgtccatcatttgaaacaattgatgccatggcgaaaaggaccttatcatttatttgatattcacgtggattgcgaatggcgttctgatttcaaatgggatcgtgttttacctcatcttgcgccattaaaagatcgtaccattttagatgtgggttgcggtagcggctaccatatgtggcgaatggttggcgaaggtgcaaaaatggtggtaggtattgatccaaccgaacttttcctttgccaatttgaagccgttcgaaaattattaaataacgatcgtcgagctaacttaatcccattaggtattgaagaaatgcaaccacttgcggcatttgatacggtattctcaatgggtgtgctttatcatcgtaaatcaccgcttgatcacctcacacagctaaaaaatcaattagtaaaaggtggcgaattggtgttagaaaccttagtggttgatggtgatgccaatacagtcttagtgccatcagatcgctatgcaaaaatgaagaacgtgtattttattccttccgttgcagcgctcatcaattggttggaaaaggtcggctttactaatgtgcgttgtgtggatgtcgccaccacgacattagaagaacagcgtaaaacggattggttagaaaatgaaagtttgattgatttcttagatccaaatgatcacagtaaaaccatcgaaggctatcaagctccaactcgcgcagttattttagccaataaataattgcttaaataaaagagcggtcaaaaaatccggtattatgtagcagttgcacaaagatttaaccgattgaaaaccttaaaatccctattgaaattttaactc

SEQ ID NO: 2714 - DNA, 18531 bp, synthetic construct
  misc_feature 1..18531: note = Synthetic
  source 1..18531: mol_type = other DNA
ttcgaatcgctcacgacccaccaaatatgaaaacctgctttgaaaaaagcaggtttttttcatgttctccgtaataatctacttctcctacaaatatacttgtatgccagacaatttaagcatacactgactacacacgactacaacgacaggagaaccctaaatgaaacaattggccatgtacatcaacggacgctttgaaaatgatttcaacggcgaatggcgcgacgtattgaacccgtccaccgaagaaaccatcgcccgcgaacccaaaggcggcaaggctgacgttgaccgtgccgtagcggcggcgcgtgcggcgcagccggcatgggagcggctgcctgcggtcgaacgcggcgcgtatttgcgcaaaatcgcccaaggcatacgcgaacgcgctgacaagctgaccgacaccatcgttgccgaaggcggcaaaaccaaagacttggcgcgcgtggaagtcatgtttaccgccgactatctcgattaccaagccgaatgggcgcgccgttatgaaggcgaaatcatccaaagcgaccgcccgcgtgaaaatattttattgttcaaacgtcctttaggcgtgatcgccggcattttgccgtggaacttcccattcttcctaatcgcccgcaaaatgggcccggctttggtaacaggcaataccatcgtcgtcaaaccaagcagcgttaccccgatcaactgccacatctttgctgaaatcgttcatgcttcaggcttaccggccggcgtattcaacgtcgtcaacggcccgggcgcagaaatcggcaatgccttggcatcacatccgcaagtcgatatggtcagcctgactggttctgtcgatgccggccgccaagtgatggaagccgccgccaccaacatcaccaaagtctcactggaactgggtggcaaagcccctgccatcgtcctgaaagatgccaacttggatctggccgtcaaatccatcttggcttcacgcgtgggcaataccggccaaatctgtaactgcgccgaacgcgtgtatgtccacagcagcctgaaagacgcatttattgaaaaaatgaccgccgccatgaaaggcgtgcgctacggtaatccggccgaagccgaacccagcgcactggaaatgggtccgttgattgaagaacgcgccgtaaaatccgttgccgaaaaagtcgaacgcgcagttcgacaaggcgcaaccttggtttgcggcggcaaacgtgccgaaggacgcggctatttcttcgagccgaccctgctgaccgataccgacaacagcatggacatcatgaaggaagaaaccttcggacccgtcctgcctgtcgctactttcgacacgctcgatcaagtcatcgctttggcaaacgacagcgaattcggcctgaccagctccgtctataccaccaatctgaatgaagcgttttatgtaacccgccgcctgcaattcggcgaaacctacatcaaccgcgaaaactttgaagccatgcagggcttccatgccggttggaaaaaatcaggtatcggcggcgccgatggcaaacacggtttggaagaatatctgcaaacccaagtcgtttatttggaaaccgatatctaactgccgatactgcccttcatgaaacaaaaggccgtctgaaaccgatttttcaggtttcagacggcctttctgcctttatagaaaaaaacaccgacatcgcgtaaaatagagccaatttttcactttattcaggccgtctgaaaatatcagcagcctgactcattttcccggaaaacaccatgagcgaacaaaacaatccgcaaatcgagccgcagttggacgaaaaccaaatcatcgccctgcgtcgcgaaaaactgcacaacatccgcaaagaacgcaacgcctaccctaacgatttcaaacgcgacagctttgccgccgacctgcacacccaatacagtgaaatcagcaaagaagaactcgacccgcaaggcatttccgtcaaaattgccggccgcatgatgctcaaacgtcaaatgggcaaagccagcttcgccaccattcaagacgttaccggtcaaatccagctttatctgaacaacaaaggcgtgagccaagaagttttggacgacttcaaccactgggacttgggcgacatcgtcggcgcggaaggtactttgttcaaaaccaaccacggcgaattgaccgtgcgcgtgtccaacatccgcctgctgtccaaatccctgcgccctctgccggacaaacataaaggcttgagcgatcaggaaaccaaataccgtcaacgctacgtcgatttgattgccaacgaagaatcgcgcaataccttcatcaaacgcagccaaatcatccaatccgtgcgcaatttcatggtcaacgagcattatctcgaagtcgaaaccccgatgatgcacccaattcccggcggcgcgacagcgaaaccgttcgttacccaccacaatgccttggacattccgctctacctgcgcattgcgcccgagctgtatctgaaacgcttggttgtcggcggtttggaacgcgtgtttgaaatcaaccgcagcttccgtaacgaaggcatgtccgttcgccacaatcccgaattcaccatgattgaattctacgaagccttctccgactacgaacgcatgatgcaaatggcggaagacatcatccgcaacgcttcccgcgcggtaaacggcacggcaaaaatcagctacaacggcaaagaagtcgatttggaaagcccatttgagcgcctgaccattctcggtgccatcaaaaaatacaatccgcactacaccgatgagcagttaaacgatgaagaatggctgaaaaaagaaatcgtcaaacacggcgaaagcctgccgccgtctccgggtatcggcagcctgcaacttgccctgtttgaaggttgcgctgagagcaaactgtggaacccgactttcatcatcgactaccctgtcgaagtatcgccattggcacgcgcatccgacagcaaaccgggtttgaccgaacgcttcgagcttttcgttgttggccgcgaattggcaaacggctactctgagttgaacgatccagaagaccaagccgaacgcttcaaagcgcaagtggcgcaaaaagatgccggcgacgacgaagccatgcactacgatgccgactacatccgcgccatggaattcggtctgccgccgaccggcggctgcggcatcggcatcgaccgcttggtaatgttgctgaccgattcgcaaaccatccgcgacgtgattctgttcccgcaaatgcgtcccgaataacgcattgaaataaaatcaaggccgtctgaaaacaagactctgttttcagacggcctttttgttcaaatatgtaaaacggaagagtttaaatcaataaatcctttacatcataataataaaattacatgataatcaaaaagataatataaaaaagaatatgtaaacgtttttcagtttgttgacagtctgctagaatacatccagttacagacagcctccacacacaggccgtctgaaaatgcagaaactctgaaaggtttgtatggatcaatttttcgaacagcttcacggattggtaaacgccatcaacgaccaaatgtggtcggggttggtatatatgcttttaggcgcaggcctctttttcaccgttaccaccggttttgtacaattccgcctcttcggccgcagtattaaagaaatgttgggcggccgcaaacaaggtgatgatccgcacggaatcacaccgttccaagcattcgttaccggcttggccagccgcgtaggcgtgggcaacatcgccggcgtggcgattgccatcaaactcggcggaccgggcgcggtgttctggatgtgggtaaccgccttaatcggcatgagttcggcgtttgtcgaatcttcactggcccaactctttaaagtccgggactacgacaaccaccacttccgcggcggccccgcctactacatcactcaaggcctgggacaaaaatggctgggcgttttgttcgccctgagcctgattttctgtttcggctttgtatttgaagctgtacagaccaataccatcgccgataccaccaaagcggcatggggctgggatcaacactatgtcggtgtcgccctagtcattctgactgccccgattatcttcggcggtatccgccgcgtatccaaagccgcggaaatcatcgttccgctgatggcagttttatatctcgtcatagcactcttcatcattgctaccaatatttccctgattcctgacgtgttcggtcagattttctccaacgcgttcaacttcgattcggctgcaggcggtttcctcggcggtctgatttcgaccaccatgatacagggtatcaaacgcggtctgtattccaatgaggcaggtatgggttctgcgccaaataccgcagccgcagccgaagtgaaacaccccgtctcccaaggcatgattcaaatgctgggcgttttcgtcgataccatcatcgtctgctcatgcaccgcctttatcgtcttgacctatcaacagccttacggcgacctgagcggtgcggcgctgacccaagcggcaatcgtcagccaggtaggcgaatggggcgcgggcttccttgccgtcatcctgtttatgtttgccttttcaaccgttatcggtaactatgcctatgccgagtccaacgtccaattcatcaagagccattggctggttaccgccgttttccgtatgctggttttggcatgggtctacttcggcgcagttgccaacgtacccttggtatgggatatggcagacatggcaatgggcatcatggcatggattaacctcgtcgctatcctgctcctgtccccacttgccttcctgctgttgaaagactacacagccaagctgaaaatgggcaaagccccagagttcaaactctccgaacacccaggcttgaaacgcaaaatcaaatccgatatctggtaacaccaaaggccgtctgaaatttcagacggcctttttaatccctgccatttagacaaaacgatgccccttaaagcggaagccttaaggggcagagcgttgcggcacatcttttcagacggccttattgtagcaacgtttctcatttcgcagtgcaacaatatggacagattctaattccaaatcgacacccagtcaagcatttcatttgcatggaaatacttacctaggatatatttatacttactaaacatcatattacggagaaactgatggctgcattcaaacccaatccaatcaactacatcctcggcctagatatcggcatcacatccgtcggctgggcaatggtagaaattgacgaagaagaaaaccccatccgcctgattgatttgggcgtgcgtgtatttgagcgtgcagaagtaccgaaaacaggtgactctctcgcagcggcaagacgcttggcacgcagcgtccgccgcctgacccgccgtcgcgcccaccgcctgcttcgggcccgtcgcctattgaaacgcgaaggcgtattacaagccgccgattttgatgaaaacggcttgattaaatccttaccgaatacaccatggcaacttcgcacagccgcattagaccgcaaactgacgcctttagagtggtcggcagtcttactacatttaatcaaacaccgcggctatttgtcgcaaagaaaaaacgagggcgaaactgccgataaggagcttggtgctttgcttaaaggcgtagccgacaatgcccatgccttacagacaggcaaattccgcacaccggccgaattgactttaaataaatttgagaaagaaagcggccatatccgcaaccagcgcggcgattattcgcatacgttcagccgcaaagatttgcaggcggagctgaatttactgtttgaaaaacaaaaagaattcggcaatccgcatatttcagacggccttaaagaaggtattgaaaccctgctgatgacgcaaagagattctattcctgatgaaagtgctattctgcggatgcaaggaaaatgtacttttgaaaaaataaatccagagcagcaaaacatagttggagcgcagaacgttttatatggttaagcaagttggctaatttgaggataacggatgaatttggcactaggaaattaactgaaatagaacgtcaaatacttatagatcttccatataaattaaagaccgtcaactatcaacaagtaaggaatgccttaaccaccctttctcccaatgctctttttaatattagatatcatcaaaaagataaaaagggggagataaaatcatcagataaaattgaaaaagatacgaaattcatagaaatgaaattctggcacaaaattaaggaaactttagaagggaacggaagaaaaacagaatggcagagcctttcaagcaatcataatttactagatgaaatcggaacagtttttaccatctgtaaaaatgatgagagaagaaaagccctcttgtccggtaagataaaagaagatcaagatattcttaatattttgtgtaatcatgttgattttacatgcactgtgaatttatctttagaagcattgaaaaatatccttccttttatggaacaaggtgatgactacgatactgcttggagaaaagtttatcctccgcagtcaactaaaaaagaatctgttctaccaccgattcctgccgacgaaatccgcaaccccgtcgtcttacgcgccttatctcaagccagaaaagtcattaacggcgtggttcggcgttacggcccccctgcccgtatccatattgaaacggcaagggaagtaggaaaatcgtttaaagaccgcaaagaaatcgaaaaacgccaagaagaaaaccgtaaagaccgggaaaaagccgccgccaaattccgagagtatttccccaattttgtcggcgaacccaaatccaaagatattctgaaactgcgcctgtacgagcaacaacacggcaaatgcctgtattcgggcaaagaaatcaacttaggccgtctgaacgaaaaaggttatgtcgaaatcgaccatgccctgccgttctcacgcacatgggacgacagtttcaacaataaagtgctggtattgggcagcgaaaaccagaacaaaggcaaccaaaccccttacgaatacttcaacggcaaagacaacaaccgcgaatggcaggaatttaaagcgcgtgtcgaaaccagccgtttcccacgcagtaaaaaacaacggattctgctgcaaaaattcgatgaagatggctttaaagaacgcaatctgaacgatacgcgctacgtcaaccgtttcctgtgccaattcgttgccgaccatatgctgctgacaggtaaagggaaaagacgtgtctttgcatccaacggacaaattaccaatctgttgcgcggcttttggggattgcgcaaagtgcgtgcggaaaacgaccgccatcacgccttggacgccgtcgtcgttgcctgctcgaccgttgccatgcagcagaaaattacccgttttgtacgctataaagagatgaacgcgtttgacggcaaaaccatagataaagaaacaggagaagtgctgcatcaaaaagcacacttcccgcaaccttgggaatttttcgcacaagaagtcatgattcgcgtcttcggcaaaccggacggcaaatccgaatttgaagaagcggatacccccgaaaaactgcgtaccctgctcgcagaaaaattatcttctcgccccgaagccgtgcacgaatacgttacgccactgtttgtttcacgcgcgcccaatcggaagatgagcgggcaaggccatatggagaccgtcaaatccgccaaacgactggacgaaggcatcagcgtgttgcgcgtaccgctgacacaattaaaactgaaagacttggaaaaaatggtcaatcgggagcgcgaacctaagctatgcgaaggactgaaagcacgtttggaagcacataaagacgatcctaccaaagcctttgccgagccgttttacaaatacgataaagcaggcaaccgcacccaacaggtaaaagccgtacgcgtagagcaagtacagaaaaccggcgtatgggtgcgcaaccataacggtattgccgacaatgcaaccatggtgcgcgtagatgtgtttgagaaaggcggcaagtattatctggtcccgatttacagttggcaggtcgcaaaagggattttgccggatagggctgttgttgcttatgcagatgaagaggactggactgtaatagatgaaagcttcagatttaaatttgtactttattcaaatgatttaataaaagtaactgccaagaaaaacgtattctttggttattttgttagtctaaatagagccacaggagcgattgatatccgtgtacatgacacagataataccaaagggaaaaacggcattttccaaagtgttggtgtcaaaaccgccctttcattccaaaaataccaaattgacgaattgggcaaagaaatcagaccatgccgtctgaaacaacgtccacctgtccgttaaattaatctatccctgtttcagacggcctgaagcagggattttttatataaaaataaggggaaaaatatgacttggcgtagcctgctcattcaaaacggcggcaaactatccttgtaacgccgacaactgctgattcaacaaaacggcgagtcccataccgtaccattagaagacatcgccgttatcatcatagaaaaccgcgaaaccctgattaccgccccgctcctatcagccttagccgaacatggcgcaaccctactgacatgtgacgagcagttcctcccctgcggacaatggctgccttatgcccaatatcaccgccaactcaaaatcctcaaactacagctgaatataagcgaacctttaaaaaagcaattctggcaacatatcgtccgccaaaaaatcctgaaccaagcatttgtcgcagacgaaacaggcaatgatcttgcagccaaacggttacgcactttggcatctgaagtccgttcgggcgatacaggaaaccgcgaagcccaagccgccgccctctacttccaagccctctttggcgaaaaatttacccgtaatgacaacaacgccgtcaatgccgcattgaactacacctacgccgtgctccgtgcagcagttgcacgcgccctgaccttatacggttggttgcccacattaggcttgtttcatagaagtgagttggatccattcaatctcgccgatgactttatcgaacccttacgcccattggccgacctgaccgtgatacatttgtacgaacaaggccgtctggaaactgaactgacacccaaactcaaacaaaaccttatcaagacccttcactgtcaaatctgcatcgaacggcaacacttcagcaccttggctgccatagacaaaatgatttcttcatttcaagccagcgtaaccgacaaaaacgccaaacagctgaaactacctgaaatcttgccattgaaagaataccaatatgagtgaggccaaatttatgaggattatcgtcttcttcgacctaccagtcaccacagcggccaagcgcaaagccgccaatcaattccgccagtttctattaaaagatggataccaaatgctccagctttccgtatacagccgtattgtcaaaggccgtgattcgttgcaaaaacaccacaataggctatgtgcaaacctaccgcaagaaggttcaatccgctgtttggaagtaacagagaagcaatatgccaccatgaaactgctgttgggagagctgaaaacccaagaaaaaagagtaaattcagaccaactatcattattctaagctcatttttttagacaaaataaaacgggaaacccttatagaataatgatttcccgttgaggtattgtagcactgcgaaatgagaaaggatctatccaatagccgctcaaattgatgactgcattttcgattgtagcactgcgaaatgagaaaggatctatccaaataaaaaagcaccacctaaacaggtagtgctttcatattaatttgcttattcagcagaatcagctgctttatcaaccaattcaaccaatgccaaaggagcattgtcgcctttacggaaaccgtatttcagtacacgaacatagccgccgttacgagcagcaaagcgtggacccaattcgtcaaacaatttaactacaacatcacgatcgcgagtgcggtcaaaagccaaacgacggtttgccaaagaaggttttttacccaaggtaatcaagggctcaactacgcggcgcaattcttttgctttaggcaaagttgtcacgatggtttcgtgagtcaacaaggaattcgccatattgcgcagcatcgcagcacggtggctgctagtacggtttaatttgcggttgccattacgatgacgcatgtcattatcctttaatcttcaaacttacggcttttctaagcctacaggcggccaagcttctaatttggaacctaatgtcagacctttagaggccaacacttctttgatctcattcaaagatttacgacccaaattaggggtcttgagaagctcggtttcagtacgttgaatcaaatcgccaatatagtaaatatcttcagctttcagacaattagctgaacgtacagttaattccaaatcatctacaggacgcagcaagataggatcgataggaggcactttttcttcaacctcttcaaccggagtaccttgcagatctgcaaaaatagacatttggtcaattaagatacgtgcggcactacgtacagcttcttctggatcaatagaaccattggtttcaatatccaaaaccaatttatccaaatccgtgcgttgctctacgcgtgcaggttcaacttcaaagctaacacgactgatgggcgaaaagctcgcatccaactgaatcgcaccaatctgtttgttctcatcacgcaatacgcgacggcctgaaacagattgataaccacgaccttgctctactttaatttccatgtcgatttgaccattgtcggacaagtggcaaataacatgttcaggattgatgatttccacatcgtgtggcaaatcaatatcaccggctacaacagcaccagcacctgtttttttcaaagtcaactgaacttggttacgaccgtgaagcttgaatacgatacctttaatgttcaagagaacgtcaacaacatcctcttgaacaccatcaatagtagagtattcgtgcaatacgccggaaataactacttcagttggggcaaagccattcatggatgacagtaagatacgacgcaaagcattacctaaagtatgaccaaaaccacgttcaaatggctgcatagacaccttggcccgtgtggaagacaaagtatctacatcgatttgacgaggtttcaaaaattcggttgtgctattttgcatttaactgtccctcattgagctagcattatttagagtagaactctaccaccagctgttcattaatatcgccagacaattctgagcgatccggcatatttttgaatacaccttccaatttgtcggcatcaacagatacccagcttggcaagccaatttgagtagccaggctcaatgcttcttggatacgtacttgtttcttagctttttcacgaacagctacaacatcacctgctttaacttggaaagaagggatattaacaacttgaccgtttacgacgatagctttgtgagaaaccaattgacgtgcttcggcgcgagtagagccaaaacccatacggtaaacgacattgtccaaacgagactccagcaattgcaacagcaattcaccggtagagcctttacgacgagctgcttccgcgaagtaacgacggaattgacgctctaatacgccataaatacgacgaattttttgtttttcacgtaattgcaaaccgtagtctgacaaacgtggttttttcgcaccgtgttgaccaggtgcagaatccattttacatttggaatctaaagagcgacgtgcactcttcaaaaacagatccgtaccttcgcgacgtgctaatttacatttagggccaatataacgtgccatgttttaaatcactccaatattaaatacgacgttttttaggcggacggcaaccgttatgaggcaacggggtaacgtcagtaatgctggtaatcttgaaaccaagagcgtttaaagcacgtacagaagattcgcgaccagggccagggcctttaatgcggacttctaaatttttaacgccatactcttgggcaactttaccagctgcttctgctgcaacttgtgctgcaaatggtgtacttttacgagaacctttaaaaccagcgccgccagaggtagcccaagacaatgcattgccttgacggtcagtgattgtaatgatggtattgttgaaagatgcatgaacgtgcacaataccttcgcttacggttttacgtacttttttacgtacacgcgaagctgtgtttgctttagccattaatcaaattccttaaaatttatttcttaccggcaatcgctttgcgcggacctttacgggtacgagcatttgtgcgagtgcgttgaccacgacaaggcaagccacgacgatgacggaagccgcgatagcaacccatatccatcagtcgtttaatgctcatcgttacttcacgacgcaaatcgccttcaacttcatatttagcaacttgctcacgcaaagcgtctaattgagcctcgtccaaatcttttgctttagtagtaggagcaatatttgctgcctcacaaatcaatttagcacgagtcgcaccaataccataaatagcctgaaggccaattacgatatgggcattattagggatatttacccctgcaatacgagccatattttttcctttttagggcaaagtatgtcactataccacaaaatcaatagttaagaaaactagcttcttaaccttgacgttgtttgtgacgtgggtcagtacaaattacgcgaactacacgattacgacgaataatcttgcaattgcgacaaattttctttacagaaggttgtacacgcattttatttccttttatcgtttatcttgctcggaaaacaatccgagcacgggttaaatcataaggagttaattcaactgttaccttatcacctggagaaatacgaatatagtgcatccgcattttgccagatatatgaccaagtactacatgatcattttccagttttactttaaatgttgcattgggcaaagtctcaaggatttcgccctgcatctgtatggtatcttctttagccataagcctacttacgtgacaaagatttcatatctggacgacttatcaagtcttcatactgactactcattctatatgaattgatttgtgtcctaaaatcaattgtaacgacaaccaaaataagcagagatgttccacctaaatagaaaggaactttcaatgccgtcgttaaaaattcaggtatcagacagattgtagtgatatacaaagcaccaaataatgtcagtctcagtacaactttttccaaatatctagaggtttgctcacctgggcgaatacccggtacaaatgcaccactcttcttcaaattttcagccatctctttagggctaaatactaaagcagtatagaaatagcagaagaagatgatagttgtggcaaataatacaatatacaaaggctgtccgtgttgcagcattgcagcaaccttatgaagaacagaattcgtactatttgaaccaaaccaacctaaaagtgtagatggaaataaaatgatactggaagcgaaaataggaggaataacacctgccatatttagcttgaacggcatatgaatgctttgtcccggcatcattccagagccaaactgtcttttagcataatgcacaggaactttacgctgagcactctcaaaataaactacagcatagatcaacagcaaaataccaatcacaattgataccgccatcaacatactcatagagccttgttcagtcaaagttaacatccgaacaataccggatggaatacccgatacaatgcctgctgtaataattaaagaaataccattaccaataccacgctcggtaatttgctcccctaaccacatcagaaacatagtacctgtaaccaaacagactactgtagaaatatgaaactcaagcgaactcgttacaacaacaccttgcagataaacaaatgttgcaacaccaaagctttgcaatacagccaataataccgtcccatacctagtatatttcgtaattattttcctaccagcctcaccttccttctttaaagcttttaaagaaggaacaatttcagaagcaagctgaacaataatcgatgccgaaatataaggcatgataccaattgcaaatatactaaagcgctccaacgaaccacccgagaacatatttaacattccgaatatgccgtttgcagcgccttcgtataacttagctaatgcaacagcatctacgcccggtaccggtatatgagcaccaatacggaaaacgactaaagcacctaaaaggaatgccagacgttttttcagatcaccaaatttggataatcccgataaagattgttgattagccactgtagtgcaagccttattcttctactttaccaccggcagcctcaatagcagctttagcacctttagtagcttttacacctttcaaggtaactgcttttgagatttcaccagaagcaataacttttacactagaagcagttacaggaatcagaccagcttgtttaagaaccaagacatcaatctcgttcacagcaatcagatttaattcactcaaacgaacttcagcattagcggcagcagtcaaagatttgaaaccacgtttcggcagacggcgttgcaaaggcatttgaccgccttcaaaacctaccttgtggaagccaccagaacggcttttttgacctttatgaccacgaccacctgttttacccaagccgctaccaataccgcggcctacacgacgactagcgtgagtagcaccctcagcaggttgaatagtattcaaaaacatattaagactccactttcaacaagtagctgattttattgatcatgccacggttttcaggggtatccaaaacctctacagtatgttcacggcggcgcaaacctaaaccacgagcacatgcacgatgagattcaattgtaccgatcaggctcttaaccaatgtaactttaatctttttttgctcagtcatggttagctcccaaaatatcttctactgtcaagccacgtttagcagcaatatcagcaggggtatacagtttagacaaaccgtctaatgtagcgcgtacaatattgtaaggattagtagaaccatgtactttagctgagatgttatggatccccatagcatcaaatactaaacgcattggaccaccagcttttacaccactaccttctttagcaggttgcataaataccttagtagcaccatgacgaccaataacctcatgatgaatagtaccatttttcaaaggtactttaatcatagagcgtcgagcttgatccattgctttttgaacagcaactggtacttcttttgatttacctttgcccataccgatgcgaccatcaccatcaccaacaacagtcagtgcagagaaagccatgatacggccacctttaactactttagtcacacgattaactgcgaccatcttttcaatcagtccgtcaccgcgttcttcaatttcatgttttgccatctgaaagtctccaaatattagaagcttaaaccattttcacgtgcagcttcagccaaagctttcacacgaccgtgatattggaaacctgaacggtcaaaagcaactttttcaacacccactgctttagctttttcagcaatacgcttaccaactacagccgctgcttcaacgttgctacctgatttcaggctactacgtacttcagcttccaatgtagaggcttgagccaatactttatcaccttcagcactaattacttgagcataaatatgattattgctgcggaacacacataatcttaccattttcaagtccgcaatacgcgcacgggttttgcgtgcacgacggagtcgggttgtatgtttatccattagtgaacctcaattattttttcttggcttctttcatcactactacttcacctacataacgaacacctttacctttataaggctcaggagaacggaatgcgcgaatttcagcagcgacttggccaaccacttgtttatctgcaccagtcaaaacgatttctgtttggctaggagtttgaacagaaacaccttcaggcatttcatatacgattggatgagagaaacccaaagacaagttcaaaactttaccttgagcttgggcacgataacccacaccaatcaattgaagttttttctcaaaaccttcagaaacacccttaaccatgttattaaccaatgcacgagcagtaccagacatagcattagcctgtttactgtcattttttgcagcaaaagtcaatttaccatcgttcagttcaatagcaacatcggaatgcaaaggaaaagacaattcgccgtttttacctttgataaccaatgcatctgttccgaattttacttctacaccagcaggaacagtcactgggttttttgcgacgcgtgacatttacttttctccactaggctacgatgcacaacaactcaccaccgacaccctcagaacgggctttgcgatcagtcattacacctttagaagtactaacaatagcgacacccaggccattcattacgctagggatctcacttgatgctttgtaaatacgcaaacctggacgtgaaacacgtttaatttgctcaatcacaggacgacctgcatagtatttcaattgaatttccaataccggttttgcatcagcagaaaccgcaaaatcctcgatataaccttcttctttcaaaacttttgcaattgcacatttcagtttagaagaaggcatggcaactgctgctttattagcacgttgcgcattgcgaatacgagtcaacatatcggaaataggatcatgcatactcattatttatactcctattaccagctagctttaacaacaccagggatctcgccacgcatagcgatttcacggattttaatacggcccaaaccaaatttacggaaagtgccacgaggacgacctgttaaagcacaacgacgacgttgacgtacaggtgctgcattacgaggaatggattgaaatttcaaacgtgcttcaaaacgttcttcttcagtcgcattagcatcattaataacagcgaaaattgcctcacgtttagctgcaaactttttcgccaatgcttgacgtttcagctcacgattaataagtgctttcttagccatgattatcctttaaacggaaacttgaacagtgacaacaaagctttcgcttcttcatcagtttttgcagtagttgtaatagtaatgttcaaaccacgcaaagcatcgattttatcgtattcaatttccgggaaaataatttgctcacgaacgcccatattgtaattgccacgaccatcaaatgatttaccgcttacaccacggaagtcacgtacacgaggcaacgcaatagtaatcaaacgatccaagaattcaaacatttgatcacgacgcaatgttactttgcaaccaactggatagttatcacggattttaaaacctgcgatagatttacgagcaacagtaacaactggtttttgaccagcaattttctctaaatcagaaacagcgtgttccataacttttttatcagcaacagcttcacctacacccatattcaaggtgattttttcaatacgtggaacttccattactgatttgtaaccaaattgtttaaccaattcaggaacaactgtatctttataaaactctctcaaacgagccatgttatctccttatgctccaatgatagagccatttgatttgaagaaacgaacgcgtttaactttgccttcattttcaatcagcttaataccaacacggtctgctttattagtttccggattcaggattgcaatattagaaatatccaaaggcatttccttagtaataatgccaccctcaataccacgcattggattaggtttttgatggcgtttcacaacattaacaccctcaacaacaactttatcacccaacactcgaactacttgaccttgcttacctttatctttaccggtaatcactacaacctgatcgcctttaatgatcttattcatcgcgctattccttataatacttcaggcgccaatgaaacgattttcataaatcgctcagtacgcaattcacgggttaccggaccaaaaatacgggtacccagaggttcaagtttattattcaacaacacagcagcattgttatcgaatttaattaacgcaccatcaggacgacgcacacccttagcagtacgaacaactaccgcattgtatacatcaccttttttgacacgaccacgtggggctgcatctttaactgcaa

SEQ ID NO: 2715 - DNA, 13859 bp, synthetic construct
  misc_feature 1..13859: note = Synthetic
  source 1..13859: mol_type = other DNA
gccagattatccgccgccgccccgaaaagctgctgctgttcgagttatccgaattcgccctgtacgccatcgaaaaagaattgcgcgaaacctgcatccaaaaacgcctcgacaccgaaatcctgccctttctcggttcggtgcaaaaccgcacgctgctcgaacacgtcatgaccgccttttccgttgcgaccgtctatcacgccgccgcctacaaacacgtccccatggtcgaattcaacaccgtcgaaggcatacgcaacaacatcttcggcacactcgagtgcgcgcttgccgccacgacatcgggcgtaagaactttcgtcctcatctccaccgacaaagccgtccgccccaccaacaccatgggtgccagcaaacgcatggcggaactctgccttcaggcactcgccgccgaacccggacagaaaacccgcttcagcatggtacgtttcggcaatgttttaggttcgtccggctccgttgtcccgctgtttgaaaaacagattgcagaaggcggcccgcttaccctgacccaccccgacatcacacgttatttcatgaccatacccgaagccgcccaactcgtcatacaggcaggcgcgatgggtacgggcggcgacgtattcgtcctcgacatgggtgaatccgtcaaaatcatcgaccttgcccgccaaatgattaccttaagcggcctcaaacccaaaacacccgaacaacccgacggcgacatcgaaatcctcattaccggactgcgtcccggcgaaaaactctacgaagagctgctcatcggcgacaacgtccgcaaaaccggccatccgcgcattatgacggctgacgaggcgatgctgccgtggcacgagctctctgtcctgctcgaccgcatccgtgcggcctgcgaccgttacgaccagcaggcaatccgcaccctgctcatcaacgccccgaccggctttaccccaagcgacggtatctgcgacctgctttgggtacgagaaacacacagaaaaaatgccgtctgaaccttcagacggcataacgtacaaaccaacctaccttacacacacacggagtttgacatgcagttttcggcattcggcgaaaaattcacgcaacacagcggcatcctccaactgatggacgacctcggcgacgcgctcaaaagcgacaagcccgtcaacatgctcggcggcggcaacccggcgcgcattccggaaatcgatcgggcgttcgccgacatattctccaaactggcggcagaacacgccgtcgaaaacatcggcaactactccaacccccaaggcgatgccgcgctgattgacgcgttgaccgccttcctcaaccgcgaatacggctggaacctgaccgccgacaatatcgcgctgaccaacggttcgcaaaacgcgtttttctatttattcaacctcttcggcggcaaattcaagctttcagacggcacatccgcagaaaaagccattttgttgccgctcgcgcccgaatacatcggctatgccgacgtacatatcgaagggcagcacttcgtttctgtcaagcccaaaatcgaaaacgtcgaacacgaaggcgaagcaggcttcttcaaataccgcgtggactttgacgcactggaaaacctgcccgaactcaaagcgggcaaaatcggcgcgatttgctgttcgcgcccgaccaacccgaccggcaatgtgttgaccgacggcgaaatggcacgtttggacgctttggcgcgtgaacacgggattccgctgattatcgacaacgcctacggaatgccgttccccaacatcatttacagcgacgtaacgctgaattggcacgaaaacatcatcctctgcttcagcctttccaaagtcggcctgccgggcgttcgcaccggcatcatcgtcgccgcgcccgaagtcgtcaaagccgtcagcagcctgaacgcgattgtgaaccttgcccccacgcgcttcggcgcggccatcgccgccccgctgctggaaagcggcgagatgaaacggcttgccgaccaagtcatccggccgttttaccgcaatcaggcgcaaaccgccgtctcgctgctcaagcgcgagctgggcgcgtacccgatgaaaatccacaaacccgaaggcgcgattttcctgtggctctggtttgaaaacctgcccgtttcttcgcaaaccctgtacgaaatgctcaaagccgaaggtacgctgattattccgggcgagcatttcttcgtcggcatcgacacgcgggattacccgcacgcgggcgagtgcatccgcatgagcatcgcgcaggacgctcaaacgctggaaaaaggcatcgccgccatcggcaaaaccgtccgaaaactgtacgacaacgtttaaaccgcaaaaaatgccgtctgaaaggttttcagacggcatttttatctgcattcaatatcgggaaaaatgcgcccacaccggcctgcagttttccggcagttcgggacacgcgccgagaatgccgccgctaaagtcgtttaaacggtggaagtcgctgcccgcgctggcgagcataccgaagcgttctgccaaaagcgcgtagttgaggcggtcgtttttgcagcagttgccgctgtggacttcgatgcctgcgccgccgaggtttttaaattcttcaaacagattgcgcttggcggtggcggacaaatcataacgcatcggatgggcgatgaccgccaacccgcccgcgccgttgacggcggagacgcagtcttccagcgtcgcccattcgtggcggacggcgcaggatttgccgtcgcccaagtatttggtgaacgcctgctgcttgtttttgacgtgtcccacccgaatgaggaactcggcgacgtgtgtgcggctgaccatttctttgtttgccgccagcgcgagcgcgccgtcgtatgcgcccgaaatgccgcgtttttccagcttggcggcgatggcttcgaggcgtttcagacggccttgccgcacttgcgccaacaggttttgcaggttttcgtcttgttcgtcaaagtctaagccgacaacgtgtatggtacgcccgcgccacgttacggagatttccacgccgttaatcaggcgcaaaccgagcctgtcggcttcggcacgcgcttcggcgatgccgccggtgtggtcgtggtcggtcaacgccagcagcgtgcagccgttttgatgcgcgaggcgcacaacttcggcgggggagagcataccgtcggaaacggtggaatggcagtgcaggtctatcataaggcgttatgtgcgtggtaaatggtgggcagggtgtttcaatattgtcgggcggtgtggcggcggtgatttcaaaaaacaagtgtatggcaaatgcaaaggaaaagccgctatgccgtcattcccgcgcaggcgggaatctaggccgttcggtttcgggtcatttacgataaatttttgatttattggaaatgtttaaggttaaccgctatttcaaacttccggattcctgctttcgagggaatggcgatatgaccgttttcaattttaatctactataaaagactgtctgaaaacgtggttttatcaagccgaactggtttcagacggcattttcgtcttccgcccaacccgcttctttcaacttccgccgttgcgcgtcgtagcgtgccttatccgcccagtaaatcgtctgaatgcacgcctcgccgcagtcgctgccacagcattcccacaactcagggcggacgggttcttctaaaagcggctcgcccaaaagggcttcggctttatacttcagggtcgtatccatcggcgatttccaagcgcgcgccgtcaaactcgatgacttcgccgccgcgtattttggcggttttacgggtttcggtttcgccgttgcgcaacaccagcccttcggcgataaatgcttttgcctgtccgccgctttcggcaagtccggccaatttcaagaggtcgcacagggcgatgtattcgttgtcttcgagatagacggtggcttccataatgttcccttgcagaaagaggccgttattgtagcacctgccgccgccgtacccaaaattaccgcaaaaccggcagcacatcccacaccagctgttccgtaaaagtaaaaatgccgtctgaaaccccatatgccgccatccgatcaaagaaatcctgtccaacggcaagctgcaaatcctgttccccgacgaatccgcattgacgctgatgcacatcctcaaacgcgaactgcccgatacaccggcaatcggcatcaaaacgaaatcaaaaacctgtttgaacgtaaaatcgatttaactgcttgccatccgtccgaataatgtatatagttctttataactagtttgatagtcctttatatctatcaatactccttgggaagcctccaccacacggtaggaggcatttttttgccgtcgtaaaagctcaaaaacatttgcaggtcatgccgtctgaatccgaaacagcattacctacaccgccatctaaagacaaccctgctacaatacgccttttattgttcacgccgattttgccatgaccgagccgacctacatccccctgcgcctgcataccgaattctcgattaccgacggtatggtgcggattaaaaaactgattgccaaagcgcaggaatacggtttgcctgctttgggcatcagcgatttgatgaacgaattcggtttggtgaaattctataaaacctgccgcggcgcagggattaaacccatcggcgcggcggacgtgtggataggcaatccgaatgcgcccgacaagccgttccgcgccatgctgattatccgcaacgatgcgggctatctgcgcttgagcgagcttctgacggcggcttatgtcggcaaagaccgcaatatccatcatgcggaactcaatcccgaatggctggaaaacggcgacaacagcggcttgatttgtttaagcggcgcgcattacggcgaagtgggcgtgaatctcttgaacggcaatgaagacgcggcgcgtgcggcggcgttgaaatatgcggcatggtttcccgatgcgttttatttagagctgcaacgcctgcccgaacgccccgaatgggaggcttgcgtttccggcagcgtgaagctggcggaggaactgggtttgccggtggtggcgacccacccgacgcagtttatgagccgcgacgatttcaacgcgcacgaggcgcgggtgtgtatcgcaggcggctgggtattgacggacaaaaaacgtccgcgcgatttcacgccgggccagtttttcattccgccggaaaccatggccgaacgtttcgccgatttgcctgaagccttggaaaacacggtagaaattgccaaacgctgcaacctgcacatcacattgggcaaaaacttcctgccccttttccccacgcccgacggtttatcactcgatgactatctcatcaaactctccaacgagggtttgcaggaacgcatggttcagctttatcccgacgaagcggaacgcgcagaaaaaatgccggaatatcaggaacgtttggattttgagctgaacatcatcatccagatgaaatttcccggctatttccttatcgtacaagactttatcaactgggcaaaaacgcacggctgtccggtggggccggggcgcggttcgggcgcaggctcgctggtggcgtattcattgaagattaccgaccttgatccgctcaaatacgcgctgctgtttgaacgtttcttaaaccccgaacgcgtctccatgcccgacttcgacgttgacttctgtcaggcaaaccgcggccgcgtgattgagtatgtgcgcgaaaaatacggcgcggaggcggtcagccagattgttaccttcggcacgatgtcgtctaaagcggtcatccgcgacgtggggcgcgtgttagagctgccgtttatgctgtgcgacaaactgtccaagctgattccgttggaagccaacaaacctctgggtttggacgacgcgatgaaggcggagccgcagattcaggaattaatcgaagcggaagaagcggacgaactcattacgctggcgaaaaagctggaagatttgacgcgcggtctgggtatgcacgcgggcggcgtgttgattgcgccgggcaagatttccgattacagccccgtgtatcaggcggatgaatccgcctctcccgtatccatgtacgacaagggcgacgtggaagacgtgggtttggtgaaattcgactttttaggtctgcgtaacctgaccattatcgaaatggcgcagaacaacatcaaaaacaccaccggcgatatcgtcgatgtcggcaaaattccgctcgacgaccaagccgcctaccaaatcttccgagatgcgaacaccaccgccgtgttccagttcgagtcgaccggcatgaaaaaaatgctgaaaacggcgcatacgaccaagtttgaagaactgattgccttcgtatcgctctaccgccccggcccgatggacaacatccccgacttcgtcgcgcgcatgaaaggccaggaattccaatacatccatccgctgctcgaaggcatcctcgcgccgacctacggcattatggtgtatcaggaacaagtgatgcaggcggcgcagattatcggcggctactcgctcggcggcgcggacttgctgcgccgcgcgatgggtaagaaaaagcccgaagaaatggtgaaacaccgcgaaatcttcgccgaaggcgcggcgaaacaaggcatttcgcgcgaaaaatccgacgaaatcttcaactacatggaaaaattcgccggctacggtttcaacaaatcccacgccgccgcctacgccctgatttcctaccagaccgcatggctcaaggcgcactaccccgccgaatttatggcggcgacgatgtcgtccgaattggacaacaccgaccagctcaagcatttctacgacgactgccgcgccaacggcatcgagttcctgccgcccgacatcaacgaatccgactaccgcttcacgccgtatccgaacatgaaaatccgctacgcactcggcgcgattaaaggcacgggcgaagccgccgtcgaatccatcatcgccgcgcggcaaagcggcggcaagtttaccggcctcttggacttctgcgagcgcgtcggcaaagaacatatgaaccgccgcaccctcgaagccctgatacgcggcggcgcgttcgacagcatcgaacccaaccgcgccatgctcttggcaaacatcgacctcgccatgaacaacgccgaccaaaaagccgccaacgccaatcagggcgggcttttcgacatgatggaagacgccatcgaaccggtgcggctcattgacgcgccgatgtggagcgaatcggaaaaactcgccgaagaaaaaaccgtcatcggcttttacctgtccggccacccgttcggcccgtatgcccaagaagtccgccaaatcgccccgcagaaactgtcgaaactcaaaccgcaagacagcgtgcgcctcgccggattcgttaccgccgtgcgtacgatgatgggcaagcgcggcaaaatcgccttcgtcagccttgaagatttgagcggacaggttgaaatcatggtcggcggtcagacgttggaaaactgcgccgactgcctcaaagccgaccaagtgctgattatcgaatccaaagtcagccgcgacgactacggcggcggcgacgggctgcgtattctggcaaaccaagtcatgaccctgcaaacggcgcgcgaacgctacgcccgcagcctcagcctcgccctcgccccgcatcacgacatcggcgaactggtacaactgcttgccgcccaccaactgcccgacacgccgcgcatcccgctgcaactgtcgtatgccaacgaaaaagcgtcgggcaggcttcaagtgccgccgaaatggacggttacaccgagctccgcattgttcggcgaactggaaacattgctcggcagccggtcggtgcgcgtcaactggtaacccaaaatataaatgccgtctgaagcccaaaatcggtttcagacggcattttttaaccgaaataaacgatgccccttaaagcagaagctttaaggggcagagcgttgcggcacatcttttcagacggccttattgtagcaacggttctcatttcgcagtgcgacaatatgtttgggattctagccgttgtgagatgataagtcaataatctatttgtatataaataagacaataagatatattatcattatttgcaacgttgtttacggagtaataaatggctgccttcaaacctaatccaatcaactacatcctcggcctcgatatcggcatcgcatccgtcggctgggcgatggtagaaattgacgaagatgaaaacccaatctgcctgattgatttgggcgtgcgcgtatttgagcgtgccgaagtaccgaaaacaggcgactcccttgccatggcaaggcgtttggcgcgcagtgtccgccgcctgacccgccgtcgcgcccatcgcctgcttcgggcccgccgcctattgaaacgcgaaggcgtattacaagccgctgattttgacgaaaacggcttgatcaaatccttaccgaatacaccatggcaacttcgcgcagccgcattagaccgcaaactgacgcctttagagtggtcagcagtcttgttgcatttaatcaaacaccgcggttatttgtcgcaaagaaaaaacgagggcgaaactgccgataaagagcttggcgctttgctcaaaggcgtagccgacaatgcccatgccttacagacaggcgatttccgcacaccggccgaattggctttaaataaatttgagaaagaaagcggccatatccgcaatcagcgcggcgattattcgcatacgttcagccgcaaagatttacaggcggagctgattttgctgtttgaaaaacaaaaagaatttggcaatccgcatgtttcaggcggccttaaagaaggtattgaaaccctactgatgacgcaacgccctgccctgtccggcgatgccgttcaaaaaatgttggggcattgcaccttcgaaccggcagagccgaaagccgctaaaaacacctacacagccgaacgtttcatctggctgaccaagctgaacaacctgcgtattttagagcaaggcagcgagcggccattgaccgataccgaacgcgccacgcttatggacgagccatacagaaaatccaaactgacttacgcacaagcccgtaagctgctgggtttagaagataccgcctttttcaaaggcttgcgctatggtaaagacaatgccgaagcctcaacattgatggaaatgaaggcctaccatgccatcagccgtgcactggaaaaagaaggattgaaagacaaaaaatccccattaaacctttctcccgaattacaagacgaaatcggcacggcattctccctgttcaaaaccgatgaagacattacaggccgtctgaaagaccgtatacagcccgaaatcttagaagcgctgttgaaacacatcagcttcgataagttcgtccaaatttccttgaaagcattgcgccgaattgtgcctctaatggaacaaggcaaacgttacgatgaagcctgcgccgaaatctacggagaccattacggcaagaagaatacggaagaaaagatttatctgccgccgattcccgccgacgaaatccgcaaccccgtcgtcttgcgcgccttatctcaagcacgtaaggtcattaacggcgtggtacgccgttacggctccccagctcgtatccatattgaaactgcaagggaagtaggtaaatcgtttaaagaccgcaaagaaattgagaaacgccaagaagaaaaccgcaaagacagggaaaaagccgccgccaaattccgagagtatttccccaattttgtcggagaacccaaatccaaagatattctgaaactgcgcctgtacgagcaacaacacggcaaatgcctgtattcgggcaaagaaatcaacttaggccgtctgaacgaaaaaggctatgtcgaaatcgaccatgccctgccgttctcgcgcacatgggacgacagtttcaacaataaagtactggtattgggcagcgaaaaccaaaacaaaggcaatcaaaccccttacgaatacttcaacggcaaagacaacagccgcgaatggcaggaatttaaagcgcgtgtcgaaaccagccgtttcccgcgcagtaaaaaacaaacggattctgctgcaaaaattcgatgaagacggctttaaagaacgcaatctgaacgacacgcgctacgtcaaccgtttcctgtgtcaatttgttgccgaccgtatgcggctgacaggtaaaggcaagaaacgtgtctttgcatccaacggacaaattaccaatctgttgcgcggcttttggggattgcgcaaagtgcgtgcggaaaacgaccgccatcacgccttggacgccgtcgtcgttgcctgctcgaccgttgccatgcagcagaaaattacccgttttgtacgctataaagagatgaacgcgtttgacggtaaaaccatagacaaagaaacaggagaagtgctgcatcaaaaaacacacttcccacaaccttgggaatttttcgcacaagaagtcatgattcgcgtcttcggcaaaccggacggcaaacccgaattcgaagaagccgataccccagaaaaactgcgcacgttgcttgccgaaaaattatcatctcgccccgaagccgtacacgaatacgttacgccactgtttgtttcacgcgcgcccaatcggaagatgagcgggcaagggcatatggagaccgtcaaatccgccaaacgactggacgaaggcgtcagcgtgttgcgcgtaccgttaacacagttaaaactgaaagacttggaaaaaatggtcaatcgggagcgcgaacctaagctatacgaagcactgaaagcacggctggaagcacataaagacgatcctgccaaagcctttgccgagccgttttacaaatacgataaagcaggcaaccgcacccaacaggtaaaagccgtacgcgtagagcaagtacagaaaaccggcgtatgggtgcgcaaccataacggtattgccgacaacgcaaccatggtgcgcgtagatgtgtttgagaaaggcgacaagtattatctggtaccgatttacagttggcaggtagcgaaagggattttgccggatagggctgttgtacaaggaaaagatgaagaagattggcaacttattgatgatagtttcaactttaaattctcattacaccctaatgatttagtcgaggttataacaaaaaaagctagaatgtttggttactttgccagctgccatcgaggcaccggtaatatcaatatacgcattcatgatcttgatcataaaattggcaaaaatggaatactggaaggtatcggcgtcaaaaccgccctttcattccaaaaataccaaattgacgaactgggcgaagaaatcagaccatgccgtctgaaaaaacgcccgcctgtccgttaaattaatctatccctgtttcaggcggcctgaagcagggattttttatataaaaataaggggaaaaacatgacttggcgcagcctgcttattcaaaacggcggcaaactatccttgcaacgccggcaactgctgattcaacaaaacggcgagtcccacaccgtaccattagaggacatcgccgttatcatcatcgaaaatcgcgaaaccctgattaccgccccgctcctatcagccttagccgagcatggtgcaaccctgctgacctgcgacgagcagttcctgccctgcggacaatggctgccttatgcccaatatcaccgccaacttaaaatcctcaaactgcaactgaacataagcgaacccttaaaaaagcaactctggcaacatatcgtccgccaaaaaatcctgaaccaagcatttgtcgcagacgaaacaggcaatgatcttgcagccaaacggctgcgcactttggcatctgaagtccgttcaggcgatacaggaaaccgtgaagcccaagctgccgccctctactttcaagccctctttggcgaaaaatttacccgtaatgacaacaacgccgtcaatgccgcattgaactacacctacgccgtactccgtgccgcagttgcacgcgccctgaccttatacggttggttacctgcattaggcttgtttcatagaagtgaactcaatccatttaatctcgccgatgactttatcgaacccttacgcccattggccgacctgaccgtgatacatttgtacgaacaaggccgtctgaaaactgaactgacgctcggcatcaaacaacacctcatcaaaatcctctactatcaaaccagcatcgaacggcaacatttcagcaccttggctgccatcgacaaaatgatttcgtcatttcaagccggcgtaaccgataaaaacgccaaacaactgaaactgcctgaaatcctaccattgaaagaataccaatatgagtgaggccaaatttatgaggattatcgtcttcttcgacctaccggttatcacggcggcaaagcgcaaagccgccaatcaattccgccagtttttattaaaagacggataccaaatgctgcaactttccgtatacagccgtatcgtcaaaggccgcgattcgttgcaaaaacaccacaacagactgtgtgcaaaccttccgcaagaaggctcaatccgctgtttggagataacagaaaagcaatatgccgccatgaaactgctgttgggcgagctgaaaacccaagaaaaaaaggtcaattcagaccaattattgttattttaagcccattttttcataacaaataaaacgggaaacccttatgaaataaggatttcccgtcgaagtattgtagcactgcgaaatgagaaagggagctacaacaaatgttcaagccggatgaaaacggcataaattgtagcactgcgaaatgagaaagggagctacaacaaagaaagcgagcttgtaaaaaggcagaagattgtagcactgcgaaatgagaaagggagctacaactaaaaaaggcagaacaattacaaaaagaaaattgtagcactgcgaaatgagaaagggagctacaaccaaaatcttatgtatgataattggcaggaattgtagcactgcgaaatgagaaagggagctacaacatgctcgagtttccatcatcgacgaatactattgtagcactgcgaaatgagaaagggagctacaactgctttcgggtttttccgtcaatgtcgggaattgtagcactgcgaaatgagaaagggagctacaactaattactcggcgtatgtatttctatttggattgtagcactgcgaaatgagaaagggagctacaacataggatacaaactggtttgcggttttaaaattgtagcactgcgaaatgagaaagggagctacaaccttttgtggcaatggtttccgccgtgggtaattgtagcactgcgaaatgagaaagggagctacaactaattactcggcgtatgtatttctatttggattgtagcactgcgaaatgagaaagggagctacaacatgctcgagtttccatcatcgacgaatactattgtagcactgcgaaatgagaaagggagctacaaccgcatttgcaaaatttagtgggttgccgttattgtagcactgcgaaatgagaaagggagctacaactaactggattgcacacggtcaaagttaaagattgtagcactgcgaaatgagaaagggagctacaacattcgggtcgcaacagaaacctttaccaaaattgtagcactgcgaaatgagaaagggagctacaacaaagaaagcgagcttgtaaaaaggcagaagattg

SEQ ID NO: 2716 - DNA, 13824 bp, synthetic construct
  source 1..13824: mol_type = other DNA
  misc_feature 1..13824: note = Synthetic
aaagtcccaccctttaatcctaagatattacgcggtattagccacagtttcccgtggttatccccctccataagccagattcccaagcattactcacccgtccgccactcgtcagcaagaaagcaagcttcctcctgctaccgttcgacttgcatgtgttaagcctgccgccagcgttcaatctgagccatgatcaaactcttcaattcaagttcaatcgctcaataaactgcttagctaaagtttacatattacttaaagcttctaaagtaaaaatgaatttctagtttaagcacctattaagacttcaaaattaaaaataatttcaacattaagtcaatcaacaagtgcccacacagattgtctgataaattgttaaagaaccattgcttaaccctaaaataaaacaaccctagaatttaagcgaaaataaaacgacgcaccgctaatctcattcacaacagcgcgtcgttgtgtggggcgtattatagataaatctcaaccctttgcaagtaattttttacaaaaaacttgaaaaaaattaccacttgcttaaattaagtacaaattgcagtttacagacaaatcaaaccgtagataattgaataaattgtcgcagtaaaggacgaaaaatggctatcacagagttaaagtatattttaggactggatttaggcattgcctcggtcgggtgggccgtagtagaaatcgacccacaggaaaatcctatcagcttaattgatttgggcgtacgaacctttgagaaagcggaagtgcccaaaacaggtgaatcacttaatctatctcgtcgtttggctcgttcacagcgacgattaattcgccgccgtgctcaccgcctattaagaatgaaacggctgttaaaacgtgagggagtgttacaagcagtggattgtggcaaagattttgccaacttgcggttgccaaataatgtatggtcattgcgcgtagcaggattagatcgctgtttagataataaagaatgggcggcagtattgctacacttggtaaaacatcggggctatttatcacagcggaaaaatgagaataaaactgacgataaagagctaggcgcgttactttcgggcgtgaatgctaatcatcaactcttactagcgaaaacctaccgcagccccgctgaaattgccgagcaaaaatttgcctcagaaaaaggacatatccgcaataaagctggcgattatgctcatacattcaatcggttagatttgcaggcagaaatgcgacttttatttgaaaaacaagcgaaactaggtaatccttacacttcagcctcctttcaagctcaatgcattgatttattgatgacacaacgagctcccttatcgggtgaggcaattttaaacatgttagggcattgcacctttgagccaactgaatataaagctgctaaaaatacctattctgccgagcgttttatatggcttacaaagctgaataacttacgcattttagaaagtggttcggagcgtccactgcttgatgccgaacgccaacaactacttaaccagccttatctcaaagccaagctcacctacactcaggtacgaaaaatattggatcttagcgaacaagctcggtttaatattcgctatcagcgagataaaacattagaagaaagtgaaaaagccaccctaatggaaatgaaatcctatcacgcgattcgcaaagctttagagggagccggactgaaaacggaatggcagggactagcgactaagcctgacctattagacaggatcggcacagcattttcgctgtataaaactgataatgatataagcacttacctcagtgacaaaatcagccagccaatactcaatgctttattggaaaacatcaacttcgataaatttatcaatttgtcattacaaagtttacgcagaattctctctctaatggaacaaggtgagcgttatgacaccgcatgcaaaacgatttatggcgaccattatggcgcaaaatctgctgaattgcagcttaccttgcctgctattcctgctgatgaaattcgcaatcctgttgtacttcgtaccttatcgcagacccgaaaaatcatcaatgcagtggtaaggcgttacggctcacctgcctatattcatattgaaacgggacgagaagtaggaaaatcctttaaagatcgtcgagaaatagaaaaacgtcaggaacaaaatcaagctgaacgccaaagagcggtcgaaaaatttaaagaattgttcccacattttgtgagcgaaccgaaagggaaagatattctaaaaatgcggttgtatgaacaacagcaaggcaaatgcctctattcaggtaaagcgattgatatcactcggctaaatgaaaaaggatatgtagaagtggatcacgctctaccgttttcccgtacttgggacgacagttttaataataaagtgctagtattggcgatcgaaaaccaaaataaaggcaatcaaaccccttatgaatggctagacggtaaacacaacagcttacgctggcagacctttaatgcgttagtacggggttgtcatttcccctatgcaaaaaaacagcggattttaaccgctgccctagatgaagaaagttttaaagctcgcaacttaaacgatacgcgctatgtagctcgttttttaagtcaatttatcacggagaatatgcagcttacaggcgagaaaaaacgccaagtgtttacttcaaatggacagattaccgccctgcttcgagctcgctggggattgagtaaagtacgagaggaaaacgatcgccatcacgccttagatgccattgtggttgcctgtacgacccgtgcgatgcaaaaacggattaccgattttgtacgacaaaaagaaatgaatgcgtttagcggcgaatatgtagatcgcgccacaggcgaaatcaaggcgctccatttccctgaaccttggacattttttcaccgtgaggtcatgatccgagtgtttgacgatcaccctgctgaagaagtgataatacagcttcctagccgcccgcaagccaatcattcattcgtcaccccacttttcgtcagccgaatgcctacacgcaaaatgacgggacaaggtcatttagaaacaatcaaatctgccaagcggttaaccgaaaacctaagtatacaaaaagtgcggttgaattctctgaaactctccgacttagaaaatatggtcaatcgggaacgtgaaaccgaactctatcaagccttaaaagcccgtttagaagcttttaataatgatccgcaaaaagcatttgccgaaccgttctataaaaaaggtggtcagcaagtcaaagccatacgggtagaacgcactcaaaaatcaggcgtaattgtgcgtaatggcaacggtattgccgataacgcatcaatggttcgagttgatgtgtttatcaaaaacgggaaatatttccttgtgccgatttacacttggcaagtggctcagggaatcttgccaaataaagcagtaatagcctatgaagaggaggcaaattgggaggaaatggacgaaaatgctcatttccaattcagcttatatgctaacgacctaattaaattaactacaaaaaaaggtgtattttttggttattattcagcatttaatcgcgcaacaggagcaatagatatcaaggtccatgacttagataaaaaagctgaaaaaacaaaaaatggggtatatcaaggacttggtgttaaacttgccatttcctttgaaaaattccaagtcgatgagcttggcaaagtcattcgagcttgcaaaccgagcaaacgtcagcctgtgcgttaatccaaaccctccctgcttatcctctaactaagcagggatttttataaggagaagaaaaatgtcttggcgttctattctgattagcaacggcggtaaattatccttacttaaaaatcagctctgtatccaacaaacagaaaatacctttaccgtaccgattgaagatattgcagtaattgtaattgaaagtcgtgaagtcgttatcacagtccctcttttgactgcccttgctcaacagggagtaacacttttaacctgtgatgagcagtttttgccctgtgggcaatggttgccatttatgaactattctcgccagcttaaaacattaaaattacagcttgacatgagcttgcctatgaagaagcaactttggcagaaaattgtcaaacaaaaaatttataactaagccaaagcccttattgagatgaggcgagcggatttagcgaaaaaattgcaaggtatcgcccaaagagttaaatcaggcgatcaagacaatgcggaagcctatgctgcacaatgctatttccaaatcttcggtaaaggttttcatcgtgcccaagaaaacgcaattaatgcccacttaaattatgcttatagtgtgctacgttccgccattgcccgtgcgttaaccttatatggttggctacctgcgtgggggatttttcataaaagtgaagtcaatccttataaccttgctgatgattttattgagccatttcgtccacttgccgatctgctggtttggcagcttggccaagacaaccaactaacccatccccttaccccacatgcaaaacagcgattaatcaagttattacattatcaaatacaatttaatgggcaggtttttagcctattagccgcaatcgatcgcacggttggttcattgcaaacagcgctagtaagtaaaaacgcagatttgctaaaattacccgaaatcttaccgcttaaggaacaccaatatgagtgagagtttatttatgcgcctaattgttttctttgacctacccattactaccaaagctaaaatgcgagcagcaaatcaatttcgccaatttttactaaaagatggctaccaaatgctacaactttccgtctattcacgcattgtgcgtggccgagatgcattaatcaaacataataaaagactagttgctcacttacctgaagagggatcggtaaggtgtttggaggtaacggaaaaacagttcgccagtatgctgattttacttggagagaaaaaagtgcaagagcaaaaagttaatgcaaaccaaatgctacttttttagtgattttagtttaaccatctcactataatgatccataaaatcatcatctaattgtatgtattttgaactaaataaaagtaaaaaatggcgttgtaagtacaatatacacgccatttttagcctcaaacattaaaatataagcgatagaaataagcaaaaaactacttaaatgctaccgcttaaaccttaatttttatgaaaatttctcgaaagaaaacttcataacccattgattataaatcacttaaagcgaccctattgtagcacagcgaaatgagaaagggagctacaaccaatgaatcgtaaatatcgctttgatgtggattgtagcacagcgaaatgagaaagggagctacaacggttaggcattcaagcagtgacgctcacgaattgtagcacagcgaaatgagaaagggagctacaacacgatacttaggatttatttccatcaatattatttaaggaaagaacctataccacaatttctttcgctaattcatttgccgcttttgatgattgtcgaactggtgcagataatttatcaactgcacctaataatactgataattgtagattattcatgtttttttctcgatatctattgacaattttttcttttgtcctaaaaataaatgaaaggagataattatgggatttctatttcttagcgcgttgtctattatttcgtttggtttaatcctctcgttattgttagctgttatttttttacccttagcctttttctttggtatagggagagtttttttttgatagttatatttccgcgacaacatttgaagataaattcttaattattttatctgcattgtttttatttgctatccctgtattttattttggtttaaatataggatttcttaattccctattgatgagctttcttgttttttgcgtgctaggttgttgttatcatgtaagacaaaaagtaagtaaaaagcttacctctccaactgttcaataaccaaactctcaatcatatccaaatccagctcactaaaacccaacaactcatgctaaacgcaggagagatagaccatattgtgtgcttttccaattcgtccaataattcattagatctttcttctgattttttgagttgtgccaagacttatgtgatcttatttgacagtaatcatttcatcgtccataatacctacgttgttgcacagcgaaatgagaaacgttgctacaataagattgttctgaaaagaatatatcgcaaagctctgccccttgatgttctacattaaggggcatcttttttggatatttttaacgcttgtcttccttgtgttttctctttaaactcttcttaactttcatcaacttggaggattatatgaataaaacccattttatcggtttaggggtggctggcaattttgctgggcatttggaacaagcgggcgaagcggctgattttttacaagtaaaaacagatgaagccattcaacccaaagcgatttttccgttttatgtgccgagcaacacgcttgccaatagcgaacaatttttatctacctatcccctttctcatgataggatcgcatttccacaagatgccgataaccttcaaattgaacccgaagtcgcattaatttgtgacgtatattacgacggtaatcaggtgattgaacttaaacctactcattttgcagcctataatgattgttcaattcgtcgccccaatgcacggaaaatctgtgagaaaaaaaactgggggccaaactccaaaggcatttccgcaactcaaattgcactggatcactttgacgaggggggaatattagatcactataacattgcttgcttccataaacgtaatggcaaacttaatacttatggtgagaatagccctgtcgttagctatagttattttcatcaaaaattactgaattggattgtagataaaatgaaccatcagcccgatcaaggcccgatgaaccacattgctgagttattaaaacaagccaattacccaactcaagccgtaattagtattggcgccacacgctacacagaatttggtgaaagcaatttcttacaagtgggcgatacgagtattgtggtcgtttataatgcgcaaaaatacactcaagaacaaattgtcgaaatggcagaaaaagaacaatttagtgaagatatttcagccctcatacaatctgttatttaagtcttttataaagtgcggtaaaaacattgatattttttaccgcactttctccttatttctttttgatcttttcgatcacgatcgcaaaaattccccgctaagctagtatgcgcttttcattcgagctacagtacttcctcgatccggaggtgagtatgcgttatattattttttgcttatgctgtttatgtcaagtattaacaagctatggaaatgtcatgttagtcaatacttataaaaatgaagatttacagaattgggtaatgagcgaaaaattagacggtattcgcggttattggaacggtacggcattatttacccgcaataacacgcccctttctccacctcattattttacacagcacttcccaccttttgctattgacggtgaattatttagccaacgaaatcaatttgaggaaatttcatctatcgtccgttcgcaggaagacaaaggctgggataaactcaaactctatgtatttgatgtgccacatgccgaaggcgacttatttcaacgtttacagcacctacgtgattatttagcaaagcaccccacgccttatatcacgatcattgaacaaattcccattcaaaatcaagcacaagttttacagtttctacaccatattgaacagcaaaaaggcgaaggcattattgtccgtgatccttctgcaccttatgaaactgggcgcagctcgaaaattttgaaaataaaaagtacattagacgaagagtgtacggtaattgcccatcataagggcaaagggcagtttgcaaatgtattaggcgcattaacttgcgagaaccatcggggacaattcaaaattggttcagggtttaaactggaagatcgtattaatccaccagtaatcggcagcgtcatcacttataaataccgtggcatcactcacaacggtaagccacgatttgcgaccttttggcgagaacggaaaaatgaataaaaatagaccgcactttaagtataatggatttacactctcctatcaaaagtgcagtcatattttaaaatgttttattccaccataaaacaagcgattttagtaccgtcatcatactccctaagtactggctgttcctgtttacaacgttcagtcgctaaacgacaacgcgcatgaaatgcacaacctttaggcggattcaacggacttggcaattcaccttctaatttaatccgctcacggcgcagctccggtgataatcttggtgttgctgacaataacgcttgtgtataagggtgacgagggtggctaaaaatttgctgcgcagtcccttgttcaacacaacgccctaaatacatcaccatcacatcatctgcaatatgttccacaaccgataaatcgtgggaaatgaacacataagacagtcctaattcattttgtaagtccatcattaaattcaatacctgtgctctcacagatacatcaagtgcagaaaccggttcatcggccacgacaatatcaggacttagcattaaacctctagcgatggcaatccgctgacgctgcccacctgaaaacatatgcggataacgatcataaaactcagggcgcaatccgactttccccataatatctaatactttcgctttccgctcagctgcggaaagatcagtattaattaataacggttcttctaaaattgaccccacttttttacgcgggtttaaagaaccataaggattttggaatacgatctgaatttttttacggcgtaatttttgggtttctttatcattcaccaaaaaattctggccattataatacagctccccttcagttgggtgttcaatcatggtgagtaagcggcctaatgtggatttaccacacccagactctcccacaactgccaatgttttccccttttctagtcggaaagacacaccatctagcgcttttacggtttttgcttcgccaaatatcccttttttcactggataatatttttttagatttaccgcatccaacaacggtgcagcttgctgttgctcagacatggcttggtactccttcagcattaagcggggtatgacatttgacttggcgcgcccctaattgtcgtaactccggttcgacctgacgacaatgctctgtggcataggggcaacgcggatttaataaacaaccttgagggcgatcatatttacctggcacaacacctggtagtgattcaagacgtgatttcccttccgaaaattccggcaatgaacgtaataatgcttgggtataaggatgtttaggtgctttaaaaatctctaccgcacttccctcttccacaacttgtccagcatacatcacgataatacggtgtgctgcttctgctaccaacgctaaatcatgcgtaatcaaaatcagcgccatattttctttttgctgtaactcaagcaataaatccataatttgcgcttgaatggtcacatctagtgcggttgtgggttcatcagcaatcaataatttgggtttacacgctatcgccatagcaatcataacacgctggctcattcctcctgaaagctggtgtggatacacctccatacgagacttaggatcaggaatccccactaatttgagcaattctaacgtgcgcgcataacgtgctttatggctgccaccttgatgaactttgagcgcctccataatttgatagccaacggtataacaagggtttaaacttgtcatcggatcttggaaaatcatcgacacttcagccccaaccaatttgcgtttttctttttccttcatcgctaataaatcggcattatcaaatgataacgcctcagcgctaacgcggccaggatgtccgattaatcccataattgcaagtgaactcaccgatttgcccgaacccgactcacctacgatacctaatacttccccttgctccacctgataactaatacgatccactgctttaaatggcgtagtgtcatcgccaaaatggacggaaagctgatttacctctaataaagccattgctctcctcctattgttttaattttggatcaagggcgtcacgtaaaccgtcccccattaagttaaacgctaataccaataataaaatggcgatgcctggaatggttaccaaccagtttgcagattgcataaacccacgcgattctgcaagcatcgtgcctaactctggtgttggtggctgcgccccgatacctaagaaaccaagcgcggctaattctaaaattgcgttagaaatgcccatcgtcatttgcacaatgaggggcgcaagacaattaggtaaaatcacaataaacataagacgaaaaacgcctgcacccgccacacgagaagccaccacataatcacggttaatttcattcaatactgaagcgcgggttaaacgcacataacttggaatcgacacaaccgcaatagcaatcgcagcattgactaaagatggacctaaaatcgtcacaaccccaatggttaacaataaactcgggatagctaacatgatatccacaaagcgcatgatcactacatcaattacaccaccatagtatcccgctaataaacctaaaatcactccagcaacacaagacatgatcacgatgattaagccaataaaaacggacaatctcgcgccatgaataatacgagataaaatatcacgtccaatatcatctgtacccagtaaataggcactatttccattagcaaaccatgccggcggtaataataaatctgaacggtgctgttctaacggactatatggggcaatttgattagcaaaaaggcaaactattgtcaccaatacaataaagcttaagccaattaccgcccctttattttgtctgaaataaaaccaaaactcctgtaaaggcgtttttggcaggggcgcataagtttctgttgtcgttgacatttgtcactccaatttaaaatctaacgatggcgaatacgtgggtttacaatgccgtaaaccaaatctacagttaaattcaccaaaataataattgtcgcaataattagcactgagccttgtaaaaccggataatcacgcgcattaatcgcatcaataatccatttaccaataccaggccacgagaaaatattttcagtcaataccgcgcctgataataattgtcctacaattaatcccacgactgtcacaactggaattaacgcattacgtaaagcatgcacaatcacaatacgtgtcatactcagaccttttgcacgcgctgtacggatataatcctctcctaatacttctaacatagatgaacgtgtcatacgggtcacaaccgccagcggaatcgtccccaatacgatggcaggtaggattaaagatttaatcgccgcaacaaatgcccccggctcattcgatcgccacgtatcaattaacataaaacctgtttcagcttcaatccaatattctgatggcaaacgcccaccagccggtaatcccaatggagtggaaaaatataaaattaaaattaatccccaccaaaaaatcggcatagagtaaccggttaaagataaagacgtcacaatatgagagagccatgaatcctttttaactgcggcaattacgcccagtgcgataccaaaaatcagcgaccacaatagtgcaaaaaaagctaactcgaccgttgcaggaaacaacgtaaaaaattctttcaatactggctcattattacggaaagagctaccaaaatcaccctgtagaacattccccacataagttaaatattgttcatgtaatggtttatttaagcctaattgctccatcatttgcgcatgaacttcagggctgacaccccgctcccccattcggatctcaataggatcgcctggaattaaatgaactaaagcaaacgtaattaatgtaatcgctaaaaaggtcgggattatcatcaagatacgtttgaaaacaaattgaaacataatcattctcttaaagaattaaagcgcggtgcattttcaaaaacttttttaaaaagcaccgcacttctataagtaaaaagaaattattttgctagatcaacaccatagaatgggtgtaagccaaacgggttaatcacataattttgtacttctttgcggagcggttgatacgttgttgagtgtgcaatagtaatccaaggcgcttgctctttaaagatgacttgtgcttgttcatacaatttagcccgctctgcttgatcagcgatttgtgatgctttgaccactaactcatcgaatggtttataacagaacttcgcataatttgaaccttgctcaaccgcagcacagcttaataaggtattcaagaaattatcaggatcgccgttatcacctgtccaccccatcatgccagttggatcatcaccgttacgcatacgttttaggtattcaccccattcatagctcacgattttcgcttttacgcccactttttcccagtctgcttgcactaactccgccatacgacgagcatttgggttatatggacgagacactggcattgcccaaagttctgtttcaaaaccattttcaaaacccgcttcttttaataaggctttcgctttttcaggatcatattcataatctttgacagcctcgttataaccccacattgtcggtggaattggatttttcgctacttgccctgcgccttgatataccgaagttaaaatagcttctttatttaccgcatagttcaatgcttgacgaactttcacatcatcaaatggttttttctgaacattaaaatgtaaataaccgacgtttaatcccgcttcttttaacaaattaatttcgctatctgttttcattttttcaatgtctgccggattcggataaggcatcacatggcattcaccttttttcaattttgcatagcgaactgacgcatcaggtgtaatcgaaaatacgagacggtcaattggtgctttaccttcccaataattttcaaaggctttataacgaatagtagaatctttttgataagacacaaattcaaatggtcctgtgccaatcggcgcggtatccactttttctagtgtccctgctttttgcattttatcggcatattctgcggaatgaatagaagcgaaatccattgctaagtttgctaaaaacggagcgtttggtacgtttaaactaattttcaccgtataatcatcaagcttttccactttagaaataatattttgcatatccataccgatgaaatattcatatgccccaccagatactttatggtacgggtgatttggatctaactgacgattaaaagagaaaagtacgtcatcggcattaaagtcacggcttggggtaaaatctttattgctgtggaatttaacgcctttacgtaaataaaaggtataggtttttccgtcctcagaaacgtcccatttttcagccaaagatgggataacgtcggtttttcccttttcaaaagtggtcaaacggttaaaaatttgctgaccagaagcatcaatacttgcaccatctgttaccaattgtggatttaaataggaaggtgaggcttcagaaca

SEQ ID NO: 2717 - DNA, 12669 bp, synthetic construct
  source 1..12669: mol_type = other DNA
  misc_feature 1..12669: note = Synthetic
gaacgcctgtgggtgaatccggactgcggcttgaaaacccgcggctggaaagaaaccattgagcagctgcaagtgatgatgaatgtgaccgaaaagctgcgcaaagaattggcctgatttttgggttagttttaattgagtagtagaaggccgtctgaaaggggaatctttcagacggccttttatattgcctcctacgcaaatggcgtaaattcttgttaaatgtttttaaccgatatttgagagggatttgaaatgccaatttgctactataccatcacaccgcaatcgcacataaatcccggttacctacatctgtcgcgtattcgttgattgtcaagatggcctgaccatttgcgaaacaaaaatttcccagttttatttcccaatggccagtaatccgccttttttgttggttttttttgttagtttaggtataaaaaaacgatgtcccttaaggccgaaaccttaagggacagagcgttgcggcacacctttcggtggccttattgtagcaacgtttctcatttcgcagtgcgaaaatggaaccaattctacggcggtagaataactttgtcaataatttaattgcataaaaatacctgaatgagatatatttatgtttaacatttccatacaaagggttaacgatgattaccacaaaattaaaaccgatgaattatattttgggcttggatatcggcattgcttcagtcggttgggctgtgattgagattgatgagcaggaaataccgaagtgtttaatagatgtcggtgtgcgggtattcgaaaaggccgaaacggctaaagaaggggagtctttaaataaagtacgccgtgaagcgcgtagccagcggcgcattatccgccgccgtgcccatcgtttattacgtgcccgccgtttattaaagcgggaaggtattttgcaggcagttgattttgatgaaaaaggtttggtcaatggtttgccgaatacaccgtggcaattgcgtgttgccgcgttggatcgaaaattagtgcctaaagaatgggctgcggtattgctgcacatgattaaacaccggggttatttatcgcagcgtaaaaatgaagaacaaagtgccgataaagagctgggggcattgctttcaggcgtcaaggccaatcatgaagcattgaaagatgataaattccgtacgcccgctgagttggctgtgaggaaattcgagcaggaaaccggtcatatccgcaatcagtgcggggactattcacatacgttcaaccgtaaagatttgttggacgaattggatttattgtttaaaaaacaaaaagaatacggtaattcttatgtttcagacggcctcaaaaaagcagttgaagatttgctgatggtccaacgtcctgcactttccggtaatgcggtgcaggaaatgttggggcattgtacttttgaaacctctgaatataaggctgcgaaaaatacctacaccgccgagcgttttgtctggctgaataagctgaataatctgcggattttggaagaaggtacggaacgcgcattaaccgatagcgaacgcagccagctgattgatttaccttatcaaaaatccaagttgacttatgcacaagtgcgtaatgggttggaattgaatgatgcagcttatttcaagggtttgcggtatggtaaagataatgcggaaaatggcatattgatggaaatgaaagcctatcataccatcagtcgtgctttagaaaaagaaggtctgaaagataagaaatcacctttggcatacagccctgaattgcaagatgaaatcggaacagtgttttcactgtataaaaccgatgaagatatccgaggccgtctaaaagcattgttgccggaagcggaattaaatgcgttgctccttcatttgaattttgagaaatttattcaaatttcacttaaagcgttgcgtaagattttgccattgatggagcaggggcagcgttatgatgaggcgtgtcactcggtttacggcgatcattatggccggaaagaaaagcgcgaagaaatctatctgccgccgattcctgccgaccaaatccgcaatctggtagtattgcgcgccttgtcgcaagcgcgcaaaatcatcaatgccgtggtgcgccgatatggttcgcctatgcggattcatatcgagacggcgcgcgaagtcggtaaatcttacaaagaccgcaaggatattgaaaaacgccaagaagaaaaccgccgggatagagaaaaggcggtagcgaagtttaaagaatatttcccaaattttgcaggcgagccaaaatccaaagatattttgaaaatgcgcttgtatgagcagcaacacgggcaatgtttgtattcaggggaaaaaattgatttaggccgtctgaatgaaaaaggatatgtcgaaatcgatcatgcgctgccgttttcacggacatgggatgacagcttcaataataaagtgttggttctgggcagtgaaaaccaaaacaaacgtaatcaaacgccttacgagtattttaacggtaggaaaacagccgtgaatggcgggaatttgtcgcgcgcgtacaaaccagccgtttcccatacagcaaaaaacaaagagttttgctgcaaaaaatcaatgaaggagacttcagagaacgtaaccttaacgatacccgctatgtgaaccggttcctttgccaattcgtggccgacaatatgatgttgaaaggtaagggtaaaaaacgtgtgtttgcgtccaatggtcagattaccaatcttttacgcggcttctggggcttgggtaaagtacgttccgataatgaccgccatcatgctttggatgctattgtggtggcttgctcaaccgcagctatgcagcagaaaattaccaattatgtgcgttatcgtgagatgaatacgtttaatggtgaaatgattgataaattaaccggtgaagttacgcgattaagctttccacagccttgggatttcttccgccaggaagtgatgattcgtgtttttggccgtccggaaggtgatccgcaatgtgaggtagcagatacggcagattccctaaaagcgttgctggcagataagctgtcatcacggcctgaagcagtacatgaatatgtgatgccgctgtttgtttcccgcgcaccgaatcgcaagatgagcgggcaggggcatttggaaaccattaaatcacccaaacgcttgaatgaaggcatcagtgtactgcgtgtaccgttaacgcagttaaaactttcagatttagaaaaaatggtcaaccgcaatcgtgagcctaaactatatgacgctttgaaagcacgtttggaaagctacggaaatgaccctgcaaaagcctttgcagaaccattttacaaattggataaaaatggcaatcctactcagccagttaaagccgtgcgtattgaacaagtgcaaaaatcgggggtgttggtacgagaagaaaacggtgtggccgataatgcaacaatggtcagggtggatgtgtttgagaaaggcggtaaatacttcttagtaccgatttatagctggcaggttgctaagggaattttgccgaatagggcgattattcaaggaaaagatgaaaagaattgggaaaaaatggatgataaaagtctgtttaaattttcgctttattcaagtgatttagttgaaattactaccaaaaaatccaatatgctcggttatttcgtaagctgtcatcgggggacggggaatataaatattcgagttcatgatacagaggccactattggaaaaaatggatttttagaaggggttggtgtcaaaacggctctttctttccaaaaattgcaaatagatgagctgggtaaaactattaccccatgccgccctaaaaaacggccaccggtccgttaattatctattccctgtttcaggccgtctgaaacaggtttttttcgtctttatgattgcgttaaggggttatgatgacttggaggagcttactgattcaaaacagcagcaagttatcgttgcagcgtaaacaactcaatatccggcaagaaggtgaaagctataccgtacctttggaagatattgcggtaatcgtggttgaaaatcgtgaaacgttgattaccgcaccattattatcagcattggctgaaaacggcgtaaccttactgacttgtgatgagcaattcctgccttgcgggcaatggttgccgttttcgcaatatcaccgccaacttaaaactctgaagctgcaaattcatgcgggtgaaccgattaaaaaacagctttggcaaaaaattgtgaaacaaaaaattctcaatcaggctttttgtgcagatgaaactggtaacgatatcgctgctaaacgcttgagtatattggcagctgaagttaaatcaggagacaacggtaaccgggaagcacaagcggcagcattgtattttcaggttctcttcggagaacgatttacccgtaccgaagacaatcaaatcaatgcccatttgaattatgcctatgccgtattgcgcgcagcagtcgcacgcagcttagtgttatatggctggttgcctgcattagggttatttcacaaaagcgagctaaatccatttaatctggctgatgactttatcgaaccgctccggctgttggctgatttgatggtgattaatttaaaagaaaaaggccgtctgaaagaacagttagatacacaggtcaagcagcagcttatcagtttgttgcatcatcaaatcatggttgaacagcaaaactttagcacgttagcagccatcgataaaatgattgcttcgtttcagatggccttgatccaaaaaaatgctcattttttgaagttacccgaattacaaacattgaaggcatatcaatatgagtgaggcaaaatatatgagaattatcgtttttttcgatttgccggttacaacggcagccaagcgaaaagtagcaaaccaattccgacattttttgctcaaagatggttatcaaatgctgcaattatctgtttacagtcgaattgtaaaaggcagagattcgttgcaaaaacaccacagtagactgtgtgccaacttgccagaagagggttctgtacggtgcttggaagtaacagaaaagcaatttaccggtatgaaattgcttttaggcgagttaaaggtacaggaaaaaaaggtcaatgcagaccaattattgctgttttaggagcgttttaaattagaaaaaccaagcggagagccttattaaataaggctctccgcttggtttattgtagcactgcgaaatgagaaagggagttacaacaattctaattaacaaaaatactgtctgaaacactttcagacggtatttttctatgcatattcattatttctaatttatcataataaaaatggttacaagggaaataattatgttgcgttatatgttgccatgttgggtgttcggggtattggtgtcgtttgcgctgcctgttgtaccgtcattatgggtttggcttacggtgtttggagtaactttgttggcagcttggcgctggaaaacggtggcggtgttgttatgtgtgctgtttggcatggcttacggggtgtggcgcacccaatcggcgttgtcagggcaatggcctttggataaggtggggcaggtggccttgatggtggtggtagacgatttgccacgccgtgatgaacggcgggtgcagtttgcggcaaaggcttgggataaggaaggacgttcgtttcggttgctgttgtcagattatcagttgcgcgattggccggtaggcagtcgctggcaggtgtcagcgcgggtgcggccaatggtgggtgaagtgaatttgcgtgggctaaaccgcgaggcgtgggcgttggccaatggtgtgggcggtatgggttcgctgggtaaaggcagggtgttactggggaaatcgggtgggttggatgtgacagtttggcgtgaacgcatcagcaatcattggcagcaggcggagctctacggacatgggttttcagacggcatcggcttgatgcgggcgctggggattggcggacaatcggctttgcgggcggaattgtagcaggcgttccggcttttgggtttgacgcatctggtgagtatttcaggtctgcatgtgacgatggtggcggtgtggttcgggtttttggtgaaactgttgctgcgcgtgttgccttttgtgccgaagcggccgaagttgtgggtattgtcgggcggtgtgctgggggcattgctgtatgcgggtttggcgggctttggcgtgccgacgcagcgcagtgtgttgatgttggcggcgtttgtttatgcgtggtggcgtggcagtggtttgtcgccgtgggcggggtggtggcaggcgttggcgctggtgttgctgcttgatcctttggcggcgttaggcgtgggtttgtggttgtcgttcggcttggtggcggcgctgatttggtcgtcggcaggccgtctgaatgagcgaggatggtggctggctttacgcgggcaatgggcggcaacgctgttgtcggtgctgctgctgggctatatgtttgcatcgctgccgctgttgggcccgccagtgaatttgttggcgattccgtggttttcttgggtgttgacgccgctggctttgctgggttcggctttaccgtttgcgcctttgcaatggctggcggcggctttgggtgaatatacgctgcgttttgtggtgtggctggcggcttattcgcctgaatttgcggtggcagccgcgccgtggccattgatggtgttggcggtattggcggctttggttcttttgctgccgcgcggtacgggcttgaagcagtgggcctggctggtgctggcgggatttgtgttttaccgtgtgcagcctttgccggaaggccgtctgaaagtgtgggtatgggacgcggggcagggtttgtcggtgttgatgcagacgcgtgaacaccgtttgctgttcgatacgggtacattgcaggcggccggggcgggtattgtaccgagtttgaatgcgttgggtatccggcagttagataagctggtgctgtcgcatcatgatatcgatcacgatggcggttatccggcaatcaaacgcactcaagcaccggaaaggctgctggccggtcagccggaattttatccgcaagccgagttttgccgcgaatcacaatgggtgtgggacagtgtggcatttgagtttttaaggccgtctgaacaatattcgggcaaagatgacaatgacgaaagctgtgtattacgcgtggtagccggcgggcaggcgctgttggttaccggtgatatggggcagaacggcgaactggatttggtgcaaaaatacggtgatgcgctttacagtcaagtattggttttgggacatcacggcagcaatacggccagcgccggcgcgtttttgaatgcggtctcacccaaatatgccgtggcttcaagcggctatgcgaataattatggccatccgaccaaggcggtgcaaaacaaagtggcggcgcatggggcgacattgttgcgcacggatttatcgggggcgctggtgtttgaattgggcaatagtgcagagatatttcaaggccgtctgaaacaggggaagttttattggcagaaaaagccgtttgattgagttggctggtctgatgtctttacggattcaattggcgtgtcctcatttcatcatgcggcatgcggcatcttttcggtataaaaatacgctactgtgttggaaatgcgcacaaggcgcccgaccttgctgcgcttttcgtctggtatgcgcgcttttttgcccgaaaatgtgcgacgcagacgaaatggggatacacctcaacctctgaccgtcattatcgggtcagtacctggcaagggcggatggttttaccggtttgttcggagtttgccaaggctgtctgaaaaggatgttcagacggcctttatataaacttaacaaaatatagttatccctgctttgtgtgaatcctgctgtggataatcaggctttcagattgaaagttaaagaaaaaattggattgtttaaaaaatgggcaaagggattttcatgcaaaaagcagtgaatccgtcaagcggaatatgccgtttcagacggcatgttgttgcgaatggcgaacaggcggcggtatagtaaaatcatcccacaaatccaaagcgaaggctgcataaaccaccacaccgcgtgcgaaatgaggctgcaattctgcctaagcgatgcgggcggtttcggtatttaatttttcattgagtaaagaggcggacatggttcgcactttctggtgtcggtcgttgaaggacgtattctgacccaaatgctgtaattatttgtggcggtataatttggatttacaagtataatgttatatagtatcattaacaactttctatttattcagacggcctgctacaggccgtctgaaacattgggtttgcgatgaattcgattttattgaccggattgttccaacgcctgctgattgcactgttcgcactcggcgcactttggggcatttatttttgggcagtcggcacatgagcattagcattgtcgtcgataatttaaccgtcagttaccaaggccgtccggcggtgcaccatgtatcggtggaatttcccgatcacggcatgtgggcggttttcggccccaacggcgcgggcaaatcgacgctgctgaaagcggtcatgggtttggaaaaagcggcaacgggtgcggtgcattgggtgggtttgcagcgcaaagacatcgcctacttgccgcagcaggccgaagtcgaccgcacgcagccgatgacggtgtttgaattggcggcaatgggtttgtggtatgaaatcggctttttcggccgcgtgaacgcggcgcaacgcaagcgggtatatgaagcactcgagcgcgtggaaatgcacgaatttgccgaacgcagcattgcgcatttgtctaatggccagtttcagcgcgtactgtttgcgcgaatgttggcgcagaatgcgaaatttctgctgcttgatgagccgttcaaccacattgacgcacgtacgacgtatgccttgctggacgtgttgcgccgctgccatcaaagcggccaggcggtgattgccgtgttgcacgattatgagcaggtacgcgcttattttcccgaaaccttgttggttgcgcgcgaaaaaattaccgccggcaaaacggaaaacgtattggccgacgaatacctgctgcaagccaataccgccatgcagcagcaagaatctgccggctggtgcacggcgtaatgtttcagacggcctttcgtgacagaggaatcaataaatagcaagctggccgcagaccgtacaaacagtacgaaactggttctgttgccgcgccagcggcttatgtaaatcattccctttgagcgaaggaaagccaacgcggccaccgttttgtagtgtttcacgataatgtgtttgcaacatcgtttcccaatataaaggccgtctgaaatattcagataagttttcagacggcctgcaatagaaatcaatcatgagttttcaagaattattcatcacgccttttgccgaattcgatttcatgcgttatgcactggcgtcgattttttgcttggccttgagtgccgcgccggtgggcgtgtttttggtgatgcgccgcatgagtttgatcggcgatgcgttgggccatgcggtgttgcccggtgcggccatcggctatatgtttgccggattgagtctgcctgcgatgagtatcggcggtttcgcagccggtttgctgatggctctgctggccggtttggtgagccgcttcaccactttgaaagaagacgccaacttcgccgctttttatctcaccagcttggcagttggtgtagtattggtgagtaaaaacggtgacagcgttgatttgctgcatttgctgttcggctcggtattggcggtggacgtggcggccttgacgttgattgcggcagcggcttcggttaccgcgctggctttggcggtgatttaccgcccgctggtgttggagagcattgatccgttgtttttaaaggcggttaacggcaaaggcggcttttggcatgtactgtttttagtgctggtggtgatgaacatggtcgccggttttcaagcgctcggtacgctgatgtcggtcggcctgatgatgctgcctgcgattaccgcgcggctgtgggcggaaagcatgggtatgatgatttcgatggcggctttgattgcgctgttgtgcgggtttgccggcttgctgttttcctatcacattgaaattccgtcagggccggcgattattttgtgttgcggcttattgtatgtgttttcggtggtgttcggctgggaagggggtgtggtcaccaaatggctgaaacaccgcagacacaaagccggttgattttcaaacaacctttgtgataaacgcataatccgtatatgaaaatttgccggatatttttcagacgacctgcttgaataacagggcaggctgttttagaatgattaaaatgttacgttatatcaaaagggaggaaatatgaaacaatggaaatcgggcgttattacagcgttgctgtccggtgcggcttatgcggtgcctttgcaggtagtggccagcttcagcatcttgggcgacgtagccgggcaggtcggcggcgagcgcgtggcagtgactaacttggtgggtcgtaaccaagattcgcatgcgtaccacatgactagcggtgacatgaaaaaaattcgttcagctaaattggtgttgttgaacggtttaggcttggaaggtgctgatgtacgccgtgccgtgcagcagagtaaagtcccttacgccgaagccaccaaaggcattcaagccttgaaagcgccgggaagtggccatcaccaccatcatcacggtgcaggtgaaggccatcaccatcacgaccacggcgaattcgacccgcatgtttggaccgatccggtgttgatggtgacttacgccaaaaatgtatccgatgcgttagtaaaagccgacccggccggtaaagcatattacgaacaacgcctgaccgcttaccaaaaccagctcaagaaattacatagtgatacacaagccgcgtttaacagcgtgccggaggccaagcgcaaagttttgaccggacatgatgcatttgcctacatggcgaaacgttacaaaattgatttcatttcccctcaaggcataagcagcgcggcaaaaccatcggccaaagcggtggcgtcgattatccgccaaatcaaacgcgaaggcattaaagcggtatttaccgaaaacatcaaagacacgcgtatgattgaccgcatcgccaaagaaaccggcgttaaagtcagcggtcaattgtattccgatgccttgggtaatgcgcctgcggatacttatgtcggcatgtacagatacaacgtcaaaatcatgactgatgccatgaaaaaataagccgtttttgtcatcaatacgcaaggccgtctgaaaaacttcaagtgttttcagacggccttgtagcgtttggtaacgatctggtaaggctgtataataattgaaaaatttatatagtatgttggaaaaaggcgggttgcttaatacttttatgcaaaacggcttttgttttgccgaagtaattgttttgggatgttcgaagtattcggctttggctttcggcattcttgacagcacgcaacaatcccaaaacaggtcttcagacaaaacaaaaaagtgtaaataacgctggaattttctacagattaatattgataccaaatccaaattcaggaaccaaccatgatagaaaccatcgaacgcgacaatatgcaatacgatgtcgtgattgtgggcgcaggtccggcagggttgtcggctgccatcaaactcaagcagcttgcccaagccgccgggcgtgaaatcagcgtgtgtgtggtggaaaaagcttcggaggtcggagcgcatactttatctggtgcggtgattgacccgattgccttgtcagaattgctgcctgattggaaagagcgcagcgcacctttgcgtgtggaagtgactgaagacaaggttttgtttctcaccgaaaaacacgccattccgctgccggtgacgcccaatttcgataatcacggcaactacatcatcagcttgggcgagttggtacgctggctgggcgaacaagccgaaacgctcggtgtggaaatttatccgggttttgcggcttcggaaattctctatcatgccgacggttcggtcaaaggcattgccaccggcaatatgggcatgggcaaagacggcagcccgaccgataacttccagccgggcatggagctttgggcgcagcaaaccttgtttgctgaaggctgccggggttcgttgagcaagcaaatcatcaagcgtttcagccttgaccaaaacagcgatgcccaaacctacggcctcggcattaaggaaatttgggaaattgcgccggaaaagcatcgacaaggtttggtattacacagtagcggctggccgctcgacaccaaaacctacggaggctcgtttctctatcatctggatgaccacaaagtcgccgtcggttttgtggtcggcttagattatcaaaacccttatttgtcgccgtttgatgaatttcaacgctttaaaacccatccggcca

SEQ ID NO: 2718 - DNA, 5307 bp, synthetic construct
  source 1..5307: mol_type = other DNA
  misc_feature 1..5307: note = Synthetic
ccgttcggccttgataatattgtttagttttcatagcctgacgcgttttctttgtaaacgcacgacatgtagggcaaatttgttaatacggcgcgccatacgcaagcggcgcatgcactcagcaaatcattgactgtagggaatggtcttgaccattccggaaaaatctatttactttacaaacttgcgaaatgcagggcatatattttacacggcgcgccgaggcgtcgcgccctaccgagcagagcaagcccctagcaaataatttatccataccgtagggggtgagcaaaatataactgtgtcataagtgggacagttaattacagatagagtattgatgttgttaacaatattttgtataatataggtgcgagttctttattatgccatatcggagtgtttgatgttgctataataagagaaatcgtaaggttctaccccgctggatattttcagcggggtatcctttttgtcccttttttggtacacttgatataataatataacctatataataatcccgtattatgttgtattatgtaattatataaaaatatgggggagatgcgatcgtgaaatactctattggccttgatattggcgttgcttctgtcggatggtgtcttattaacaatgacaaaaagagaatcgaggatttaggcgtaagggtatttactgccgcggagcaaccaaaaaccggaagttcgctagcggagccaagaagattaaagcggggcttgcgaaggaggttaaagcgcacaaggcagaggatggccggcgtaaaggcgctgtttgtcaaatatggcttgatagaagctgaaagccttgaacaaatatatgttcctcatggaggctggctttcgccttggcagttaagattcgaaagcttggaaagaaagttgtctggtgaagaattcgccagagtgcttacccagctatgtaaacgcaggggatataaatcgatgcgcctcgacgagggaaccgatgatgacgaaggaaaagtaaaaggaagcatatcggataaccgggcgttaatggagcagaagggttacagaacagccggagaaatgttctggaaggatgagaagtttagcaagagcaaacggaatcatgaggattacaataatgtggtttcgcgtgaaatgctgcttgatgaaattaagatattatttgaaaaacaaagattattgggcaacggatatgctcagaaaagatttgaaaaagaatttactgacttattcatttggcaaaaaccagttgacgaaggagaaaaactgattgaaaaggttggagcctgtgaactgataccagcagaaaaacgggctccgagcaggtgttggacggcagagaagtttactatcctgcaaaaaattaacaacataatgatatatgatgcaggtgaaaaacttccattgacagcagagcagcgggaagcggtatatgaaaaatgcctttccaggcaatcgcctgttacttatgcggatatcagaaagctgctggggctggaagaacatgcccggttcaatatggtaaggtatgataaggacgatctgtcggctgaaagcaaggacaagctgccgcaattaactggataccatgccttaaaaaaggcgatcaataatgccgatgaaaaatattgggatgatatagcggctgatgaagataaattaaattcaatagcttatgcgttgacctactggaaaagcaaagagggtgtgttacagcaattacaattgcttgggctgccggaaaatataatcgaagccctaaaggaaatcaggtttgacaagcaaaagcacctctccataaaagcaatgcaattgattaacccgtatctggaacagggtctggattattccgcagcctgccaagcggccggcatgcaccactctgtaaaggccagaaaagaaaaacagaaaaagctgccaccaattccggcggaagagataagaaacccggtcgtaatcagagcgctttcacaaacccgaaaagttataaatgcaataatcgacaggtatggaagcccggaagatattacaatagagcttgcccgcgatatatcaaagaattttaaggatagaaaggatatcgagcgaaatcagggcaagaatcgcgaaaagaacgatgcggcaaagaaccagatgctttcggagttcggcataaacgcaagcggcaacgatatcagaaaatacaggttatggcttgagcaggaatcaaggtgcatatacagcggcaagtatatcgatccgagaaggatgcttgtcgaaaagggatatgccgatattgagcacatcataccatactcaaaatcgttcaacagctcatatatgaatgaagcgcttgcgttggcggaagaaaaccataaaaagggcaacaggataccctatgagtatttcgggcatgatgaagcccgctggaatgagttcagcgaaaaagtcaactcactcaatataccatactcgaaaaagaggaatttactaattaagagctttgacagcagggctgaggaagccatgaaggaaaggcatctgaacgatacccgctatatatcaagatttattactaattttattaaggagaatctgattaccacaggcgaaggcaaggacaatgtaaccacaataaacggacaggccaccgcataccttcgggcaaggtggggactaaacaaagacaggaaggaaagtgacaggcaccatgcgatggacgccgctgtcgctgctgtcgccacaagatctatgctgcaaaggatagcccgattcttatcatggaaatctttctattatgatgaggataacgaaaaatatatagacaaagaaacaggggagatgtataaccccaaaaagataccggagccgtgggacaggtttgcgagggagcttgaagcgcgaatcagcgacagcccgagggaatatatcgagcaaaatgatctgccgggatatcggaatgaagatttgggatttgtacggccgatatttgtttcaagaagcccaaggaagaagatttcgggttctgcgcatgctgaaacgataagaaagctaaagggcaatgatgaaatcggtaggatattaacaaccaagcgagtaaggcttgaagaacttaacttgactaaacttgaaaagatgagtggaaaagatacagacccccaattatatagactgttaaaaaatagacttgatcaatataatgataatccaaaaaaggcgtttgccgaaccagtgtacaagcttttaaaagacggttcccccggtccggatgtaaaaaaaatacaagtagatgatgacccagcttcgggcggggtattagtaaacggcggtcttgcggacaatggatcaatgactagaattgatatatttttaaaagataaaaagtactatattgtgcctgtatatgtagcgcagacagtttatagggaattgcctgataaggccataactgctcataaacctgaatcagaatggatacagatggatgatacattcgaatttgaattcagcctttatccgggagacttattaaaaattgaagataaaaagaaaacattattcgggtattataccggatgcaacagggcaaccggcagtattgaccttgatgcacacgacaggagtacaaaatttgtgagtatagggataaggaatgccagtaagataaccaaatattgtgttgatccattgggatatattactccagttagcaaggaaaagcggcatggcttttagaagtgtaattatcagcgaaccttgcagccttaaggttaaggacagccaactatttgttcttcaggatgatggtaaagtcgccataccacttgaagatatagcagctgtcatattggagagcaatcagatactgctatcttcgtcgctgctctcaatcttttcagataacgggatcgcgctatatacatgtgattcgaaacatctgccatgctctgtagcactgccttttttaccgcatagcaggcaaagcggcatatttaaattgcatatgggaataagccaaccttttaaaaagcgcatatggcagcaggtgatagtagcaaaaatcagcaatcaagcaaaatgtcttgaattactaaataaaaccggggcaaaaaaactaaagaacatggctgatgcagtaaattccggtgacagcgataatatggagtcgcaagctgccgccagttactttgaatcacttttccccggaatcagaaggagatgcaataatagaataaacagcgcacttgattacgggtattcaatattacgcggtgcaatggcaagagcgttggtagcacacggattttatccaccattgggtatcttccataggaacgaactgaatgaatacaacctggctgatgattttatggagccataccgcccgtttattgatatccatgtagccctaaacctgccggaagacaataatttaagtaaggatgatagggcggctttggttgcaatactgcataatgattgccagatggaaaatgaaatttattcagtgttgtattcaatcgaaatgaccgccgcatcatttctatctgctattaaaggtaatgaagtaaaactgctaaagctgccccaattattgatacctgcaagtcatgaacttgaataggtaaggaaatgccacgatttatgagaatgttcgttatattcgatctaccgactaataccagtactgataaaagaaattatagccggtttagaaaatttcttcttaaggacggctatcaaatgttgcaatattccgtatattgcaggatagcaaacggtactgaaggcgttgaaaagcatataaacagaattacaaagagcttaccaccaagaggtaatatccgcttcttcaagataaccgaaaagcaatttgcagatatgttattcctagttgggaacccatccaaaaccgaagaaaaaataactgctgaaccacaaatcattctttagcagcatcattttttattgttaaatatacaaaaaacccgcttattaagagggtttttgcacatggtattataccatatcggagtgtttgatggagctataaccaaaagctcagcttattatagcagatattcattataccatatcggagtgtttgatggagctataacactctcctgaagcttattatcaatacagacattataccatatcggagtgtttgatggagctataacccattacttcaagtgctttttgctctgtctattataccatatcggagtgtttgatggagctataacttccaagccattctattaaatataaatctaattataccatatcggagtgtttgatggagctataa

SEQ ID NO: 2719 - DNA, 23399 bp, synthetic construct
  source 1..23399: mol_type = other DNA
  misc_feature 1..23399: note = Synthetic
taaatggtgatgacaaaacttcagcaacaggggataccaaaaagaaaactgacaccgcagcgaagcataagccaaagtcagcaggcttcataaagggggttaagaagttctttgaggatctttctagttaataatgtgagttgtacggctaatcataagttttcatattgaacaaagttatagattaggttattatcagctcatatgatcatgaggacgcctgatgtaacagttaggcgtcatttttttatattttaaattgaggctattatcatggatcagactccaatgactcctcgtggcgaggatttacttcgcaaagaattacagcgcttaaagacagtagagagacctcgcattgtagctgcaattgccgaggctagaagccatggtgatcttagcgaaaacgcagagtacgatgctgcaaaagaagagcagggactttgcgaagcaagaattaaagacatcgaaggcaagctagcaagtgctaatgtaatcgatgtatctaagttaaagactcctaacggtggcaagctaaaggttatctttggtgcaactgtaaccgtagttgatgttgatactgacaaagagacaacttacagaatcgtaggtgaagatgaggccgacattcaggctaacttaatttcatacaagactcctatcgctaaaggcttattaggcaagtgcgaagaagacgagattgaaattaagatccctaagggaacaatctgctacgaaattgaaaaggttgagtatatctaagagataactaagaccttttgatgtaacttaaaattctagttacgcaaccattgataagaaaacggaagtacccaaaagtgcctccgttttttttgatcttaagataattgtagactttaaaagtagactttaagtagactttaaagtagactttatctagaggtaacgattatgaatttaggacatgaaaacgaaactcttgagttcaaagagagtttaggtcagcttgacaaaggtctaaagtctataactgcaatgctaaacagatctggctatggttgtgtttgctttggtgtattagacaatggagaggttaaagggttaaccgttggtcctaataccttaatggatattagaaataagattaagtttcttatcagtcctcaggctctggttcatatagaaaaagtgacagttggaaagcttgattacatcaaggtaaccgctcatggctcagatattccttacagttgcgatggtcgttactacattagaaatgtggctgcagatgagactgtatctaatgaaatattacgcaaaatgttaactacatcagagactgacatcataagacgcattccttctgaagatcaagatcttacttttaaccaatttgatagttttatgtctaagtatggcattcatacagaatcctctatttctttccataaaaattacggtttaaaaaatgatgaaggtaagttcaatctaatggcttatctgttgtctgatcaaaacaatgtaagcattaaagttgttaaatttgaaggtaccgataaaagcacaatgtcagagagaacagattttggatctcaatgtcttttaagatctgttcaagaagttcttgagtatgtaaaagtaaacaatgcagtaaaagtagatctttctggcggcataaggaaagaaactccactactagattatgaagcttttagagaggcttggataaatgcatgtattcataacttgtggattgagatgattcctccaattgtttttatatacgacgatagattggagatcctctcaaatggtgggttaccatatggattatcatgtaaagaattcttttgtggtaaaagttttccagtaaatagagaattgtatgctattttaaaatcgactactttgactaatgaaagtaacggtatatctacaattgtttctaaatatacaaaagatgctttttcaataggtagtggcttaattaaggtgactctaaactttaactttgaacgtgatgatgttgtagcacgaaagcataaagagaaagctatttataaactgaccatcaagcaaaagaagatcttagagttgttaaaaggtaatggcgaacttactcaaaaagagctgtctgataagacctcagtaagtttagcaggagtgaaaaagatcatgcaaaagttacaagagcttaatttaatctcaagaagtggggctaaaaagaatggttgttggattgtagcatcccaactgaaataaaaaacgccttattaaaaggcgccttttacaatttgagtgaacctagaagttcaacttaaaactagcgaggaagaatgaatctgctgtcgtcttttctctgtctgaatagaacagcaattctaccaactagagatactaattcagcattaactgtcttagcagcagtttctgcctgctcttttctaccttcaccagcatttaaacggatcttgataagctcgtgatgctcaatgctgctgtctagctctttaagcactgattctgaaagaccgtcattgcctagtaagacaactggctttaatgaatgagcttgtgcctttaaaaactggcgctgatgtgaattcaatgacatacaaaacctataataagaaaaaatatctgttaaaagcttaatctattgtgatttagacttcgcataaatgttgtgcaaattgtataatattatcgagaaattttaaactgaaaatctatagtaatatttgggatttaaatttaatgccagcaaagaaaagaactgccagccaaactagatggttacaggaacacttttccgatccttatgtgaagcaggcccacaagttaggactgcgttcacgcgcttcatttaagctagaagagttgcagaaaaaagatcacctgatccgtcagggtaatatcgtagttgatcttggtgccgctcctggcggttggtctgagtatgccgtaaagtgcatcggagatagcggtcgagttatcgcctgtgacattctgccaataagacctattcgtaacgtacagtttttgcagggtgacttcagagaagatgaggtcttcaaaaaactgtattcaatgatcggtgtcggtgctcatgtagtactctctgacatggctcctaatatgtcaggtaacctagctatcgatcagccaagagccatgctgttatcagaattagccttagatatggcaagacgtgtactgcgtattggtggtagttttgctgtaaaagttttccagggtgtaggttctcaagagtttttaaaagaattacatcaggactttacaactgttaaagtaagaaaacctgatgcttcaagagaccgttctcgtgaagtttatatggtagcaatgggctttaaaggtcatcctttaaatggtgttgcaccaggtgctgaatttgaagagtctgaagataagactttggagtaagtgagtaaatatgacaaaaaacctaatattatggctagtcattgctgtgattttaatgactctctttgagtcatttaactcatcagacaattcaggtcgtatggaagactacactagcttcgtaagagaagtgcagtcagatcagatacaggaagttgtatttgatggcaaggttatcaatggtgttaaaaagaacggtgaaagattcttaactgttatgccattgagcgatcctgcaattatcgactctcttttatcacacaatgtaagagcatctggtactaagcctgaagagcagagcttattgctctcaatctttgtgtcatggttcccaatgctgcttttaattggtgtgtggatctttttctcacgtcaaatgcagggcggttctaaaggcaatcctctgtcatttggtaagtcaaaagcaaaactactctctgagaatcagattaaaacaacctttgatgatgtagcaggttgtgatgaggcaaaagaggacgtagttgaattagtagacttcttaaaagatccaaccaagtactctaagttaggaggtcgcattccacgtggtgtgttaatggtaggtcctccaggtaccggtaaaactttattagcaagagcaattgcgggtgaagctaaagtgcctttcttctcaatttcaggttctgatttcgtggagatgttcgtaggtgttggtgcttctcgtgtaagagacatgttcgctcaggctaagaagaatgctccatgtattatcttcatcgacgaaattgatgcagttggtcgcaagcgtggcgtcggcatgggcggtggtcatgacgaaagagagcagaccttaaaccagttactagttgagatggatggttttgaaggctttgaagctgtaattatcatcgctgcaactaacagacctgatgttcttgatcctgcactgttacgtccaggtcgttttgacagacaggtcgtggtaggtttacctgatgtacgtggtcgtgagcagatcttaaatgttcatgtaaagaaagtacctttaggtaaagatgttgatactgcaactatcgcaagaggtaccccaggcttctctggtgccgaattagcaaacttggtaaacgaagcagccttaaacgcagcacgtcataacaagcgtgtagtaagcatgaatgagtttgaagaagctaaagataaactcttaatgggtgctgagcgcagaagcatggctatgaatgagcatgaaaagatcaacactgcttatcatgaggcaggtcatgctatcgtaggtaaattggttccagagcacgatcctgtatacaaggtatctattatccctcgtggtagagctttaggtgtaaccatgtatctgcctgaacaggataaggtatctcaaagccgtatcggtctgttatcaaacatttctactctgttcgctggccgtatcgccgaagagttaatgtttggtactgatgctgtaactacaggtgcttcaaatgatattgaaagagcaactcagattgctcgtagcatggtaacccgttggggcttctcaaagagattggctcctatgcagtatgaaaaggacaatgaaggttctgcatacttaggtggttcatctactactatgatttcaatgtcagatgaaactgctaagatcatcgatgaggaagtaacagaaatcatcaactcatgctataagaaatctcaggacttacttgaagctaataaggacattcttgagaatatgaaggatgctcttttaaagtatgagaccattgatgctgatcagattgacgatttgatgaatcgtaaagaagttcgtccacctcgtaaggtaggagatgctaaatcttctgatcagaaatcagatgataactcaaaagatgagaaatcaaatgatgtaaagactgaggataagtcaacagacaatcagtctgaaaaagctaagactgagaactctgacaatgcatcagagacaaaaaaagacgataatgacaataattcagagcagtaattagactaggatacttgtcaaaattaccatcgtctcgtgaaggatctcttaataggagatcctttgcttttaatgtatgtaaaatggtacaggctgatatatatcggtttgatacaagtttagtgtgggatattcgatgaaattaagactgccaaatagtaaaagccttgatttgtcttttacaaaagtaatgggaaccattgctttagaagagaatgatacccgttcaattgaagatctagttttacttgcaaatagctatgttaaagctggtgctgagcttttagagattggagctaaagcaggtgctaacggcatcaatgaaactcgtgtgatctctgtgttgtgcgctgttatgaacagcgtggatgttcctgtagcactaaactcaaataactatgaaattgtttcacaggcaattaaagctggtgtttcaatggttattaccactaacggtctgtccacagagggcatgatcgatcttgtcaaaggatcagaggtagctgtatgccttcactttgatcctaaagaaaaaattgaagatgacagcgatgtggtaagtatcatttctgaatactactttgaaagaatcgatactcttttaaatgcaggtattgaaagaaagagattactcattgacccatcagttgtaaatgcttctgtaagtaacagattaagactgttaggaagacttgagagctttaagagttttgctctgcctatctgtattgctctgcctcgttctttaccaaaagaagacagattcatgaaagataatagagtgcttaccttaactacagctttattctgttcatctgtaagtccagttcaaatcatcagaacagcagatgtaggtgaagttgcaattgcaattggtttttggcagattatggcaagtaagactaagccatttaagttatcaaagactatcgtaagacgtctaagacttctacgtgatgcaattcatgacttaagaaagaacaaagaaaagaattaaaattgagcatctttaaaagtctaatcttttaaaggtaaataacttttagaaaaaaagaaaacaaagatgaaaagaaaatattttggtacagacggtgtacgtggccgtgtaggtcaatatcctattactcctgattttgcagtaagactaggtttagctgcaggtaaagttttaggtaaaaaacatggcggtaaagttatcattggtaaagatactcgtctgtcaggttatatgctagaagctgccttagagtcaggcttttcagcaggcggtatgtctcctgtaatgttaggccctatgccaactcctgctgtagcttatttaactcgagcattcagagcagacctaggcgttgtaatcagtgcttcacataacccatactatgacaatggtattaagttcttctcagctcatggtaccaagttacctgatgaggttgaacttgagattgagtctgtattagatgctaaggatattcctttagctgcttcatcagactttggtcgtgccttcagacaggatgatgctccaggtcgttacattgagtactgcaagagtacctttgcaagccacttctcgttagagggcatgaagattgttttagattgtgctaacggcgctacctatcacatcgctccactggttttcagagagttaggagcaactgttatcaccatcggtgataagcctaatggcattaatatcaatgatggtgtaggttctactcatccagaggctttagttgctaaagtcctttcagaaaaagctgatcttggtattgcttttgatggcgacggtgaccgcgttttaatgtgcgacagtcacggtaacttacgtgacggtgacaaccttctgtatatcattgctaacgacactaaaaagcgtggacgtctgccaggtggtgtagtaggtactttaatgacaaacttaggtcttgagttagctttaaagcgtgaaggtattcctttctctcgtgctaaggttggtgacagatacgttatggagcagttgttagagaagaactggactctaggcggagagaacagcggtcacatcatcagcttaaaccatgcaaccacaggtgatggtatcgtatcagcactacaggtcctaaaggcttgtatgtatgcaggcaagacagttgaagagttatctgaaggtctgaccatgtacccacaggatcttatcaacgtaagattaacagctggtcttgatgtaactcgtgacgagaaagttcagactgttgtagctgaagttgaaaaagagttaggctcaactggtcgtgtgcttttacgcaaatcaggaaccgagcccgtggttcgtgtaatggttgaaggagagaatgcacaggacgttcatactaaagctcaaagaattgctgatgtgatcatccatcaggcaggctgtgaaaatgcttgaaaaaaagcataataacctgtaatatttgcacagctttgtatacgcaaaataggatgcgtttttattatgtacgaaattggtattgtagttttattactaattgcaattgcaatgattgctttgatccttgttcagcagggtaaaggtgctggcatgggcgcttcatttggtgctggtgcatcaaatacagtattcggttcagtaggatctggtaacttcctgactagatcaacttggactttaattattctgttcttcggtgtttgcttattcttaggttacttacagaagtcagctcacgaagagaagtcaagtttcagcaatatttctgagactcctgcaacagagcaggttgaagagaagactgttgttaacactgatgctcctgtagttgatacagatgcacctgcagtttcagacacaacagatgctcctaagactgacgctccagagactaagtaataaaattttctactaaaaaagacccaccgtacggtgggttttttattggcgattttagataaattaattagaagacgtagtgcttggtaggagttatgacttcatgcaaaggcatatcccaatgctcaataggtacagcatctaaaagttggaagtcataagctacacctattaaaagacattgagcagagagcttctttaacattctgtcgtaatagcctccacccatacctaatctgttgcctttattatcaaatccaactaatggcacaatcaaagcttcaaatttatcaggagttaccagattctctggtaaattctcaggctctagaatgtggaagcggttttcaattaacctgtcacctttcttataggaataaaagtccatatgaccttttacgtgaacatccataaaaggtagagctaattcatggtgttctagaagatactcgttgataggctctgtagataactcaccacctaagcttaaatatgatcccaccatctttttttgcaggaagtgtttgtggtgacttaagatttttacaatctcaacaccagcttcataggctttaacaggtgttacctgtcttctttgttctaagatctgctgacgcagagacttacgtaaaactttgttatcaaaaaaatcagtcattgttagctctttgaagagtagtcttcatctttgtgattagtttcaaagcttcattttcaaatggagttttatcgtttaaaaatcccagtaaggtactctctgagtctagcgcaattaagatagctgcctgtgtaggagttaaattaggattctctcgcatcatagaggatgctttagtttgtaacgaagctatcgctctttgaagattttctttttgttcttttgcgcatcttaagttaaagctctcaccaaatagtgcacattgaacaaaatcctgagtgttctgatctgacatatgtatttccttctgctaagtctattgtaaagtcatttacttaattgtccaaaacttaatagaaatgagctgaaaacgtgctaataaaaaatgatttataaaatcataattacttttaaaatcaataaaatattagatatacgtatagaaaataaattacacattaaaaatgtgtataaaagatacaatatgctataattaatcgaagattacacaggagagcaaaatgagtacagtttctaacaagctagaatcaaaggacatggacaagatcattaaggagattaatgcatcaattgcttcaggtgagttctacaaagatgatgaaattactgatgaagagtacattgaagaagccgctgaatttggctactttcaagaagacgaagaatttgacgatgatgagtttttcgattgaacttaatctaaaaattagtgacaaataagttaagagatgcgtacatctcaataagttggtcctgtttcttaacctacaaataaaaagccctcaccaaagtgagggcgggttcggtaatctttcgaaaaccttattgtaacaacgttgaaatcccttacagtgtcacaatagttaaattatactctaataaaagaataagatcaattttttaattaaatatcacaaaaatatgtgataaatctcgcaatctaaattatatatgataagaaaataatttttatatattagaattaaaatattgtatagatagtatatgggtgatgaatatgtcttatgtgcttggccttgatttaggtatcgcatccgttggttggtcaatagttgaacctggtaaaagaattattgatttaggagtaagagtttttaaaaaagcagaaactgacaaagaaggtgatccactaaatcttatcagacgagaaagtaggttaagtagaagacgtttgtatcgcagagcgcatcgtctcaacagacttcttaattttttaatatcttcagggcttatacattctaaagatgaagtattgaagaatgtatataacgaaaatccttgggcattgcgtacattaggtttgaactcagtccttacaaataatcagttggctagagtaatttatcatatatgcaaacaccgaggattttactgggcttcatctgctgatgacggccaggcagataatggaaaaattaaaaaaagcctatcttcgaaccaactgataatgaaagaaaaaggatacaagactgtaggccagatgatctttactgagtatccaaattgtcaaagaaataagtctggtgaatattctaaatcgcttcctagaacagacttggacaaagaattaagagcaatttttaaggcacagcaatcattttcaaatccaattgtcacaaaagattttatcaatgcaattgtggggatcggagacagaaagactggatttctttgggagcaaagaccagcattacaaggagaagatctcctaaaaatggtaggccactgtcgttttgaaaaagatgaattgagagctcctgctgctaatttttactcagaacaacttgtttggcttactaaaattaataatcttcgagtatatgatgaagacagccaagaacgacctctaacaagagaagaacgtaacttaatcctcaatatgcctttggaaatgaaaagtgatattaaatattcttctttaacttcagcttttgagaaggcaagtttatggaaggctggacaatttaaatacaaatctgtcgattatgaacagaaaacacaaaaaaagaaaaagactgcaaaatctgctgacatcacaaagtcttcaaaaaagaaccctgaggataaagttttttataagagttctcatcttcatgaaattagaaaagcattaggcagtagcctatctgaagaatgggaaaagataagaacagaagttctctctggcaaatatgaccgttacaacagaatcgcctatgtattaacagtttacaaagaagattctgatgtgatagagcaattatcaccatatgaatcaagaacacttatagaagcattgctgcctgtaagatttaacggttttgtttctttatctgaaaagtctctgaaaaaaataattccatatatggttttaggaaaaaggtatgatgaggcttgctctgaagctggctataaacattacaagcaaaatcaagctaaagtcaaaaaatcaaaatatttaccctctcttttttcaggaagagaacctaacggaactttaatttttaatgaagaaattggtgacattcctagaaatcctgtagttttaagagtgattaaccaaacaagaaaagtcgtaaatgctattgtaaaaaaatatggatctcctgaatctgtccatattgagttggctcgtgatttagcaaaatcaagagcagagcgaaatgaaatcgaaaaaagaaatgaagatgctgcttcaagacgtattaaggagcgtgaagaatttaaaaaacattatggcgcagaaaaaacaaatggaacaaatttgttgaaatacagactctataaagaacaagactgtaagtccatgtattcttgtaaaacaatagatattaataggctatttgaagaaggatacgttcaaattgatcatatacttccatattcaagatcttatgatgattctcaatccaataaggttctcgttttaacaaaagagaatcaggataagggaaatagaattccttatgaatattttgaatcaaaacaaacagacatttcttggtacgaatttgaacagtgggttaagtcgtgcaagaacttaaatcaaaagaaaaaaagaaatctgttaagaaactcattatcaaaagatgctaaaaaagatttcttagaaagaaacttaaatgatacccgttatgcatgtaggtttatgaagaattatattgatagattcctttgcctatctgaaaattctgacaaatctggatgtgttgtagttgcaggtcagcttacggctaacttaagaaattgttggggattaaacaaagttagagaagaaaatgacagacatcatgcattagatgcaactgttattgcttgttgcactagaaaaattgttcaaaaagttggtgcttggtcaaaggcaagagaggttgaatttaataattcatcttatgatgatcctgatttgcctattgatgaaaatgaattacttcttctaaatacttttaaaaatgtaaaagaaccgaaatttactgaaccttggcattgttttagagaagaagtagaagcaagagtatttgaatgtgatctagaaaaactaaaaaaagagttgaaacagcaatgttcttatactgaaagtgatctgaaaaatgttagaactctttttgtttctcgtgcatgcgaaaaaattggaaaaggtgcgcttcataaagatactgtttatcgtcaaacttctgaaatgagaaaagaaaatctcgctataaaaaaagtttctttaaaaaagcttaaatatgcaaaaatttcatcaattgtagatgcagatacacgaaataaaaatctgtgtgatgctttgagaaaaagatatgaagagtacagtagtaccacaggtaaggatgtaagtaagattgaagaaaaagatctcgcaaaaatcttttctgatgataaaccgatgcatatgcctaacagtgaaggtcaagaagatccgtgcaatccgatagttaaatcagtaagagtaaaagatgcttgctctggtgttcctattcgaaatggagtagctgaaaatgataacatcatgagagttgatatctttaaaaagagaggtaaatattattgtattcctatatatgcttggaataagacattgccaaataaagcatgcgtggcaagaaaaaatgaaagtgattgggtagaaattgatgactcatatgagtggtgtttttctgttagaacaaatgatctgataagaatagatggcaaaaaagaaagtttttttggatattttaatggttttcatagatcggtggcatcattttctatccttttccatgataggcagatttctaaaaagtacaaaaaaggggaaaaagaaggaattggtgttaaaacagcatattctcttacgaaatataatgtagatgttttaggttattattacctagcaaagccggagaaaagacttgagctggcgtaacgtcatcatcagtaatcctgcaagattgagttgcaaagataagtctttggtaatttcgcaagattatgattatagagtgcctcttgaggatatatcttcgataattatagatagtcctcaagtggttctgactcagcctgttttatcaaagtcagctgattatggaatagcaatttatagtactgattcttcacatacaccaaatggtatctttcttcctttcttatagcataattccccattgagaattttgaatctccagctaaattgccccaagccagtatcaaaaagattaagagctgctatcatatcttcaaagattcataatcaagcccaatgtttaagaataacttctttagatggtgccggttttcttgattctttatctaagcaggtaagatcaggagatcctgataacatagaatcgagagctgcaatatattattttaagatcatatttgggcctaattttggaagacgagatgaaacatcttacgttaattcctgtcttaactacggatacgccgtattaaggggagaaattgcaagaagacttgttgctcacggtttatttcctcctttaggtatatttcactgcaaccaaaaaaactcatttaatttagcagacgatcttattgaaccatttcgtccaatagtagatatcttttcgagaaattacgtaaattctttatctgatgaagagcttttcgttttgccaaaggctcaattggtcaatttactaaattatgaagtatccatgcctgaaggtgacatggcaatatcattggcgacagagtatgtaatagaaagttatgtaagagttctgtctaatcccatcagcaaaatatctttgccaattataaaagagtttgtcccacatcaatattctgagagttgaatttaatgattgaacagagaaactttatgagaatgattgtatttttcgatttgccaacaataacaaagaagaataaacaagattatgttcgttttagaagatttttgttgcaagatggttttgacatgatccaattttctgtttatagcagaatagttgttggaaaagatggagaattacaccattacaacagaataaaagctcatcttccaccaaaaggatctattaggtgtatgacagtaactgaaaaacagtatgcgtcaatacaattcttggtagggaaaaagagtagacaggaagaaaaagtaggtggtgttcagcttttacttttttaaaaaaaaacaatatgagaagtttctttttagtactgaataaagagaaataaaaaaaagcaaactacaccaaagctagacaaggtcagtctttggtggaagttgagattgtagcactgtaagggatttcaaggaagctacaaccgatactacgtcgagaaggtcgaacgcatagattgtagcactgtaagggatttcaaggaagctacaactcactacaccacatgctaactgtagatgacgattgtagcactgtaagggatttcaaggaagctacaacgttaattgccatttgaatattttgtactgagattgtagcactgtaagggatttcaaggaagctacaacttaagaagagaagaaccataacgaccgagagattgtagcactgtaagggatttcaaggaagctacaacaccacaaggtcgatgataaggaatggtaaggattgtagcactgtaagggatttcaaggaagctacaacgtaaatcatattgtgcaattcatggtgtttgattgtagcactgtaagggatttcaaggaagctacaacacctacgacgacgatcatctcaaatcgcctgattgtagcactgtaagggatttcaaggaagctacaacttctaaaacgcggcaaaagacacgactattgattgtagcactgtaagggatttcaaggaagctacaactatctacaattaacttccactacacaaagcgattgtagcactgtaagggatttcaaggaagctacaacaaatccttttaccaaaaagcttgtggcattgattgtagcactgtaagggatttcaaggaagctacaacccactttggtgtcatttctcctgatgctcggattgtagcactgtaagggatttcaaggaagctacaacccagcctgaggataaagcatataattctccgattgtagcactgtaagggatttcaaggaagctacaacttcacttcatactttataaacaagatgaatgattgtagcactgtaagggatttcaaggaagctacaacgatagagtgtgaaatatgaacagactatttgattgtagcactgtaagggatttcaaggaaactacaacttgctagacctaatcttgatttttgatgatgattgtagcactgtaaggaatttcaaggaagctacaacactaatttgttgaatgctcaacgaaaagacgattgtagcactgtgatgaaattcaagaaaacatcactcaaaagattgtcttttgatgaaaattttgatgatgacgagttctttgattaaaacagctagttaaaattgactgaagactactttcataagctttatttattaattcttactgagaatttcatattttcatagctctcatgtaaaatagagcctgaaatttcaatttatgctttttaaagtagaaaatattatatgactgagaagttacagaaaattttatcccgcgctggaattgcttcacgtagagctcttgagcagatgattgatcagggcagagttaccgtaaatggcaaaatggcaactatcggtgacagatacgaagcagatgacattttagttaaaatagacggtaaggttgtattaacacctgacagtcaaaaagtatcttgcagagtcttaatgtatcataagcctgaaggtgagcttactacattatcagatcctgaaaacagacctacagttttcgaccatattccaaagcctcctaccggtcgctggatctacattggccgtcttgatatcaatacctcaggtttactcttatttaccaccgatggtgaattagcaaatgcactgatgcatcctaaatatgaagttgagcgtgtatatgctgcacgtatctatggtgaagtaagtgaagagcaaatcgatcagttaacccaaggcgtaatgctagaagatggcaaagctcgctttaataaagttacttacgtgggtggtgaaggtcgcaatgcctggtaccacgtaaccttaaaagaaggtcgtaagagagaggtccgccgtctttgggaagctgtagggcttaaagtttctcgtcttatcagaattaagtacgcaggtatcgatcttgatcctgacttaaagacaggacagttcagagaacttaccttaaatgagttaaatcgtttaagaaaagctgttcatttagagccagttgaagagttggctccagctttagatttaaatgcctcttcttcaaataaaggaagaaaagctacaaaagctcctgtaagaaagcctgtttcatttaattcttctaaagaagaaaatgatgataagtcttcaagaagatctccatacggtaggccacaatctcgtcctgcaagaggtgataagtcagcttttcctaagaaaggtaaatcttttggtgagaacaaaggaagaaagttctcacaagattcttcatttgataaaaatgacagaagaaagacttttactaaagatgattcctcaaagaagtttggacctaagtcaaacaactctgcaaagcactttgtttcacacacaaatcttcgctctgagaaagaaggtcagtcttttaataaaggctatgctgtaaagagcagaggcagtgctgtatcaaagtcttcttttgcaagacctagaagaacaaatagaggttcttactaagcttaagagctttcttttaagagataatcgtgaaggcggatatttatgaatgagcttttaaattttgagatattttcaaatgaagagcttgtagcaaaggtaaccgccttttcttcacgaggacatgatgtctatgattttagctatgttccttcttggatagaaaaaggctattctctagatccaacattgtatttcacttctgatattcaacatgtccaagttcttcctccttgcttacaagatatatgtccagatcgatggggaaagttaattcaaaaaagaaagttaggttacactccttcttcaactgagtatttgcttggtgtaagcgattattttcgaatgggcgctttacgaatcaaagtcaatggtaattttgttgatgattctacggatagaccaaagttaacaagtttaaatgagttaatcgaagcttctagacaagtagagcttggtaatacgagtgatcatgatataaatttactgtttgctccaagtggcagtttaggaggagcaagaccaaaaggttgtgtagtagataaaggtcaactttttttagctaagtttccatcaataaacgatcaagatattcagttgtcaaagtgcgagaaagtatatttagatttggcaaaagaagctggtatcaaagcttgttcatctaaagttattgaatcgaagtttggtgatgttcttcttttaccaaggtttgacagagatatacataacaaacggattccttttatgtcagcaatgacagctctaggcttgtcagagagcgatgagttggataattacagctatgtagatcttgcaatgtcagatttcatgacgtcaaaagaacaaaagcaagaattattcagaagaatgctctttaatggacttttgggaaatacagatgaccatttgagaaatcatggttttttacgtatcaatggagaatggcaattatctccagcctacgacgtaacaccgaatacagttccctacaataaacaacaccacgcattatgttttattgaaggtaaagatttaccatcattagctttatttaatgatataaaagattattttgaggttgatgacaagcttttcaaatcaatgttacttgatatgaagaatgctcaagcatcatgtctatctcttcttaagaagaataaagtttcacaggacaacataaaattgcttgaaaacaattttgagcacgaagattttgaaaagctaaaatccattgtttagctgtcatatctatcaatttgaagcaaaagaatgcacctattgcaattgtgctatgctaattcgttgtttcaactgtaatatatagcaaagcattcgatgttacttcacataattaatacatgttgttaacatttgttgcttataattgctatatttacatcgttatacatacttttgattttatttgagaaattaaaacttaaaatgaacgcagacccgactgtctttagtcacacatttctatctgatttctttttcaactcatttttacagctaggagcttactgatatgcaagatcaagctctagctcatccaactttaatatttgatatgttgtgggtattagatcctacagcctggttaggtttgttaaccttaacagctattcaggttgttttaggtattgataacttactattcattgctattctgtcagcaagacttccagcaagacaaggtaagactgctcgctacatcggtttaggtggtgctttaatcatcagaattatcttgatgatcttcgccgcttacgtaatggcaatgtcagagccattgttcactgtcttaaactttgaagtttcagttcgagacttaatgatgttcttaggtggtgctttcttgatatacaaatctacagaagagcttcattcaaagttagaagaccaaagcaatgaagagtctgtttctgtaagcaagtcagcaggccattcatttgttattgtagccacacagattatgatcctagatgtactcttctcaggtgattcaatcatcaccgcagttggtatgaccaatcatgtttacatcatgatcatagctgtaactattgctatggcattattgatgtgggcttcaggctttattgcagtctttgtttcaaagcatcctacagtagttatattgtgtttaggcttcctgttgcttatcggtttcagcctgattatggaatcattccatattgaagtaccaaagggatacttatactcagcaattggcttctcattgttaatcgagatcttcaaccaggcctcaagaaagactgttttgaacttaaagcactctaataacatgcaggcccgtcaggtagcagctcatctggtcttaagactgttaggctcaaaaaatgacgacgatgtgcattcaattaaggaagctattgtttcacgtcctagtgcctatgtctttaacaagcaggaaaaagagatggtatctcgtgttcttgaaatgtcatcactgcctgtaaaggctgtaatgacagcaagaactgatctgcaaacaattaaagttgatggctcaaaagagtacatcttaaacaaggcattatcttgcactaagtcattattgattgcttacagaagcggtcacaaagatcagcctttaggttttgtatctcgtgcagatgttttaggcctttttgtcgaagacaaggttgatgttgcccacatggaaaagattgtccaggagcctttatatcttccgcaaacaattaacatcttaagtgccctagatcaatttaggcagtcaaagaaatactttggatttgtctttgatgagttcggaggttttgaaggtattgttactgttcatgatgtggttgaagagatcacaggtgagatgcctgaaaagagtgaaactccagagattgtacgttttggtaaagatggtaagtcatttagagtagatggtgatgctatcttacctgatgttgcaagaataactggtttagacttacctccatcagagcattatcagactattgcaggttacgttttagacagattgcagagagttccaaagcaaggcgaaactttagatgttggtgactggaagattgaagttttcagcgctgatgcaactgcaattaacgtcttaaaactctataggataaagtaggaaaaaacttgatttttatccttacttttgctataaataaagggcttgaagctgatagcgtttcaagcctgttcaagtgtgagcttgaaccttcagtaataaacgagtttattactgatagatatagtggaacttcataaagaaagggaccctagttgaggtcctttttttgtgtttaaaattaaataaattgaggtactaatggcaggaaccattgaagagaaagtagcagagctagtaactcctctggtggagtctatggatcttactgtatggggtatcagattccgtggcggtaatgatcatgcgatgttgcaggtgtttgttgattctgagcaaggtgtaagcgcagataagtgtggcgagttaatggatgtattatctcctgctttagatgcagctgaccttatcgctcctaaatatacacttgaggtatcttcacctggtcttgacagaattttgttcacacttgagcaagctaaggcttatacaggtaaaactgtaaaagctgaacttagaattcctactcagggcagacataagcttcaaggtactttagatgaagtaactgatgatggcatgctgaagattaacgataagatctcaggtcttatcgaagttgcattctcaaatgtatctacagcacgtgttgtcccagagtttccaactaacaacaaaaaagctcctaaaagcggatcatagagaggtcttaaattaaaaatgggtaaagagatcattgccatcgcagaggcactatcaaacgagcgtgctattcctagagataagatttttgaagctttagagactgcattagcaactgcaaccaagaaaaagtatccggttgatatcttagttcgtgttgtaattgacaagaaagacggctcatatgacaccttccgccgttgggaagtagttgatactgacggtccactagagaagcctgctcaggaaatatcacttgcagctgccgctgttgaccatcctggtattaaagcaggtgatattgttgaagagcagatcccttctgttgagtttgaccgtattacaattcagacagcaaagcaggttctatctcagaaagttaaagatgctgagcgcgagcaggttgtagcagagcagcgtgacagaatcggtcatgttgtaaatgcaaccgttaaaaagcagactcatgacatcatggttttagatttgggcaacaacgctgaagctgttctaaagcgtgaacagatcattcctcatgagacctatggtcgtggtgacagagttaaggttttattacaggatatccgttcagagccaaatcgtggtccacagatcatctgctcaagaacttcacctgatttcttaaaagagttattcagaatcgaagtacctgagattggtgaagacgtaatcgaaatcatgggcgcagctcgtgatcctggttcacgtgcaaagatcgctgtaagatccaaggacagaagaatcgatcctcgtggcgcatgtatcggtatgcgtggcgctcgtgtaatggctgtatctaacgagctgtcaggtgaaaagattgacgttgttttatacgatgagaacttagctcagtacgtaactaatgctatggaacctgctgaagtatcacgtattatcatcaacgaagatgatcacactatcttaattgctgtagctgaagagaacttagctttagcaatcggtagaaacggtcagaacgtacgtttagcttcacagcttatcggttgggatctgaaggttatgactgagaaagaacttgagtctaacattcagcaggaagtaggtaaggtagtaaagctatttgaagattctttaaatgttgatgaagagttcgcaactgctctgtcagatgcaggcttcaccaccttagaagaagttgcatacgttgaaccagaagagcttttagctatcgatggtatggatgaggaaacagcaactcagttacaggaagtagcaagaaaggctgttgagaacaaagaaaatgctgaaactgctgaagctatcgctcagttatcatcactagacggtatcgataaagagttagctgctaagttggtagctcacggtatcaagtcaggtgaagatcttgcagatcaggctaccgatgatttaactgacatcgaaggcttagatgagaagaaagctggtgaaatcattatggcagctcgtaatgagtactggttcaaagaagaaaacaaataatacaggaagacttgaatgatgaatgaagaaaatcagggcaatgcaccaaagcgtatgtctttaaagaagaagtcttctggcactatgactttgcagaatgcaggcggtgctaagaaagttcaggttgaggttcgtaaaaagaaatttaacttcgaccctaaagagcgtaaggctcagttggagcaggaagctattgctaagcaaaaggctgaagaagaggcaagaaaagctgaagaggctcgtaaggtcgaagaagctaaaaaagccgaagaagctcgcaaggctgcagctgctaaagctgaggctgacaagaaggctaaggaagctgctaaagctgctgctgttaagactcagccaaaggcagcacctgctcctcataaagaaaagcatgaggataaggcaactgaagagttacgtcgtgctcaagaagagcaacaaaagcgtaagtctgaagaagagtcaaagagacttgcagagcaggccagaaagttagctgaagaaaacgaggctcgttgggcagcagaagaagaggctcgctctcacgagaatgatgacgacgattcaacaacttcacagtatgttcgtgaagctgaggctcgtcaggagcgtgaggctgaaaatagaggccgccaccgcgacagaaatggtgacagacgctcagctaagcgctttgaagagaatgagcagaattcaaacaatcgccgtcagaaaggcggtaaaggtggtaagagcgtaaagggtgctgcaaaattaaatcagcagcaacacggctttaaccgtcctgct

SEQ ID NO: 2720 - DNA, 23396 bp, synthetic construct
  misc_feature 1..23396: note = Synthetic
  source 1..23396: mol_type = other DNA
taactcaacctttaaaggtaacctgtactgcaagattgtagttgagacacctgtaaacttaactaaagaacagaaagatctgttaaagaagtttgaggaatcattaaacggtgatgacaaagcttctacaacgggggatagtaaaaagaaaactgacaccgcagcgaagcataagccaaagtcagcaggcttcataaaaggtgttaagaagttctttgaggatctatcaagttaataatgtgagttgtacagctaatcataagttttcatattgaactaagttatagattaggttattatcaactcatatgatcatgaggacgcctgatgtaacagttaggcgtcatttttttatattttaaattgaggctattatcatggatcagactccaatgactcctcgtggcgaggatttacttcgcaaagaattacagcgcttaaagacagtagagagacctcgcattgtagctgcaattgccgaggctagaagccatggtgatcttagcgaaaacgcagagtacgatgctgcaaaagaagagcagggcctttgcgaagcaagaattaaagacatcgaaggcaagctagcaagtgctaacgttatcgatgtatctaagttaaagactcctaacggtggcaagctaaaggttatctttggtgcaacagtaactgttgttgatgttgatactgacaaagagacaacttacagaatcgtaggtgaagatgaggccgacattcaggctaacttaatttcatacaagactcctatcgctaaaggcttattaggcaagtgcgaagaagacgagattgaaattaagatccctaagggaacaatctgctacgaaattgaaaaggttgagtatatctaagagataacttagaactcatatgtaactggaaaatcttggttgcataatccaatttaacaaaacggaagtacctaaaagtgcctccgttttttttgatcttaagataattgtagactttaaaagtggactttaaagtagactttatctagaggtaacgattatgaatttaggacatgaaaacgaaactcttgagttcaaagagagtttaggtcagcttgacaagggtctaaagtctataactgcaatgctaaacagatctggctatggttgtgtttgctttggtgtattagacaatggagatgttaaagggttaaccgttggtcctaataccttaatggatattagaaataagattaagtttcttatcagtcctcaggctctggttcatatagaaaaagtgacagttggaaagcttgattacatcaaggtaaccgctcatggctcagatattccttacagttgcgatggtcgttactacattagaaatgtggctgcagatgagactgtatctaatgaaacattacgcaaaatgcttacctcatcagagactgacatcataagacgcataccttctgaagatcaagatcttacttttaaccaatttgataattttatgtctaagtatggcattcatacagaatcctctatttctttccataaaaattacggtttaaaaaatgatgaaggtaagttcaatctaattgcttatctgttgtctgatcaaaacaatgtaagcattaaagttgttaaatttgacggtaccgataaaagcacaatgtcagagagaacagattttggatctcaatgtcttttaagatctgttcaagaagttcttgagtatgtaaaagtaaacaatgcagtaaaagtagatctatcagacggtataagaaaagaaacaccacttttagattatgaagcttttagagaggcttggataaatgcatgtattcataacttgtggattgagatgattcctccaattgtttttatatacgacgatagattggagatcctctcaaatggtgggttaccatatggattatcatgtaaagaattcttttgtggtaaaagttttccagtaaatagagaattgtatgctattttaaaatcgactactttgactaatgaaagtaacggtatatctacaattgtttctaaatatacaaaagatgctttttcaataggtagtggcttaattaaggtgactctaaactttaactttgaacgtgatgatgttgtagcacgaaagcataaagagaaagctatttataaactgaccatcaagcaaaagaagatcttagagttgttaaaaggtaatggcgaacttactcaaaaagagctgtctgataagacctcagtaagtttagcaggagtgaaaaagatcatgcaaaagttacaagagcttaatttaatctcaagaagtggggctaaaaagaatggttgttggattgtagcatcccaactgaaataaaaaacgccttattaaaaggcgccttttacaatttgagtgaacctagaagttcaacttaaaactagcgaggaagaatgaatctgctgtcgtcttttctctgtctgaatagaacagcaattctaccaactagagatactaattcagcattaactgtcttagcagcagtttctgcctgctcttttctaccttcaccagcatttaaacggattttgataagctcgtgatgctcaatgctgctgtctagctctttaagcactgattctgaaagaccgtcattgcctagtaagacaactggctttaatgaatgagcttgtgcctttaaaaactggcgctgatgtgaattcaatgacatacaaaacctataataagaaaaaatatctgttaaaagcttaatctattgtgatttagacttcgcataaatgttgtgcaaattgtataatattatcgagtaattttaaactgaaaaatctatagtaatatttgggatttaaatttaatgccagcaaagaaaagaactgccagccaaactagatggttacaggaacacttttccgatccttatgtgaagcaggcccacaagttaggactgcgatcacgcgcttcatttaagctagaagagttgcagaaaaaagatcacctgatccgtcagggtaatatcgtagttgatcttggtgccgctcctggcggttggtctgagtatgccgtaaagtgcatcggagatagcggacgagttatcgcctgtgacattctgccaataagacctattcgtaacgtacagtttttgcagggtgacttcagagaagatgaggtcttcaaaaaactgtattcaatgatcggtgtcggtgctcatgtagtactctctgacatggctcctaatatgtcaggtaacctagctatcgatcagccaagagccatgctgttatcagaattagccttagatatggcaagacgtgtactgcgtattggtggtagttttgctgtaaaagttttccagggtgtaggttctcaagagtttttaaaagaattacatcaggactttaccactgttaaagtaagaaaacctgatgcttcaagagaccgttctcgtgaagtttatatggtagcaatgggctttaaaggtcatcctttaaatggtgttgcaccaggtgctgaatttgaagagtctgaagataagactttggagtaagtgagtaaatatgacaaaaaacctaatattatggctagtcattgctgtgattttaatgactctctttgagtcatttaactcatcagacaattcaggtcgtatggaagactacactagcttcgtaagagaagtgcagtcagatcagatacaggaagttgtatttgatggcaaggttatcaatggtgttaaaaagaacggtgaaagattcttaactgttatgccattgaacgatcctgcaattatcgactctcttttatcacacaatgtaagagcatctggtactaagcctgaagagcagagcttattgctctcaatctttgtgtcatggttcccaatgctgcttttaattggtgtgtggatctttttctcacgtcaaatgcagggcggttctaaaggcaatcctctgtcatttggtaagtcaaaagcaaaactactctctgagaatcagattaaaacaacatttgatgatgtagcaggttgtgatgaggcaaaagaggacgtagttgaattagtagacttcttaaaagatccaaccaagtactctaagttaggaggccgcattccacgtggtgtgttaatggtaggtcctccaggtaccggtaaaactttattagcaagagcaattgcaggtgaagctaaagtgcctttcttctcaatttcaggttctgatttcgtggagatgttcgtaggtgttggtgcttctcgtgtaagagatatgttcgctcaggctaagaagaatgctccatgtattatcttcatcgacgaaattgatgcagtaggtcgcaagcgtggcgtcggcatgggcggtggtcatgacgaaagagagcagaccttaaaccagttactagttgagatggatggttttgaaggctttgaagctgtaattatcatcgctgcaactaacagacctgatgttcttgatcctgcactgttacgtccaggtcgttttgacagacaggtcgtggtaggtttacctgatgtacgtggtcgtgagcagatcttaaatgttcatgtaaagaaagtacctttaggcaaagatgttgatactgcaactatcgcaagaggtactccaggcttctctggtgccgaattagcaaacttggtaaacgaagctgccttaaacgcagcacgtcataacaagcgtgtagtaagcatgaatgagtttgaagaagctaaagataaactcttaatgggtgctgagcgcagaagcatggctatgaatgagcatgaaaagatcaacactgcttatcatgaggcaggtcatgctatcgtaggtaaactggttccagagcacgatcctgtatacaaggtatctattatccctcgtggcagagctttaggtgtaaccatgtatctgcctgaacaggataaggtatctcaaagccgtatcggtctgttatcaaacatttctactctgttcgctggccgtatcgccgaagagttaatgtttggtactgatgctgtaactacaggtgcttcaaatgatattgaaagagcgactcagattgctcgtagcatggtaacccgttggggcttctcaaagagattggctcctatgcagtatgaaaaggacaatgaaggttctgcatacttaggtggttcatctactactatgatttcaatgtcagatgaaactgctaagatcatcgatgaggaagtaacagaaatcatcaactcatgctataagaaagctcaggacttacttgaagctaataaggacattcttgagaatatgaaggatgctctattaaagtatgagaccattgatgctgatcagattgacgatttgatgaatcgtaaagaagttcgtccacctcgtaaggtaggagatgctaaatcttctgatcagaaatcagatgatgactcaaaagatgagaaatcaaatgatgtaaagactgaggataagtcaactgacaatcagtctgaaaaagctaatactgagaactctgacaatgcatcagagacaaaaaaagacgataatgacaataattcagagcagtaattagacaggacaacttgtcaaaattaccatcgtctcatgaaggatctcttgacaggagatcctttgcttttaatgtaggttaaatgggcaagctgatttatatcagttttgtacaagtttagtgtgggatattcgatgaaattaagactgccaaatagtaaaagccttgatttgtcttttacaaaagtaatgggaaccattgctttagaagagaatgatacccgttcaattgaagatcttgttcttctggccaacagctacgtaaaagcaggagccgagcttctggaaattggtgctagagcaggttcagatggcatcaatgaaaccagagtgatgtctgttctttgtgctgtaatgaacagtgttgatgttcctgtggccttaaactcaaacaactatgaggttgtttcacaggctgttaaggccggtgtctccatggttattaccaccaacggccttgcaactgagggcatgattgaccttataaaacgctctaatgttgcagtatgccttcactttgatcctcaagaaaaaattgaagatgacagcgatgtggtaagcatcatttctgaatactactttgaaagaatcgatactcttttaaatgccggtattgaaagaaagagattactcattgacccatcagttgtaaatgcttctgtaagtaacagattaagactgttaggaagacttgagagctttaagagttttgctctgcctatctgtattgctctgcctcgttctttaccaaaagaagacagattcatgaaagataatagagtgcttaccttaactacagctttattctgttcatctgtaagtccagttcaaatcatcagaacagcagatgtaggtgaagttgcaattgcaattggtttttggcagattatggcaagtaagactaagccatttaagttatcaaagactatcgtaagacgtctaagacttctacgtgatgcaattcatgacttaagaaagaacaaagaaaagaattaaaatccaacatctttaaaagtctaatcttttaaaggtaaataacttttagaaagaaaacaaagatgaaaagaaaatattttggtacagacggtgtacgtggccgtgtaggtcaatatcctattactcctgattttgcagtaagactaggtttagctgcaggtaaagttttaggtaagaaacatggcggtaaagttatcattggtaaagatactcgtctgtcaggttatatgctagaagctgccttagagtcaggcttttcagcaggtggtatgtctcctgtaatgttaggccctatgccaactcctgctgtagcatatttaactcgagcattcagagcagacctaggcgttgtaatcagtgcttcacataacccatactatgacaatggtattaagttcttctcagctcatggtaccaagttacctgatgaggttgaacttgagattgagtctgtattagatgctaaggatattcctttagctgcttcatcagactttggtcgtgccttcagacaggatgatgctccaggtcgttacattgagtactgcaagagtacctttgcaagccacttctcattagagggcatgaagattgttttagattgtgctaacggcgctacctatcacatcgctccactggttttcagagagttaggagcaactgttatcaccatcggtgataagcctaatggcattaacatcaatgatggtgtaggttctactcatccagaggctttagttgctaaagtcctttcagaaaaagctgatcttggtattgcttttgatggcgacggtgaccgcgttttaatgtgcgacagtcacggtaacttacgtgacggtgacaaccttctgtatatcattgctaacgacactaaaaagcgtggacgtctgccaggtggtgtagtaggtactttaatgacaaacttaggtcttgagttagctttaaagcgtgaaggtattcctttctctcgtgctaaggttggtgatagatatgttatggagcagttgttagagaagaactggactctaggcggagagaacagcggtcacatcatcagcttaaaccatgcaaccacaggtgatggtatcgtatcagcactgcaggtcctaaaggcttgtatgtatgcaggcaagacagttgaagagttatctgaaggcctgaccatgtacccacaggatcttatcaacgtaagattaacagcaggtcttgatgtaactcgtgacgagaaagttcaggctgttgtagctgaagttgaaaaagagttaggctcaactggtcgtgtgcttttacgcaaatcaggaaccgagcctgtggttcgtgtaatggttgaaggtgagaatgcacaggacgttcatactaaagctcaaagaattgctgatgtgatcatccatcaggcaggctgtgaaaatgcttgaaaaaaagcataataacctgtaatatttgcacagctttgtatacgcaaaataggatgcgtttttattatgtacgaaattggtattgtagttttattactaattgcaattgcaatgattgctttgatccttgttcagcagggtaaaggtgctggcatgggcgcttcatttggtgctggtgcatcaaatacagtattcggttcagtaggatctggtaacttcctgactagatcaacttggactttaattattctgttcttcggtgtttgcttattcttaggttacttacagaagtcagctcacgaagagaagtcaagtttcagcaatatttctgagactcctgcaacagagcaggttgaggagaagactgttgttaacactgatgctcctgtagttgatacagatgcacctgcagtttcagacacaacagatgctcctaagactgacgctccagagactaagtaataaaagtttctactaaaaaagacccaccgtacggtgggttttttattggcgattttagataaattgattagaatacgtagtgcttggtaggagttatgacttcatgcaaaggcatatcccaatgctcaataggtacagcatctaaaagttggaagtcataagctacacctactaaaagacattgagcagagagcttctttaacattctgtcgtaatagcctccacccatacctaatctgttgcctttattatcaaatccaactaatggcacaatcaaagcttcaaatttatcaggagttaccagattctctggtaaattctcaggctctagaatgtggaagcggttttcaattaacctgtcacctttcttataggaataaaagtccatatgaccttttacgtgaacatccataaaaggtagagctaattcatggtgttctagaagatactcgttaataggctctgtagataactcaccacctaagcttaaatatgatcccaccattttcttttgcaagaagtgtttatggtgacttaagatttttacaatctcaacgccagcctcataggcttttacaggtgttacctgtcttctttgttctaagatctgctgacgcagagacttacgtaaaactttgttatcaaaaaaatcagtcattgttagctctttgaagagaagttttcatcttggtgattagttttaatgcttcattttcaaatggagttttgtcgtttagatatccttgcaaggtactctctgagtcaagcgcaattaagatagctgcttgtgtaggagttaaattaggattatctcgcatcatagaggatgctttagtttgtaatgaagctatcgctctttgaagattttctttttgctcttttgcgcatcttaagttaaagctctcaccaaagagtgcacattgaacgaaatcctgtgtgttttgatctgacatatgtaattcctttcgcacatcctattgtaaagttatttaacaaaatatccatagcataatcaaagatagcttttaaaataagacgtagtattcagtaattgctccataaaagaacttttggatagtaaaaaagagttcagcctcaaacaagatcgattcaaaagaaagggacaagatcattaaagagataaacgcttcaatcgcatctggcgagttcttccaagatcaagatgatgaaattactgatgaagaatacattgaagatgcagctgaatttagatactttcaagaagacgaagactttgacgatgatgagtttttcgattgagcctaatctaaaaaatagagacaaataagttaagagattcgtacagctcaataagttggtcctgtttcttaacctacaaataaaaagccctcacctaagtgagggcgggttcggtaatctttcgaaaaccctattgtaacaacgttgaaatcccttacagtgtcacaatgcctaaattatacgttaataaaaaaataagatcaattttttaattatataacacaaaaattgtgtgataaatctcgcaatccaaattatatatgaaaagaaaataatttttatatattagaattaaaatattatatagatagtatattggtgatgaatatgtcttatgtgcttggcctagatttaggtatcgcgtccgttggttggtcaatagttgaaccaggtaacagaattattgatttaggagtaagagtttttaaaaaagcagaaactgacaaagaaggtgatccattaaatcttaccagacgagaaagtaggttaagtagaagacgtttgtatcgcagagcgcatcgtctcagcagacttcttaattttttaatatcttcagggcttatacattctaaagatgaagtattgaagaatgtgtataacgaaaacccttgggcgttgcgtacattaggcttgaactcagtccttacaaataatcagttggctagagtaatttatcatatatgcaaacaccgaggattttactgggcttcatctgctgatgacggtcaggcagataatggaaaaattaaaaaaagcctatcttcgaaccaactggtaatgaaagaaaaaggatacaagactgtaggtcagatgatctttactgagtatccaaactgtcaaagaaataagtctggtgaatattctaaatcgcttcctagaacagacttggacaaagaattaagagcaatttttaaagcacagcaatcattttcaaatccaattgtcacaaaagattttatcaatgcaattgtggggtgcggagacagaaagagcggatttctttgggagcaaagacctgcattacaaggagaagatctcctaaaaatggtaggtcactgtcgttttgagaaagatgaattgagagctctagcggctaatttttactcagaacaacttgtttggcttactaaaattaataatcttcgagtatatgatgaagacagccaagaacgacctctaacaagagaagaacgtgacttaatcctcaatatgcctttggaaatgaaaagtgatattaaatattcttctttaacatcagcttttgagaaggcaaatttatggaagtctggacaatttaaatacaaatctgtcgattatgaacagaaaacacaaaaaaagaaaaataccgcaaaatctgttgacatcacaaagtcttcaaaaaagaaccctgaggataaagttttttataagagttctcatcttcatgaaattagaaaagcattaggcagtagcctatctgaagaatgggaaaagataagaacagaagttctctctggcaaatatgaccgttacaacagaatcgcctatgtattaacagtttacaaagaagattctgatgtgatagaacaattatctccatatgaatcaagaacacttatagaagcattgctacccgtaagatttagcggttttgttgcattatccgaaaagtctctaaaaaaaataatcccacacatggttttgggaaaaaggtatgatgaggcttgctctgaagctaactataagcattacaagcaaaatcaagctgaattcaaaaaattaaaatatttgccccctcttttttcaggaagagaacctaacggaactttaatttttaatgaagaaattggtgacattcctagaaatcctgtagttttaagagtgattaaccaaacaagaaaagttgtaaatgctattgttaaaaagtacggatctccaaaatctgtacatattgagttggctcgtgatttagcaaaatcaagagcagagcgaaatgaaattgaaaaaagaaatgaagaagctgcttcaagacacattaaggagcgagatgaatttgaaaaactgtttggttcaaaatgtctaaatggaacaaacttactgaaatacagactctataaagaacaagactgtaagtctatgtattccggcaaagaaattgaccataaaagattatttgaaaaaggttacgttcaaattgatcacattctgccttactcaagatcatatgatgattctcaatccaataaggtcctcgtattaacaaatgagaatcaggataaggggaatcgaattccatttgaatatttcgaagcaaaacaacatggcttttcttggtatgaatttgaacagtgggttaagtcgtgcaagaacttaaatcaaaagaaaaaaagaaatctgttaagatgctcattatcaaaggatgctaaaaaagatttcttagaaagaaacttaaatgatacccgttatgcttgcaggtttgtgaagaattatattgatagcttcctttgcctatctgaaaattctgataactctggatgtgttgtagttgcaggtcagcttacggcttacttaagaaattgttggggattaaacaaagttagagaagaaaatgacagacatcatgcattagatgcaactgttattgcttgttgcacaagaaaaattgttcaaaaagttggtgcttggtcgaagtcaagagagatgaattcatataattcttcttatgttgatcctgattcaccagtagatgaagatgaaaagcttctacaaaaattatatgtaaatacaagaaaacctgattttccaaaaccttgggaatgttttagaagtgaagtagagtcaagggtttttgaaagtgctcttgaaaaactaaaagaaaagttgaaattgcaatgctcttatacagaaagtgaactgaaaaatgttagaactctttttgtttctcgcgcatgcgaaaaaattggtaaaggagctttgcatggtgacaccgtttatcgtcaaacttcagaaatgagaaaagaaaatgttgcagtaaaaaaggtttctctaaaaaaactgaaatatgcaaggataggagctattgtagatgcagatactcgtaataaaaatctatgtgatgctttgaaaaaacgatatgaagagtatgcaagaaaaattggaaaaaaaatagaagactttgttgataaagatattgcaaaaatatttgctgatgataatccattgcatatgcctaatagtgatggtcaagaagatccttgcaatccgatagtaaaatcggtaagagtaaaagaggctttctctggtgtgcctattcgaaatggtgttgcaggaaacagtactatcataagagttgatctgttcaagaaagacggtaagtattactgtattcctgtttatgcatggaataaaacattgcctaaccgcgcatatgtatctggcaaaaaagaaacagattgggcattagttgatgattcatttgaatggtgtttctctattagacaaaatgaactattaaagattaaattaaaaggtgaaacaatatttggctactataatggatttgatagagatagaggaagttttaacatattacttcatgatagacaagatggtaaagatcacaaacaaggtttaattagaaaaggaataaaaacggcaatttccattacaaaatacgatgttgatgttttgggaaattattacctatcaaagccggagaagcgccttgagttggcgtaacgtcatcatcagtaatcctgcaagattgagttgcaaagataagtctttggtaatttcacaggattatgattatagagtgcctcttgaggatatatcctcgataattatagatagtcctcaagtggtgctgactcagcccgttttatcaaaggctgctgattatggaatatcaatttatagtactgattcatctcatacaccaaatggtatctttcttcctttcttgcaacataattcaccattgagaattttgaatcttcagctaaattgtcctaaacctgtatcaaaaagattaagagccgcgatcatatcttcaaagattcataatcaagcccaatgtttaagaataacttctttagatggtgccggttttcttgattctttatctaaacaggtaagatcaggtgatcctgataacatagaatcgagagctgcaatatattattttaagatcatatttgggcataattttggaagacgagatgaaacatcttacgttaattcctgtcttaactacggatacgccgtattaaggggagaaattgcaagaagacttgttgctcacggtttatttcctcctttagggatatttcactgcaaccaaaaaaactcatttaatttagcagacgatcttattgaaccatttcgtccaatagtagatatcttttcgagaaattatgtaaattctttatctgatgaagagcctttcgttttgccgaaggctcaattggtcaatttactaaattatgaagtatccatgcctgaaggtgacatggcaatatcattggcgacagagtatgtaatagaaagttatgtaagagttctgtctaatcccatcagtaaaatatctttgccaattataaaagagtttgtcccacatcaatattctgagagttgaatttaatgattgaacagagaacctttatgagaatgattgtatttttcgatttgccaacaataacaaagaagaataaacaagattatgttcgttttagaagatttttgttgcaagatggttttgacatgatccaattttctgtttatagcagaatagttgttggaaaagatggagaattacaacattacaacagaataaaagctcatcttccaccaaaaggatctattagatgtatgacagtaactgaaaaacagtatgcgtcaatacaattcttggtaggaaaaaagagtagacaggaagaaaaagtaggaggtgttcagcttttacttttttaaaaaacaatatgaaacgtttcttttctctctgaataaagcaaattttagaaaaaaatcatactccatcaaagcttgataatatcaggctttgatggaaatgagattgtagcactgtaagggatttcaaggaagctacaacatcattagagcaattaaacgtgatcataatgattgtagcactgtaagggatttcaaggaagctacaaccctggtttaattgatcatttctagtaggaggattgtagcactgtaagggatttcaaggaagctacaaccgtactattgttttcaatcctactaaggcagattgtagcactgtaagggatttcaaggaagctacaaccgttcaatagttttcaatcctacaaaagccgattgtagcactgtaagggatttcaaggaagctacaactctataattaatggtgttaagtcttggtttgattgtagcactgtaagggatttcaaggaagctacaaccttgctttaaatcaagatgctattaacaatgattgtagcactgtaagggatttcaaggaagctacaacttacaacaaacagaaaacgtaatggggttagattgtagcactgtaagggatttcaaggaagctacaactttttgttagttacaatacaacgttgtttcgattgtagcactgtaagggatttcaaggaagctacaacattactacttgatactcattaacagcttgcgattgtagcactgtaagggatttcaaggaagctacaaccagaatatatttaactgacttacacgcatagattgtagcactgtaagggatttcaaggaagctacaacccatttgatgatcacttctaattgaaataagattgtagcactgtaagggatttcaaggaagctacaactatccattcataactatgagttttggtttagattgtagcactgtaagggatttcaaggaagctacaacaattttaatattccattaggtgataatttcgattgtagcactgtaagggatttcaaggaagctacaacatatctaagtggaatgtatctaatgttaaagattgtagcactgtaagggatttcaaggaagctacaactgcgcattaagcaattattcgacaagcttgtattgtagcactatgataaaattcaaggaaacaatacccaaaagattatttttgatgagtttttgattaaaacagttatttagattgaatttaacttactttctgaatcttggtctattaattctttcagagaatttcatattttcaaagctctcatgtaaaatagagcctgaaatttcaatttatgctttttaaagtagaaaataatatatgactgagaagttacagaaaattttatcccgcgctggaattgcttcacgtagagctcttgagcagatgattgatcagggcagagttaccgtaaatggcaaaatggctaccatcggtgacagatacgaagcagatgacattttagttaaaattgacggtaaggtagtattaacacctgacagtcaaaaagtatcttgcagagtcttaatgtatcataagcctgaaggtgagcttactacattatcagatcctgaaaacagaccaacagtattcgaccatattcctaagcctccaactggtcgttggatctacattggtcgtcttgatatcaatacctctggtttactcttatttaccactgacggtgagttagctaatgcgctgatgcatcctaaatatgaggttgaacgtgtatacgcagctcgtatctatggtgaagtaagtgaagagcaaatcgatcagttaacccaaggcgtaatgctagaagatggcaaagctcgctttaataaagttacttacgtgggtggtgaaggtcgcaatgcctggtaccacgtaaccttaaaagaaggtcgtaagagagaggtccgccgtctttgggaagctgtagggcttaaagtttctcgtcttatcagaattaagtacgcaggtatcgatcttgatcctgacttaaagacaggacagttcagagaacttaccttaaatgagttaaatcgtttaagaaaagctgttcatttagagccagttgaagagttggctccagctttagatttaaatgcctcttcttcaaataaaggaagaaaagctacaaaagctcctgaaagaaagcctgtttcatttaattcttctaaagaagaaaatgatgataagtcttcaagaagatctccttacggaaagcctcaagctcgttcagcaagaggcgagaaatcatctttccctaagaaaggtaaaacttttggagatagcaaaggtcgcaagttttcaaaagaatcttcttttgataagaatgacagaagaaagacttttactaaagatgattcctcaaagaagtttggacctaagtcaaacaactctgcaaagcactttgtttcacacacaaatcttcgctctgagaaagaaggtcagtcttttaataaaggctatgctgtaaagagcagaggcagtgctgtatcaaagtcttcttttgcaagacctagaagaacaaatagaggttcttactaagcttaagagctttcttttaagagataatcgtgaaggcggatatttatgaatgagcttttaaattttgagatattttcaaatgaagagcttgtagcaaaggtaaccgccttttcttcacgaggacatgatgtctatgattttagctatgttccttcttggatagaaaaaggctattctctagatccaacattgtatttcacttctgatattcaacatgtccaagttcttcctccttgcttacaagatatatgtccagatcgatggggaaggttaattcaaaaaagaaagttaggttacactccttcttcaactgagtatttgcttggtgtaagcgattattttcgaatgggcgctttacgaatcaaagtcaatggtaattttgttgatgattctacggatagaccaaagttaacaagtttaaatgagttaatcgaagcttctagacaagtagagcttggtaatacgagtgaccatgatataaatttactgtttgctccaagtggcagtttaggaggagcaagaccaaaaggttgtgtagtagataaaggtcaactttttttagctaagtttccatcaataaacgatcaagatattcagttgtcaaagtgcgagaaagtatatttagatttggcaaaagaagctggtatcaaagcttgttcatctaaagttattgaatcgaagtttggtgatgttcttcttttaccaaggtttgacagagatatacataacaaacggattccttttatgtcagcaatgacagctctaggcttgtcagagagcgatgagttggataattacagctatgtagatcttgcaatgtcagatttcatgacatccaaggaacaaaagcaagaattattcagaagaatgctctttaatggacttttgggaaatacagatgaccatttgagaaatcatggttttttacgtatcaatggagaatggcaattatctccagcctacgacctaacaccgaatacagttccctacaataaacaacaccacgcattatgttttattgaaggtaaagatttaccatcattagctttatttaatgatataaaagattattttgaggttgatgacaagcttttcaaatcaatgttacttgatatgaagaatgctcaagcatcatgtctatctcttcttaagaagaataaagtttcacaggacaacataaaattgcttgaaaacaattttgagcacgaagattttgaaaagctaaaatccattgtttagctgtcatatctatcaatttgaagcaaaagaatgcacctattgcaattgtgctatgctaattcgttgtttcaactgtaatatatagcaaagcattcgatgttacttcacataattaatacatgttgttaacatttgttgcttataattgctatatttacatcgttatacatacttttgattttatttgagaaattaaaacttaaaatgaacgcagacccgactgtctttagtcacacatttctatctgatttctttttcaactcatttttacagctaggagcttactgatatgcaagatcaagctctagctcatccaactttaatatttgatatgctgtgggtattagatcctaccgcatggttaggtttattaaccttaacagctattcaagttgttttaggtattgataacttactattcattgctattctgtcagcaagacttccagcaagacaaggtaagactgctcgctacatcggtttaggtggtgctttaatcatcagaattatcttgatgatcttcgccgcttacgtaatggcaatgtcagagccattgttcactgtcttaaactttgaagtttcagttcgagacttaatgatgttcttaggtggtgctttcttgatatacaaatctacagaagagcttcattcaaagttagaagaccaaagcaatgaagagtctgtttctgtaagcaagtcagcaggccattcatttgttattgtagccacacagattatgatcctagatgtactcttctcaggtgattcaatcatcaccgcagttggtatgaccaatcatgtttacatcatgatcatagctgtaactattgctatggcattattgatgtgggcttcaggctttattgcagtctttgtttcaaagcatcctacagtagttatattgtgtttaggcttcctgttgcttatcggtttcagcctgattatggaatcattccatattgaagtaccaaagggatacttatactcagcaattggcttctcattgttaatcgagatcttcaaccaggcctcaagaaagactgttttgaacttaaagcactctaataacatgcaggcccgtcaggtagcagctcatctggtcttaagactgttaggctcaaaaaatgacgacgatgtgcattcaattaaggaagctattgtttcacgtcctagtgcctatgtctttaacaagcaggaaaaagagatggtatctcgtgttcttgaaatgtcatcactgcctgtaaaggctgtaatgacagcaagaactgatctgcaaacaattaaagttgatggcacaaaagaatacatcttaaacaaggcactatcttgcactaagtcattattgattgcttacagaagcggtcacaaagatcagcctttaggctttgtatctcgtgcagatgttctaggcttgtttgtagaagacaaagtagatgctactcatatggaaaagattgtccaggagcctttatatcttccgcaaacaattaacatcttaagtgccctagatcaatttaggcagtcaaagaaatactttggatttgtctttgatgagttcggaggttttgaaggtattgttactgttcatgatgtggtcgaagagatcacaggtgagatgcctgaaaagagtgaaactccagagattgtacgttttggtaaagatggtaagtcatttagagtagatggtgatgctatcttacctgatgtagcaagaataactggtttagacttacctccatcagagcattatcagactattgcaggttacgttttagacagattgcagagagtgccaaagcaaggcgaaactttagatgttggtgactggaagattgaagttttcagcgctgatgcaactgcaattaacgtcttaaaactccataggataaagtaggaaaaaacttgatttttatccttacttttgctataaataaagggcttgaagctgatagcgtttcaagcctgttcaagtgtgagcttgaaccttcagtaataaacgagtttattactgatagatatagtggaacttcataaagaaagggaccctagttgaggtcctttttttgtgtttaaaattaaataaattgaggtactaatggcaggaaccattgaagagaaagtagcagagctagtaactcctctggtggagtctatggatcttactgtatggggtatcagattccgtggcggtaatgatcatgcgatgttgcaggtgtttgttgattctgagcaaggtgtaagcgcagataagtgtggcgagttaatggatgtattatctcctgctttagatgcagctgaccttatcgctcctaaatatacacttgaggtatcttcacctggtcttgacagaattttgttcacacttgagcaagctaaggcttatacaggtaaaactgtaaaagctgaacttagaattcctactcagggcagacataagcttcaaggtactttagatgaagtaactgatgatggcatgctgaagattaacgataagatctcaggtcttatcgaagttgcattctcaaatgtatctacagcacgtgttgtcccagagtttccaactaacaacaaaaaagctcctaaaagcggatcatagagaggtcttaaattaaaaatgggtaaagagatcattgccatcgcagaggcactatcaaacgagcgtgctattcctagagataagatttttgaagctttagagactgcattagcaactgcaaccaagaaaaagtatccggttgatatcttagttcgtgttgtaattgacaagaaagacggctcatatgacaccttccgccgttgggaagtagttgatactgacggtccactagagaagcctgctcaggaaatatcacttgcagcagccgctgttgaccatcctggtattaaagctggtgatattgttgaagagcagatcccttctgttgagtttgaccgtattacaattcagacagcaaagcaggttctatctcagaaagttaaagatgctgagcgcgagcaggttgtagcagagcagcgtgacagaatcggtcatgttgtaaatgcaaccgttaaaaagcagactcatgacatcatggttttagatttgggcaacaacgctgaagctgttctaaagcgtgagcagatcattcctcatgagacctatggtcgtggtgacagagttaaggttttattacaggatatccgttcagagccaaatcgtggtccacagatcatctgctcaagaacttcacctgatttcttaaaagagttattcagaatcgaagtacctgagattggtgaagacgtaatcgaaatcatgggtgcagctcgtgatcctggttcacgtgcaaagatcgctgtaagatccaaggacagaagaatcgatcctcgtggcgcatgtatcggtatgcgtggcgctcgtgtaatggcagtatctaacgagctgtcaggtgaaaagattgacgttgttttatacgatgagaacttagctcagtacgtaaccaatgctatggaacctgctgaagtatcacgtattatcattaacgaagatgaccacactatcttaattgctgtagctgaagagaacttagctttagcaatcggtagaaacggtcagaatgtacgtttagcttcacagcttatcggttgggatctgaaggttatgactgagaaagaacttgagtcaagcattcagcaggaagtaggtaaggtagtaaagctatttgaagattctttaaatgttgatgaagagttcgcaactgctctgtcagatgcaggcttcaccaccttagaagaagttgcatacgttgaacctgaagagcttttagctatcgatggtatggatgaggaaacagcatctcagttacaggaaattgcaagaaaggttgttgagagcaaagaaaatgctgaaactgctgaagctatcgctcaattatcatcactagacggtattgataaagaattagctgctaagttggtagctcacggtatcaagtcaggtgaagatcttgcagatcaggctaccgatgatttaactgacatcgaaggcttagatgagaagaaagctggtgaaatcattatggcagctcgtaatgagtactggttcaaagaagaaaacaaataatacaggaagacttgaatgatgaatgaagaaaatcagggcaatgcaccaaagcgtatgtctttaaagaagaagtcttctggcactatgactttgcagaatgcaggcggtgctaagaaagttcaggttgaagttcgtaaaaagaaatttaacttcgaccctaaagagcgtaaggctcagttagagcaggaagctattgcaaagcaaaaggctgaagaagaggctagaaaagctgaagaggctcgtaaggccgaagaagctaaaaaagccgaagaagctcgcaaggctgcagctgctaaagctgaggctgacaagaaggctaaggaagctgctaaagctgcggctgttaaggctcagccaaagccaactcctgctcctcataaagagaagcatgaggataaggcaactgaagagttacgtcgtgctcaagaagagcaacaaaagcgtaagtctgaagaagagtcaaagagacttgctgagcaggccagaaagttagctgaagaaaacgaggctcgttgggcagcagaagaagaggctcgctctcacgagaatgatgacgacgattcaacaacttcacagtatgttcgtgaagctgaggctcgtcaggagcgtgaggctgaaaacagaggccgccaccgcgacagaaatggtgacagacgttcagctaagcgctttgaagagaatgagcagaattcaaacaatcgccgtcagaaaggcggtaaaggtggtaagagcgtaaagggtgctgcaaaattaaatcagcaacaacacgggtttaaccgtcctgctgttcctgtaaaccgtgatgttgagatcggtgagaccatcactgtagctgaattagcagctaagatggctgttaaggcaactgaagttatca

SEQ ID NO: 2721 - DNA, 23393 bp, synthetic construct
  source 1..23393: mol_type = other DNA
  misc_feature 1..23393: note = Synthetic
agctaatcataagttttcatattgaactaagttatagattaggttattatcaactcatatgatcatgaggacgcctgatgtaacagttaggcgtcatttttttatattttaaattgaggctattatcatggatcagactccaatgactcctcgtggcgaggatttacttcgcaaagaattacagcgcttaaagacagtagagagacctcgcattgtagctgcaattgccgaggctagaagccatggtgatcttagcgaaaacgcagagtacgatgcagcaaaagaagagcagggtctttgcgaagcaagaattaaagacatcgaaggcaagctagcaagtgctaacgttatcgatgtatctaagttaaagactcctaacggtggcaagctaaaggttatctttggtgcaacagtaactgttgttgatgttgatactgacaaagagacaacttacagaatcgtaggtgaagatgaggccgacattcaggctaacttaatttcatacaagactcctatcgctaaaggcttattaggcaagtgcgaagaagacgagattgaaattaagatccctaagggaacaatctgctacgaaattgaaaaggttgagtatatctaagagataacttagaactcatatgtaactggaaaatcttggttgcataatccaatttaacaaaacggaagtacctaaaagtgcctccgttttttttgatcttaagataattgtagactttaaaagtagactttaagtagactttaaagtagactttatctagaggtaatgattatgaatttaggacatgaaaacgaaactcttgagttcaaagagagtttaggtcagcttgacaaaggtctaaagtctataactgcaatgctaaacagatctggctatggttgtgtttgctttggtgtattagacaatggagatgttaaagggttaaccgttggtcctaataccttaatggatattagaaataagattaagtttcttatcagtcctcaggctctggttcatatagaaaaagtgacagttggaaagcttgattacatcaaggtaaccgctcatggctcagatattccttacagttgcgatggtcgttactacattagaaatgtggctgcagatgagactgtatctaatgaaatattacgcaaaatgttaactacatcagagactgacatcataagacgcataccttctgaagatcaagatcttacttttaaccaatttgatagttttatgtctaagtatggcattcatacagaatcctctatttctttccataaaaattacggtttaaaaaatgatgaaggtaagttcaatctaatggcttatctgttgtctgatcaaaacaatgtaagcattaaagttgttaaatttgaaggtaccgataaaagcacaatgtcagagagaacagattttggatctcaatgtcttttaagatctgttcaagaagttcttgagtatgtaaaagtaaacaatgcagtaaaagtagatctttctggcggcataaggaaagaaactccactactagattatgaagcttttagagaggcttggataaatgcatgcttgcataactcttgggcggagatgttgcctccatctgtatttgtgtatgacgacagaatggagatcgtgtcttatggaggtcttccatttggtttgtctaaagaaggattctttaaaggaacaagtttacctgtaaatagaggattgctaacaatctttattgcgacaggttttgctgagcaaagtggtcatggtgttccaattatcgtatctaaatatagtgaagaagctttttcttttgaaaacggtatgataaaagttacattgaattttaactatgaacctgctgaagtagttcgtagaattgaaatagaaaggactgaagataatctcactgttaaacaaagagaagttctagagttaataaaagaaaatgtaaagattacccaaaaagaactgtctgaaaaagcaaatttaagtttagctggagttaagaagatcatgcttaaattgcagaatatgaacttaatagaaagagtaggtgctaagaaaaatggttattggactgtaaatagtagactttaagtaaactttaaagtagactttaattaagaaatgtctttaaaatctaaagagtataaaatcttaataaatttaaagtctattaaaaggtactataaatttgaatactaagttacagttgtaggcagtagaaataaaaaacgccttattaaaaggcgccttttacaatttgagtgaacctagaagttcaacttaaaactagcgaggaagaatgaatctgctgtcgtcttttctctgtctgaatagaacagcaattctaccaactagagatactaattcagcattaacagttttagcagcagtttctgcctgctcttttctaccttcaccagcatttaaacggatcttgataagctcgtgatgctcaatgctgctgtctagctctttaagcactgattctgaaagaccgtcattgcctagtaagacaactggctttaatgaatgagcttgtgcctttaaaaactggcgctgatgtgaattcaatgacatacaaaacctataataagaaaaaatatctgttaaaagcttaatctattgtgatttagacttcgcataaatgttgtgcaaattgtataatattatcgagtaattttaaactgaaaaatctatagtaatatttgggatttaaatttaatgccagcaaagaaaagaactgccagccaaactagatggttacaggaacacttttccgatccttatgtgaagcaggcccacaagttaggactgcgttcacgcgcttcatttaagctagaagagttgcagaaaaaagatcacctgatccgtcagggtaatatcgtagttgatcttggtgccgctcctggcggttggtctgagtatgccgtaaagtgcatcggagatagcggtcgagttatcgcctgtgacattctgccaataagacctattcgtaacgtacagtttttgcagggtgacttcagagaagatgaggtcttcaaaaaactgtattcaatgatcggtgtcggtgctcatgtagtactctctgacatggctcctaatatgtcaggtaacctagctattgatcagccaagagccatgctgttatcagaattagccttagatatggcaagacgtgtactgcgtattggtggtagttttgctgtaaaagttttccagggagtaggttctcaagagtttttaaaagaattacatcaggactttaccactgttaaagtaagaaaacctgatgcttcaagagaccgttctcgtgaagtttatatggtagcaatgggctttaaaggtcatcctttaaatggtgttgcaccaggtgctgaatttgaagagtctgaagataagactttggagtaagtgagtaaatatgacaaaaaacctaatattatggctagtcattgctgtgattttaatgactctctttgagtcatttaactcatcagacaattcaggtcgtatggaagactacactagtttcgtaagagaagtgcagtcagatcagatacaggaagttgtatttgatggcaaggttatcaatggtgttaaaaagaacggtgaaagattcttaactgttatgccattgagcgatcctgcaattatcgactctcttttatcacacaatgtaagagcatctggtactaagcctgaagagcagagcttattgctctcaatctttgtgtcatggttcccaatgctgcttttaattggtgtgtggatctttttctcacgtcaaatgcagggcggttctaaaggcaatcctctgtcatttggtaagtcaaaagcaaaactactctctgagaatcagattaaaacaacctttgatgatgtagcaggttgtgatgaggcaaaagaggacgtagttgaattagtagacttcttaaaagatccaaccaagtactctaagttaggaggccgcattccacgtggtgtgttaatggtaggtcctccaggtaccggtaaaactttattagcaagagcaattgcaggtgaagctaaagtgcctttcttctcaatttcaggttctgatttcgtggagatgttcgtaggtgttggtgcttctcgtgtaagagacatgttcgctcaggctaagaagaatgctccatgtattatcttcatcgacgaaattgatgcagtaggtcgcaagcgtggcgtcggcatgggcggtggtcatgacgaaagagagcagaccttaaaccagttactagttgagatggatggttttgaaggctttgaagctgtaattatcatcgcggcaactaacagacctgatgttcttgatcctgcactgttacgtccaggtcgttttgacagacaggtcgtggtaggtttacctgatgtacgtggtcgtgagcagatcttaaatgttcatgtaaagaaagtacctttaggtaaagatgttgatactgcaactatcgcaagaggtaccccaggcttctctggtgccgaattagcaaacttggtaaacgaagctgccttaaacgcagcacgtcataacaagcgtgtagtaagcatgaatgagtttgaagaagctaaagataaactcttaatgggtgctgagcgcagaagcatggctatgaatgagcatgaaaagatcaacactgcttatcatgaggcaggtcatgctatcgtaggtaaattggttccagagcacgatcctgtatacaaggtatctattatccctcgtggcagagctttaggtgtaaccatgtatctgcctgaacaggataaggtatctcaaagccgtattggtctgttatcaaacatttctactctgttcgctggccgtatcgccgaagagttaatgtttggtactgatgctgtaactacaggtgcttcaaatgatattgaaagagcgactcagattgctcgtagcatggtaacccgttggggcttctcaaagagattggctcctatgcagtatgaaaaggacaatgaaggttctgcatacttaggtggttcatctactactatgatttcaatgtcagatgaaactgctaagatcatcgatgaggaagtaacagaaatcatcaactcatgctataagaaagctcaggacttacttgaagctaataaggacattcttgagaatatgaaggatgctctattaaagtatgagaccatcgatgctgatcagattgacgatttgatgaatcgtaaagaagttcgcccacctcgtaaggtaggagatgctaaatcttcagatcagaaatcagatgataactcaaaagatgagaaatcaaatgatgtaaagactgaggataagtcaactgacaatcagtctgaaaaagctaagactgagaactctgacaatgcatcagagacaaaaaaagacgataatgacaataattcagagcagtaattagacaggacaacttgtcaaaattaccatcgtctcatgaaggatctcttgacaggagatcctttgcttttaatgtaggttaaatgggcaagctgatttatatcagttttgtacaagtttagtgtgggatattcgatgaaattaagactgccaaatagtaaaagccttgatttgtcttttacaaaagtaatgggaaccattgctttagaagagaatgatacccgttcaattgaagatctagttttacttgcaaatagctatgttaaagctggtgctgagctactggagattggagctaaagctggtgctaacggcatcaacgaaactcgtgtgatctctgtgttgtgcgctgtgatgaacagtgtagatgttcctgtagcactaaactcaaacaactatgaaattgtttcacaggctattaaagcaggtgtttcaattgttattaccacaaacggtctgtccacagagggcatgatcgatcttgtcaaaggatcagaggtagctgtatgccttcactttgatcctaaagaaaaaattgaagatgacagcgatgtggtaagtatcatttctgaatactactttgaaagaatcgatactcttttaaatgctggtattgaaagaaagagattactcattgacccatctgtagtaaatgcttctgtaagtaacagattaagactgttaggaagacttgagagctttaagagttttgctctgcctatctgtattgctctgcctcgttctttaccaaaagaagacagattcatgaaagataatagagtacttaccttaactacagctttattctgttcatctgtaagtccagttcaaatcatcagaacagcagatgtaggtgaagttgcaattgcaattggtttttggcagattatggcgagtaagactaagccatttaagttatcaaagactatcgtaagacgtctaagacttctacgtgatgcaattcatgacttaagaaagaacaaagaaaagaattaaaatccaacatctttaaaagtctaatcttttaaaggtaaataatttttagaaaaaaagaaaacaaagatgaaaagaaaatattttggtacagacggtgtacgtggccgtgtaggtcaatatcctattactcctgattttgcagtaagactaggtttagctgcaggtaaagttttaggtaagaaacatggcggtaaagttatcattggtaaagatactcgtctgtcaggttatatgctagaagctgccttagagtcaggcttttcagcaggtggtatgtctcctgtaatgttaggccctatgccaactcctgctgtagcatatttaactcgagcattcagagcagacctaggcgttgtaatcagtgcttcacataacccatactatgacaatggtattaagttcttctcagctcatggtaccaagttacctgatgaggttgaacttgagattgagtctgtattagatgcaaaggatattcctttagctgcttcatcagactttggtcgtgccttcagacaggatgatgctccaggtcgttacattgagtactgcaagagtacctttgcaagccacttctcattagagggcatgaagattgttttagattgtgctaacggcgctacctatcacatcgctccactggttttcagagagttaggagcaactgttatcaccatcggtgataagcctaatggcattaatatcaatgatggtgtaggttctactcatccagaggctttagttgctaaagtcctttcagaaaaagctgatcttggtattgcttttgatggcgacggtgaccgcgttttaatgtgcgacagtcacggtaacttacgtgacggtgacaaccttctgtatatcattgctaacgacactaaaaagcgtggacgtctgccaggtggtgtagtaggtactttaatgacaaacttaggtcttgagttagctttaaagcgtgaaggtattcctttctctcgtgctaaggttggtgacagatacgttatggagcagttgttagagaagaactggactctaggcggagagaacagcggtcacatcatcagcttaaaccatgcaaccacaggtgatggtatcgtatcagcactacaggtcctaaaggcttgtatgtatgcaggcaagacagttgaagagttatctgaaggtctgaccatgtacccacaggatcttatcaacgtaagattaacagcaggtcttgatgtaactcgtgacgagaaagttcaggctgttgtagctgaagttgaaaaagagttaggctcaactggtcgtgtacttttacgcaaatcaggaaccgagcctgtggttcgtgtaatggttgaaggtgagaatgcacaggacgttcatactaaagctcaaagaattgctgatgtgatcatccatcaggcaggctgtgaaaatgcttgaaaaaaagcataataacctgtaatatttgcacagctttgtatacgcaaaataggatgcgtttttattatgtacgaaattggtattgtagttttattactaattgcaattgcaatgattgctttgatccttgttcagcagggtaaaggtgctggcatgggcgcttcatttggtgctggtgcatcaaatacagtattcggttcagtaggatctggtaacttcctgactagatcaacttggactttaattattctgttcttcggtgtttgcttattcttaggttacttacagaagtcagctcacgaagagaagtcaagtttcagcaatatttctgagactcctgcaacagagcaggttgaagagaagactgttgttaacactgatgctcctgtagttgatacagatgcacctgcagtttcagacacaacagatgctcctaagactgacgctccagagactaagtaataaaagtttctactaaaaaagacccaccgtacggtgggttttttattggcgattttagataaattgattagaagacgtagtgcttggtaggagttatgacttcatgcaaaggcatatcccaatgctcaataggtacagcatctaaaagttggaagtcataagctacacctattaaaagacattgagcagagagcttctttaacattctgtcgtaatagcctccacccatacctaatctgttgcctttattatcaaatccaactaatggcacaatcaaagcttcaaatttatcaggagttaccagattctctggtaaattctcaggctctagaatgtggaagcggttttcaattaacctgtcacctttcttataggaataaaagtccatatgtccttttacgtgaacatccataaaaggtagagctaattcatggtgttctagaagatactcgttgataggttctgtagataactcaccacctaagcttaaatatgatcccaccattttcttttgcaagaagtgtttgtggtgacttaagatttttacaatctcaacaccagcctcataagctttaataggtgttacctgtcttctttgttctaagatctgctgacgcagcgacttgcgtaaaactttgttatcaaaaaaatcagtcattgttagctctttgaagagaagttttcatcttggtgattagttttaatgcttcattttcaaatggagttttgtcgtttagatatccttgcaaggtactctctgagtcaagcgcaattaagatagctgcttgtgtaggagttaaattaggattatctcgcatcatagaggatgctttagtttgtaatgaagctatcgctctttgaagattttctttttgttcttttgcgcatcttaagttgaaactctcaccaaagagtgcacattggacaaagtcctgagaatcgttttgatctgacatatgtaattccttttgcacatcctattgtaaagttatttaacaaaatatccatagcataatcaaagacagcttttaaaataagacgtagtatccagtaattgctctatgaatcaatgaaataataaaatatacgtatagttgttaaattcgtaattaaatcacacatataataaatatagtatgatataattgctcaataaaagaacttttggatagtaaagaagagttcagcttcaaacaagatcgattcaaaagaaagggacaagatcattaaagagattaacgcttcaatcgcatctggcgagttctaccaagatcaagatgatgaaattactgatgaagagcgcattgaagatgcggctgaatttggatactttcaagaagacgaagactttgacgatgctgagtttttcgattgagcctaatctaaaaaaatagagacaaataagttaagagattcgtacagctcaataagttggtcctgtttcttaacctacaaataaaaagccctcacctaagtgagggcggcttcggtaatctttcgaaaaccttattgtaacaacgttgaaatcccttacagtgtcacaatgtctaaattatacgttaataaaaaaataagatcaattttttaattatataacacaaaaattatgtgataaatctcgcaatccaaattatatatgaaaagaaaataatttttatatattagaattaaaatattatatagatagtatattggtgataaatatgtcttatgtgcttggccttgatttaggtatcgcatccgttggttggtcaatagttgaaccaggtaacagaattattgatttaggagtaagagtttttaaaaaagcagaaactgacaaagaaggtgatccattaaatcttatcagacgagaaagtaggttaagtagaagacgtttgtatcgcagagcgcatcgtctcagcagacttcttaattttttaatatcttcagggcttatacattctaaagatgaagtattgaagaatgtgtataacgaaaacccttgggcattgcgtacattaggtttgaactcagtccttacaaataatcagttggctagagtaatttatcatatatgcaaacaccgaggattttattgggcttcatctgctgatgacggtcaggcagataatggaaaaattaaaaaaagcctatcttcgaaccaactggtaatgaaagaaaaaggttacaagactgtaggtcagatgatctttactgagtatccaaactgtcaaagaaataagtctggtgaatattctaaatcgcttcctagaacagacttggacaaagaattaagagcaatttttaaagcacagcaatcattttcaaatccaattgtcacaaaagattttatcaatgcaattgtggggtgcggagacagaaagaccggatttctttgggagcaaaaacctgcattacaaggagaagatctcctaaaaatggtaggccactgtcgttttgaaaaagatgaattgagagctccagcggctaatttttactcagaacaacttgtttggcttactaaaattaataatcttcgagtatatgatgaagacagccaagaacggcctctaacaagagaagaacgtgacttaatcctcaatatgcctttggaaatgaaaagtgatattaaatattcttctttaacatcagcttttgagaaggcaaatttatggaagtctggacaatttaaatacaaatctgtcgattatgaacagaaaacacaaaaaaagaaaaattccgcaaaatctgttgacatcacaaagtcttcaaaaaagaaccctgaggataaagttttttataagagttctcatcttcatgaaattagaaaagcattaggcaacagcctatctgaagaatgggaaaagataagaacagaagttctctctggcaaatatgaccgttacaacagaatcgcctatgtattaacagtttacaaagaagattctgatgtgataaaacaattatctccatatgaatcaagaacacttatagaagcattgctccccgtaagatttagcggttttgttgcattatcagaaaaatctctaaaaaaaataatcccacacatggttttgggaaaaaggtatgatgaggcttgctctgaagctaactataagcattacaagcaaaatcaagctgaatccaaaaaattaaaatatttgccctctcttttttcaggaagagaacctaacggaactttaatttttaatgaagaaattggtgacattcctagaaatccagtagttttaagagtgattaaccaaacaagaaaagttgtaaatgctattgttaaaaaatacggatctccaaaatctgtacatattgagttggctcgtgatttagcaaaatcaagagcagagagaaatgaaattgaaaaaagaaatgaagaagctgcttcgagacgcattaaggagcgagatgaatttgaaaaactgtttggttcaaaatgtctaaatggaacaaacttactgaaatacagactctataaagaacaagactgtaagtctatgtattccggcaaagaaattaaccataaaagattatttgaaaaaggttacgttcaaattgatcacattctgccttactcaagatcatatgatgattctcaatccaataaggtcctcgtattaacaaatgagaatcaggataaggggaatcgaattccatttgaatatttcgaaacaaaacaacagggcttttcttggtatgaatttgaacagtgggttaaatcctgcaagaatataaatcaaaagaaaaaaagaaatctgttaagacgctcattatcaaaggatgctaaaaaagatttcttagaaagaaacttaaatgatacccgttatgcttgcaggtttgtgaagaattatattgatagctttctttgcctatctgaaaattctgataactctggatgtgttgtagttgcaggtcagcttacggcttacttaagaaattgttggggattaaacaaagttagagaagaaaatgacagacatcatgcattagatgcaactgttattgcttgttgcacaagaaaaattgttcaaaaagttggtgcttggtcgaagtcaagagagatgaattcatataattcttcttatgttgatcctgattcaccagtagatgaagatgaaaagcttctacaaaaattatatgtaaatacaagaaaacctgattttccaaaaccttggaaatgttttagaagtgaagtagagtcaagggtttttgaaagtgatcttgaaaaactaaaagaaaagttgaaattgcaatgctcttatacagaaagtgaactgaaaaatgttagaactctttttgtttctcgcgcatgcgaaaaaattggtaaaggcgctttgcatggtgataccgtttatcgtcaaacttcagaaatgagaaaagaaaatgttgcagtaaaaaaggtttctctaaaaaaactgaaatatgcaaggataggagctatcgtagatgcagatactcgtaataaaaatctatgtgatgccttgaaaaaacgatatgaagagtacagtagtatcacaggtaaggatgtaagtaagattgataaaaaagacctttcaaagatcttttcagatgataaaccgatgcatatgcctaacagtgaaggtcaagaagatccatgtaatccgatagttaaatcagtaagagtaaaggaggcttgctctggtgttcctattcgaaatggtgttgcagaaaacagtactatcgtaagagttgatatttttaaaaagaaaggtcaatattattttgttccaatctattcttggaataagtcattaccaaatagagcatgtcaaggtaaaaataaaagtgattgggtagttgttgatgattcgtatgagtggtgtttttctgttagaacgaatgatttgttaaaaattgttataaaaggaaaaacgtattttgattattttattactttagatgtacattcagatggaagaataagactattaaatcatgataggcaagaagatgatgtgcattacgaaaatggtgaatatagaatttccttaaaaaacgctgattcaataaataaatataatgtcgatgttttaggaaattattacctagcaaagccggagaaacgacttgagctggcgtaacgtcatcatcagtaatcctgcaagattgagttgcaaagataagtctttggtaatttcacaggattatgattatagagtgcctcttgaggatatatcctcgataattatagatagtcctcaagtggtgctgactcagcctgttttatcaaagtcagctgattatggaatagcaatttatagtactgattcttcacatacaccaaatggtatctttcttcctttcttgcaacataattccacattgagaattttgaatcttcagctaaattgtcctaaacctgtatcaaaaagattaagagccgcgatcatatcttcaaagattcataatcaagcccaatgtttaagaataacttctttagatggtgccagttttcttgattctttatctaaacaggtaagatcaggtgattctgataacatagaatcgagagctgcaatatattattttaagatcatatttgggcctaattttggaagacgagatgaaacatcttacgttaattcctgtcttaactacggatatgcagtattaaggggagaaattgcaagaagacttgttgctcacggtttatttcctcctttaggtatatttcactgcaaccaaaaaaactcatttaatttagcagacgatcttattgaaccatttcgtccaattgtagatatcttttcgagaaattatgtaaattctttatctgatgaagagcctttcgttttgccgaaggctcaattggtcaatttactaaattatgaagtatccatgcctgaaggtgacatggcaatatcattggcgacagagtatgtaatagaaagttatgtaagagttctgtctaatcccatcagcaaaatatctttgccaattataaaagagtttgtcccacatcaatattctgagagttgaatttaatgattgaacagagaacctttatgagaatgattgtatttttcgatttgccaacaataacaaagaagaataaacaagattatgttcgttttagaagatttttgttgcaagatggttttgacatgatccaattttctgtttatagcagaatagttgttggaaaagatggagaattacaacattacaacagaataaaagctcatcttccaccaaaaggatctattagatgtatgacagtaactgaaaaacagtatgcgtcaatacaattcttggtaggtaaaaagactaaacaggaagagaaagtaggaggtgttcaactcttacttttttaaaaaacaatgtaaaaagtttcttttctcccagaataaagcgaaaattagaaaaaatcatactccatcaaagcttgataatatcaggttttgatggaaatgagattgtagcactgtaagggatttcaaggaagctacaacccagaagtaagcgcattacttaatcaaagtgattgtagcactgtaagggatttcaaggaagctacaacttcaaacataccgatgtcagtaagaccatagattgtagcactgtaagggatttcaaggaagctacaacgttcacatttaaaagtctatcagtccattcgattgtagcactgtaagggatttcaaggaagctacaactctcgttattgttagacttaaacgcaatcagattgtagcactgtaagggatttcaaggaagctacaactaattatctttaacatttttaagctcagtagattgtagcactgtaagggatttcaaggaagctacaactgcacatatcaactttatgaacttacaagggattgtagcactgtaagggatttcaaggaagctacaactcttcagctgttactaacgtttctggtgtcgattgtagcactgtaagggatttcaaggaagctacaactgtaatttattaaagcatcattgatgatgggattgtagcactgtaagggatttcaaggaagctacaacttcaggctttgtgtctttgatgatttttaagattgtagcactgtaagggatttcaaggaagctacaacgtatggaatgcgatgatggtacagttctatgattgtagcactgtaagggatttcaaggaagctacaactagcgatattctgcgtacctttcttgatatgattgtagcactgtaagggatttcaaggaagctacaactgatacatcatcaagttctgataacctgcagattgtagcactgtaagggatttcaaggaagctacaactctaatcttcgctctctgaagactggtaacgattgtagcactgtaagggatttcaaggaagctacaacaactctttaataatttctactttaaagtagattgtctccttatactaaatattaaaaatgttatgacaagatttttgtttagaatataaacatcaataaatagtcaattttaaacaaaagcttttaacgaattgcattaacaagagctctaagataataaatagttcgatgttaaaataattgtttataggctattgttagaaatcaaatgccattttaagttgtatgagattttaatttacggcaaacaaatcgaaccgatcaacatcacataatttttcggttcacttaatgccaaacaagttaatataaactcgtagcttaacgttacaggttaactacagtatatgattaacaaacaatttttgtgataacgatctgccccatttgttggccgtaattttattggaaattataattaaattttgttatttcatattttcaaagctctcatgtaaaatagagcatgaaatttcaatttatgctttttaaagtagaaaatattatatgactgagaagttacagaaaattttatcccgcgctggaattgcttcacgtagagctcttgagcagatgattgatcagggcagagttaccgtaaatggcaaaatggctaccatcggtgacagatacgaagcagatgacattttagttaaaattgacggtaaggtagtattaacacctgacagtcaaaaagtatcttgcagagtcttaatgtatcataagcctgaaggtgagcttactacattatcagatcctgaaaacagaccaacagtattcgaccatatcccaaagcctccaactggtcgttggatctacattggtcgtcttgatatcaatacatctggtttactcttatttaccactgacggtgagttagctaatgcgctgatgcatcctaaatatgaggttgaacgtgtatacgcagctcgtatttatggtgaagtaagtgaagatcaaatcgatcagttaacccaaggcgtaatgctagaagatggcaaagctcgctttaataaagttacttacgtgggtggtgaaggtcgcaatgcctggtaccacgtgaccttaaaagaaggtcgtaagagagaggtccgccgtctttgggaagctgtaggtcttaaagtttctcgtcttatcagaattaagtacgcaggtatcgatcttgatcctgacttaaagacaggacagttcagagaacttaccttaaatgaattaaatcgtttaagaaaagctgttcatttagagccagttgaagagttggctcctgcattagacttaaatgcctcatcttcaaataaaggaagaaaagctacaaaagctcctgtaagaaagcctgtttcatttatttcttctaaagaagaaaatgatgataagtcttcaagaagatctccatacggtaagccacaatctcgtcctgcaagaggggataagtcagctttccctaagaaaggtaaatcttttggtgagaacaaaggaagaaagttcacacaagattcttcatttgataaaaatgacagaagaaagtcttttaccaaagatgattcttcaagaaagtttggtaataagtcaaacaactctgcaaagcactttgtttcacacacaaatcttcgctctgagaaagaaggtcagtcttttaataaaggctatgctgtaaagagcagaggcagtgctgtatcaaagtcctcttttgtaaagccaagaagaacaaatagaagttcatattaagcttaagagctatcttttaagagataatcgtgaaggcggatatttatgaatgagcttttaaattttgagatattttcaaatgaagagcttgtagcaaaggtaaccgccttttcttcacgaggacatgatgtctatgattttagctatgttccttcttggatagaaaaaggctattctctagatccaacattgtatttcacttctgatattcaacaagtccaagttcttcctccttgcttacaagatatatgtccagatcgatggggaaggttaatacaaaaaagaaagttaggttacactccttcttcaactgagtatttgattggtgtaagcgactattttcgaatgggagctttacgaattaaaatcaatggtaaatttgttgatgattctacggatagaccaaagttaacaagtttaaatgagttaatcgaagcttctagacaagtagagcttggtaatacgagtgatcatgatataaagctgctatttgctccaagtggcagtttaggaggggcaagaccaaaatgttgtgtagtagataatggtcaactttttttagctaagtttccatcaataaacgatcaagatattcagttgtcaaagtgcgagaaagtatatttagatttggcaaaagaagctggtatcaaagcttgttcatctaaagttattgaatcgaagtttggtgatgttcttcttttaccaaggtttgacagagatatacataacaaacgaattccttttatgtctgcaatgacggctcttggattgtcagaaaatgatgagttggataattacagctatgtagatcttgcaatgtcagatttcatgacgtcaaaagaacaaaagcaagaattattcagaagaatgctctttaatggacttttgggaaatacagatgaccatttgagaaatcatggttttttacgtatcaatggagaatggcaattatctccagcctacgacctaacaccgaatacagttccctacaataaacaacaccacgctttatgttttattgaaggtaacgatttaccatcattagctttatttaatgatataaaagattattttgaggttgatgacaagcttttcaaatcaatgttgcttgatatgaagaaagctcgagcatcatgtctatttcttcttaagaagaataaagtttcacaggacaacataaaattgcttgaaaacaattttgagcacgaagattttgaaaagctaaaatccattgtttagctgtcatacctatcaatttgaagcaaaagaatgcacctattgcaattgtgctatgctaattcgttgtttcaactgtaatatatatcaaagcatgcgatgttacttcacataattaatacatgttgttaacatttgttgcttataattgctatatttacatcgttatacatacttttgattttatttgagaaattaaaacttaaaatgaacgcagacccgactatatttagtcacaccattctatctaacctctctattttttcattttcaaagctaggagctaaataactatgcaagaacaggctctagctcatccaactttattattcgatatgctgtgggtattagatcctactgcatggttaggtttattaaccttaacagcaattcagattgttttaggtattgataacttactattcattgctattctgtcagcaagacttccagcaagacaaggtaagacagctcgctacattggtttaggtggtgctttaatcatcagaattatcttgatgatcttcgccgcttacgtaatggcaatgtcagagccattgttcactgtcttaaactttgaagtttcagttcgagacttaatgatgttcttaggtggtgctttcttgatatacaaatctacagaagagcttcattcaaagttagaagaccaaagcaatgaagagtctgtttctgtaagcaagtcagcaggccattcatttgttattgtagccacacagattatgatcctagatgtactcttctcaggtgattcaatcatcaccgcagttggtatgaccaatcatgtttacatcatgatcatagctgtaactattgctatggcattattgatgtgggcttcaggctttattgcagtctttgtttcaaagcatcctacagtagttatattgtgtttaggcttcctgttgcttatcggtttcagcctgattatggaatcattccatattgaagtaccaaagggatacttatactcagcaattggcttctcattgttaatcgagatcttcaatcaggcctcaagaaagactgttttgaacttaaagcactccaataacatgcaggcccgtcaggttgcagctcacttagttctaagactgttaggctcaaaagatgatgatgtgcactcaattcaggaagctattgtttcacgtcctagtgcctatgtctttaacaagcaggaaaaagagatggtatctcgtgttcttgaaatgtcatcactgcctgtaaaggctgtaatgacagcaagaactgatctgcaaacaattaaagttgatggctcaaaagagtacatcttaaacaaggcattatcttgcactaagtcattattgattgcttacagaagcggtcacaaagatcagcctttaggttttgtttcaagagcagatgttttaggcctttttgtcgaagacaaggttgatgttgcccacatggaaaagattgtccaggagcctttatatcttccgcaaacaattaacatcttaagtgccctagatcaatttaggcagtcaaagaaatactttggatttgtctttgatgagttcggaggttttgaaggtattgttactgttcatgatgtggttgaagagatcacaggtgagatgcctgaaaagagtgaaactccagagattgtacgttttggtaaagatggtaagtcatttagagtagatggtgatgctatcttacctgatgttgcaagaataactggtttagacttacctccatcagagcattatcagactattgcaggttacgttttagacagattgcagagagttccaaagcaaggcgaaactttagatgttggtgactggaagattgaagttttcagcgctgatgcaactgcaattaacgtcttaaaactctataggataaagtaggaaaaaacttgatttttatcattacttttgctataaataaagggcttgaagctgatagtgtttcaagcctgttcaagtgtgagcttgaaccttcagtaataaacgagtttattactgatagatatagtggaacttcataaagaaagggaccctagttgaggtcctttttttgtgtttaaaattaaataaattgaggtactaatggcaggaaccattgaagagaaagtagcagagctagtaactcctctggtggagtctatggatcttactgtatggggtatcagattccgtggcggtaatgatcatgcgatgttgcaggtgtttgttgattctgagcaaggtgtaagcgcagataagtgtggcgagttaatggatgtattatctcctgctttagatgcagctgaccttatcgctcctaaatatacacttgaggtatcttcacctggtcttgacagaattttgttcacacttgagcaagctaaggcttatacaggtaaaactgtaaaagctgaacttagaattcctactcagggcagacataagcttcaaggtactttagatgaagtaactgatgatggcatgctgaggattaacgataagatctcaggtcttatcgaagttgcattctcaaatgtatctacagcacgtgttgtcccagagtttccaactaacaacaaaaaagctcctaaaagcggatcatagagaggtcttaaattaaaaatgggtaaagagatcattgccatcgcagaggcactatcaaacgagcgtgctattcctagagataagatttttgaagctttagagactgcattagcaactgcaaccaagaaaaagtatccggttgatatcttagttcgtgttgtaattgacaagaaagacggctcatatgacaccttccgccgttgggaagtagttgatactgacggtccactagagaagcctgctcaggaaatatcacttgcagcagccgctgttgaccatcctggtattaaagctggtgatattgttgaagagcagatcccttctgttgagtttgaccgtattacaattcagacagcaaagcaggttctatctcagaaagttaaagatgctgagcgcgagcaggttgtagcagagcagcgtgacagaatcggtcatgttgtgaatgcaaccgttaaaaagcagactcatgacatcatggttttagatttgggcaacaacgctgaagctgttctaaagcgtgagcagatcattcctcatgagacctatggtcgtggtgacagagttaaggttttattacaggacatccgttcagagccaaatcgtggtccacagatcatctgctcaagaacttcacctgatttcttaaaagagttattcagaatcgaagtacctgagattggtgaagacgtaatcgaaatcatgggcgcagctcgtgatcctggttcacgtgcaaagatcgctgtaagatccaaggacagaagaatcgatcctcgtggcgcatgtatcggtatgcgtggcgctcgtgtaatggcagtatctaacgagctgtcaggtgaaaagattgacgttgttttatacgacgagaacttagctcagtacgtaaccaatgctatggaacctgctgaagtatcacgtattatcatcaacgaagatgaccacactatcttaattgctgtagctgaagagaacttagctttagcaatcggtaggaacggtcagaatgtacgtttagcttcacagcttatcggttgggatctgaaggttatgactgagaaagaacttgagtcaagcattcagcaggaagtaggtaaggtagtaaagctatttgaagattctttaaatgttgatgaagagttcgcaactgctctgtcagatgcaggcttcaccaccttagaagaagttgcatacgttgaacctgaagagcttttagctatcgatggtatggatgaggaaacagcatctcagttacaggaaatagcaagaaaggttgttgagagcaaagaaaatgctgaaactgctgaagctatcgctcaattatcatcactagacggtatcgataaagagttagctgctaagcttgtagctcacggtatcaagtcaggtgaagatcttgcagatcaggctaccgatgatttaactgacatcgaaggcttagatgagaagaaagctggtgagatcattatggcagctcgtaatgagtactggttcaaagaagaaaacaaataatacaggaagacttgaatgatgaatgaagaaaatcagggcaatgcaccaaagcgtatgtctttaaagaagaagtcttctggcactatgactttgcagaatgcaggcggtgctaagaaagttcaggttgaagttcgtaaaaagaaatttaacttcgaccctaaagagcgtaaggctcagttggagcaggaagctattgctaagcaaaaggctgaagaagaggcaagaaaagctgaagaggctcgtaaggccgaagaagctaaaaaagccgaagaagctcgcaaggctgcagctgctaaagctgaggctgaaaagaaggctaaggaagctgctaaagctgcggctgttaagactcagccaaagccaactcctgctcctcataaagagaagcatgaggataaggcaactgaagagttacgtcgtgctcaagaagagcaacaaaagcgtaagtctgaagaagagtcaaagagacttgcagagcaggccagaaagttagctgaagaaaatgaggctcgttgggcagcagaagaagaggctcgctctcacgagaatgatgacgacgattcaacaacttcacagtatgttcgtgaagctgaggctcgtcaggagcgtgaggctgaaaacagaggccgccaccgcgacagaaatggtgacagacgttcagctaagcgctttgaagaaaat

SEQ ID NO: 2722 - DNA, 23282 bp, synthetic construct
  source 1..23282: mol_type = other DNA
  misc_feature 1..23282: note = Synthetic
ataagagaattcatcattcagcttcttatccgccattttaagagcaccgtcataacacagtcccatttcatatctgctttgtgaatccgccatacatttgtaatatgattctgtcgttaatgggtcctttactaatttataaccttgaggtaccattacactagttgcattttcagagtatattcccactgttttgggggttacatactcaaagtagaaagttaaccggctaggattatttccgacctgtatctgtgcaagcatatctataacttgatcttcatcaacaagaccggattcataattagcctgaagcgctttaaatttttttagttttgcttcctcatcctgaataactttttgaatttgtttctgaccactaaaaactccctcagtgtttgtattatcggcaaatacaaagctactcagggaaataataacaacagcagaacagacactacaccacaatcctttcataatgcacctctggtattttttgggggaatgacaattaaagtttaggttctatataaggcaaagcaaattatagaaatccattcaaaagtggatatctctttcttgctgtgaggtacaaaaggtatgtggtttagccgttaggtggctttttaaacttaggggctttcgcggtggagtttaatgtaaaatataagaaaaaggggcgtggtgatgccttaccactttttacatattcagaagactccccgaatacaaccttcaaatcaataatagatcaatatcgttccagattttgatatggttttagattttatgggtcagtacagaaaagtgtgggatggtaataagagcgtgaaataaaaaaagggtctacgttataattttaagtgaacaaaaaaaacaaaattaaaacgagacccaagaatgaatattacagatctagactcatttaagcaagaccatggttacatttctgttgatcctttggaaggctttatatctttaccttcaggtttagattgttttaaacagactcactgcagactacagagagtcaacagaaatgatggaactaaggtaaagccactagttagaaggcatgatgagtatgagttgtatggagtctgtactcaaaagtatgaaccaaaagtatgtcctcgatgtggggcaccgctgcatcgtaatggaagtataaccacaacattaaggcatatacctttaggagattcatattcactggtagaagctgatagacctcgtttccgctgttccagtcagggctgtgagtacagtgaggttggcagtattccgtttaaagctcaagggcatctgattacagagcctttgaggctgtatacagaagcgttactggcatatggaatgactctaaaggaagtgtcccatataacaggactacacaagtgcgttgttaaggatatagataaagcaagactggaaggactttacgtaacagtagataaggacggaaagaaaaccttaatcaagcctgagcagcaagccagatttataggcatagatgagtttaagctgcatgatggacataaatatgccactgtaattctcgatatggaaagtggctgtattttatggcttcagaccggtaaaaagaagcaggttgtatacgactttattgagcatgtaggtcttgaatggatgtccaaggttgaagcagtatcctcagatatgaattcagattttgaggaggcatttctggagaaatgccctcatatgaaagttgtttatgatcacttccatctgattaatttccgaggtcggaaattgatcagaattcccgcttgaaaataattcccgacttttttgttaatttcttgatttttcaagccataagtctctcattagatcgggaattatttaggtaacactacctcacttttgttcgcttaagcacgtcctttagagatccgtctttattacgccattttcgtggtagtttaggatcgtccatgccattcaccttttccatctgagttgccttctcatctactgtgatatccagatatttcatggtggtctccagttgggcgtgatgtaggattttgcttacctctaagatatttacatcatgctcaattaggtgtgtggctctggcatgtctgaattgatgactgtgtggtttatttggaacttcgctgcattgtctggccgccataagaccatacttcttgatacgtttgtcgtaggcatcatgactaagtggtctgactccaggagcctccaaaggcgagtagaacacaaatgagtcaggttgaggcgtcacaccgtggaattctgagatatacttgcgcagatgtgctgcagctttttgtggaaggaagcatatgcgtggctcgcctcctttgtttatgatttgaatatatggatccgacacgtcatccagatgtacattttttatctttagattgagaatagcagcagctcttgtggcagtaccatactgcagaaccatcatggtcaaatccctgcgaccagttgctgtgctttggtctgtttgattgaaaatggctgtaacggctgattcactcatcccagtgacgtgttttttaggggactttttgcggtccatatcttttgcctcagcgtaaagatgtttccatcctggctctttgttaccaagaaacttgagaaatatgcttagctgtgagagtcgattgttgactgagcagatagcgtttccctttacatcggcaagccatttaacccattcccttaggttgtcaactccaaaagaagcagccgagatggaggtgcaagtaactcccttttcagtctcaagccaatcaaagtataccgacagggagtctcgataatttttgatagttcctctgctggaagtgatatacataggagcatagcagtcgagaaattctgcgaccagatttaaaattcgatttgactctttcatggctgtacctctgggacgataacatcaaaagcggcaccgcatttcttttctattagtcgggccagttgagggcttaaatcgtagtagtggtctagagtaacctgcatgcaggaatgccccatacttttgctcaaataagtcatattggtaagggcatcgtaatttccaatccaggcgtttatatttgctgtcgcatagttgtgcctaaaatccattggaaccacctcatgattctctggattggccttatcccaaagcctacgaaaataagagttcagccaaggtgtacttagatgattgccctttgcagaataaaagaaatactctcgtcctgattgcaggcgaagttcaacttgtttgtcgtatgctctcatgattttaagagtagaatcatgtagcacaatacggtactgattcatccccttatcctcttgaatctcaaccacacctgttttcagatcgacattggttcgcttgagtttgagagtagctccaggtctcatacccgtgctgtagagaaatctgaacagcactggacaagtcagctgggcggcaagagcaaattttttgacacagcctcgtattagagaacaatcagaatatagtctgtcacattcatggaaaaatcgacggagcatgtcatcggtaagaggatgtggcaggcgaagatgctgtttgtatgcaagtcttgtgggtgagtcaacttcagtgagttgatgtgctctgagataggaaattagtgcgactattgtttcatttctactatttgttgattgtggtgattcactagaacgttgggcacaccacccattcaccatgctctgagtaagagaatcatgattagggaaatgttgcatacagtaacggtcaaaactacacaacattaactcatagtgcctattccagcacttgcatgcagtgcgaaatttgatgaactctttaaacaaaggcgccagcttggaaataaaatcagccatgatatacctcgctgattataggaaaattctcgatgctgagagcacagcctttgagatgcacaagatccgcatgcagatacgagtcaagggactttgggctactatgtgcaacggcattagagattatgtatctaggtacacctttgcttaaagccatgcttgccccgtaatggcgggataaatgacaccctcttgtgtcattgtctttttgacgaattttagctaaatcaaaaatcaggttaaaaacattatttaaaacataagggttgatgtgacaatgtggtggataatgggtaagaaaaataaatttctcatcactcttaggtcgctcattctcgatgtaatcccacagagcgttgagaacttttaccgacagtttttgtcttgtaggcacatcagttttgctggttaaaatagaaagagtctctttatcccagtcaatgtcatcaaaagtgaggtttacaatatcgatccttcgcagccatgtatgaaccagaagtaaaccaagtgaacggtctctatatgaaagagatgatgttggatcatctaatacgctcttaatagcatccatttcgtcttcagatagatattgtttgtttttgcgtttaaactttatagaaggcaagatggtcaacagtcttttaatttcgacgttagatgattcaagtctcttaaaacagcgtttgagctgagcctgacaactctctgagtaggacgttcctttatttccgatcaggaaatagtcaagaataatagattcagatacttcagataaacaataaatacctctgctttcgataaaattcaaaaaacctgacagaacgcttacatcactgccgatagttttctcgggagttccgaaggctaaagcaatgtgcttgtaactgtcgaccaaatttttatattgactatctatatgcctataaaagcagtcaagtggctttactaacaatgcagtctgagagttacccgcaggcataagccccaaaacatcgaagcggtatacagtatttaccaatgaccttgcatctcggacacatgattgtgagactgcgtctacccttgctactaagacatcatcatacgatctccagtcaggattgttgttattcaagatccagttgatagttgctctgacgtgttcataccgtccatctgaatacccgttgtttttgaggaaatccagaagttctttctttcttttttttaagttggtaaaacccataaagcacctccaaatagatgtactttaaggataatgaaaaaaattaattcccgatctaatgagagacttatgacttgaaaaatcagtaaatttataaaaagatcgggaattatttttaggcgggaattattgttaagaactttaacgataaggtaatctcagaggttcgtaaggatgaacaacgcaggcttatagccgaaggcgatatggcagctgcagatgcacttaaaggaagtaagtatatacttacctcaaagagagaaactctatctgcaaaagatcaagatgcagaagaaggaaaaataatctcccgaggctcagaactgtttaagaaacaggaagttaaacagaaaggagagcagtaccatagatacatggaattaatctcccagaaccgactgctgatggatttggactgggtaaagagcaatttagagcaagcctatctaaagcatacagctgcagagatgaagctctatatagaagagattattagctactgtgaaggcacagaaaacaagcatttcatatggtttgccaagttacttagaaatcatattgatggcatcataagtcatgcagaatatccgttatcaaacggaaaggttgaaggcatcaatcagaaaataaagaccatcagaaggaagagctatggactacccgatgatgaatatttctttttaaagctctttgatgcctccagacaaaaatggaaggctcagattgaatagaggatctttgttcccacatttatttgtactgagccgattttattgagagataatccggaaacaagcctataatgaatttgggacatttctgttccttttgtaaaaacttaaacaggttctaactgcatggtatagatgttccagatctcttgtagttagaaccacctttttagcattatctttttctattagattcaatcccgatagttatccagaatacctctagctgcagcaatcacacgctcacgaatatccttgggctctaaaactgttgctgtgtctttaaagctcaatacccaggatataagctcttttctgctgcgtactgtcatcgtcagcacgaaatccccattttcaagatattcaacggactgcttattactccaggttcttgaggttacatagcctgcgacttcttttttaaacaggatttttgcttcaaatacatcaccggaatgaaaccaaccaaatgcaccttcactctgatctgcaaccagaggagcaagatcggtattcctatgagttatttctgcctgcttaaatcgatatagcaggaacgtattattatgatcgttgactggttcagcaacaccatcctctgtaaccaggcgacctactacataaagattgtcatggaaagcggtaattctgtgtggagccaggaaatacaccttatccacattatctgctgttggtgaataggtgattctgcaaaccttgtgcttacgtattgattcaataatggtatcgagaattggctgataaggagtgtggtcaacactgcccttggtataaacatcaccaacagacaggaagtcctctgtaataggatcatcagacaggtaggcagaggtttcctgaatgaccgcatcaatgttgagcttcatcttgtggggtagcatttttaccaggaaattcttgcataaggctagctgatacaatccttcagaattaacgctgatcttaggtagatttcgtggctttgaaaggatataaaccgtctcacgtcctttcttctgtctagtgatgttgccataaccggatgactcaattctttcgataagtcttaatacggactgttttgatcactgcagctgctctgatatgtaggtaaggcttaatgggtatctggcaaagagaagaagggaatataaagcaattaacttttcagaaggggatgctaagctctgtttgacgtttgctgccatgattttaatcctaaaaagagaaattccggaatagtctttctgattttaggactgatacctggaaacgtaatatacaggcatctcgttttaggcataaatcacacgttttttgagtaatggtgtcaaaattcggaataacaaccatcagtatttagtttttaaattctgcaaggtatcatttctttctcttatttcaatcgttatattaagattgatttccgttggttccttatatctagaatagtctatggagctggtgtcatttatttctgctatatccaatcccatataaaggacaaaaatccagaaaagaatgtctaggacaataataatcatatcctcattccatagatagataattgaatagcagaataagaaaatccataagattgacaagagagttgcaatagggtgttttctgaaaggctctgaagcttctttaagatcttttagtgcctttcttaactcttcttcttgctttttctttttttcttcttttatctggttctggttaagggaaaaaagatttgagttttgagccttgttcggtgtcttatccatatcctcttcctcctgtattcatttagcattttattaagtataggttcgaatttgctatttaaactgctaggaataacttttgaaaaacatactttccccctatctgataaactgttgagcggttttatcctcatcaagaggaattacgtccgcaattaggaatacatttatttctgtcattgtcttatgtagatatgttgcatcccttccataaagagtctcacaatagccgatccccataaacaggaccatcagccagaaaccagcaacaaaggcaataataatccattcttcctgccagacactggaaacagcataaatgaaaacgcacagccataatatccccatggttgttgcaatcggatgcttacggaaaggctcagttgcttcttttaagtcttgcatcgccttttgtcttttttcttcagcaataagacgatttctctgtttgaacagtccgaagatgaaaactaaatctttttccttattcatacctaattctccttatatggtatttatttgattgcattaaattttgggctttaacaaagctatttaattccaggaaacgagtcaacaaaacgtattttatatcgccaaaaacattaacgaactgcaccttgaaatcagggaacgcatcgacaaactgccatttaccgcagctatcagcaaaggcatctacagtttgtacatcgagatcggagaatgcattaacaacctctactttaatatcagcaaatgcatcaaccactttttccttgccgtacagaggaatacccttaaaggaacaggtatcgagcttgcccgccaatgaagtgctagaaagagctaataatgtaatcagagcaatctttaataacttcatagttacacctctttttgcatctaaagagcagatcataatgagtgttatttactgtctgcttttgtcttaaatataaataatcatcattccggattctgatatgtgatttgattttgtttaacgatccgctttaaattacgctggagcagactacaattaagataccgtaacaaatggcttatatatgaggtatgcgcatgtctaaaagcaagaaatacagtagaatcgaagtgatgctgatcatcatgattactctgcaagtcattttaattctagatagagcgtttgagctaattcataggttttatcagggataaaatcttagatgaggggacaaagaaatgaacagcaatatagatgtactcttatggattgtacctcgctttggtttatgggggctcttaagcgcaattcccatgaatatggttatcaatcttgatagcgaggatgactataaaaacagaggaaagattgcgatgctgttatttctaatattctttgtcatcgcccctttctgtttttggatttaagaataagaacctgtaactttcgattggtatagctgcagtgcattactctgctatatgaggtttccttgagatttttttatggatcaaatagtcgtattttcagactgggagcttttccaatgtcttcatcatttaggtaaacttcaaattgttgaagagttgccttacaggtgtgttttattaaaagacatgtttctggaagatactccatattcaaaacagtctcagctagaagaagaaatcaaagctttatctaatgtaagcattgatatacccaaaaatcgttatagtaacgatatatatgatccagattgtgaaattaagctgattgatcagtatgctcttattttaggccttgaatataaaaatgataatccatcaaatgatattatcatctgttcttcttatgatgctttatccaatgaatacattgaattacacgatttaaaaggagttttttctcaaaccttgatttttatgcttaagaaaaaatccattttgagccacagagatattcttgatcttattgagttcataaaaaaggaacatttacgttcaaaagatcaagagaagttcttaaatttacttcgaatagaatgatgttagaggctaagaaaatagatacaggaggaaataacttcctctgagcatctagattacgctgattagtcaaatatttttttaaggaatttgacttatttttaagttttatctcaaaaatcaaattaggttaggagaatatgacaggaaagatttgggaaaggaacgctataaattgaaagtccagccacatagggctggactgggttcggtaattctttcgaaaaaccttattgtagcaacgaatctgatttccctacagtgctactacagttctaatgttaattaaaaacgtacagatatgcaactgtagtcaattaaatttgcgagtttaaactataaaataatcaaataggcatgggattaaattaaaggattgaattatggcaacaattctaggattagatattggtgtaggctctgttggttggggcttaattgaagatggaaaaagaattattgatttaggagtcagaactttttccaaagcagaaactgccaaagaaggaaaatcactaaatctcatcagaagggaaagccgtctatcaagaagacgcatctatcgtagagcagagcgtcttaataaacttctaaattttttgatccaagaatgcttgatttcaaaaaaggaggaaatccttttaaatccaaaagctgaaaacccatggatattacgctctatagcggtaaataatcctatttcaaaagagcaacttgcaagaatcatatatcacatctgtaaacatcgtggcttctattggtcaagcagcgcggagctcaatatagatgacaacggaaaaatcaaagacgctttatcaacaaatcaggagttaatggcaaagaaaggttatgcaactataggacagatgattgcttgtgagtttcctaactgttgcagaaataaacaaggctcttacaataaagccatttcaagagttgatttagatagagagttaagacttatctttaacaaccaaaaagaaatgggtaatcacttcatcacagaagaactaattaatgggatatgtggcactggagataagaaaacgggctatctatggatgcagaaacctgcactgcagggagagcagttacttgatatggttggacattgccgttttgaaagagaagaaaaaagagcacccgtttcaacctatttagcagaaagacacgtatggctgacaaagttaattaacctaagaattaaagatgataattctcaggtacgaggattagatctgtcagagataaatattctaaaaagtcttccttacgagattttatctggagtcaaatacaagaaaattaaggatgtccttaaaaagaacggtttatggtcagacgaatattcatttataggccttgattatcagtcttcaaagaaaaaagatcctgaggatgctgttttccatgagcttaaaggttggcacaagattgctactgcaattagtaaaggctctgtacaatattgggaaaagctaagtaaagaaacattaaatgggcactctgaagaatatgacttcattgcctcaaccttgactatctacaaagaagatgaggaactcaagaaaaaatttgcagaaaagtctgttcctaacgaggtcgttaatgagcttctaaatgtcagattccagaatttcagttctctctctttaaaagccttatctaaaataattcctttcatggaacagggaatcagatatgatgaagcttgtgataaagccggttataagcactatctgacaagtcaggaactaatcaataaaactaaatatttaccacctcttttctctggtagagataagaatggaactcttatcttcaatgaagaattgggcgatattccaagaaatcctgtggtattaagggcaatcaatcaaacaagaaaagttgttaatgctgttatcaagaaatatggcagtccatcttccatccatattgaactggcaagagatctcgcaaaatcttttgatgagagaaagaagatagaaggtgcgcagaaggaaaatcgcgataacagagaaaaaacagcaaaagagttcataaaaatctttggtgaaatagcctgtaacggtagaaaccttgaaaaattcagactctacaaagagcaggactgtaagagtttttactcagggaaaaaaattgatattcaaagacttctagagcctggttatgttgaggtagaccatgccttaccttattcaagaagttttgatgactctcagaccaacaaagtcctagttctttcaaaagaaaatcagaataagggtaatagaactccttttgaatattttgaaagatttaatcttgactgggatgaattcttcgccagagtaaaaaatagcaaaacaatctcttttagaaagaaagataaggtcttaatgaagaccttcgataagaatgaagataagttcagggataggaatcttaatgatacacgctatatcaccaagtttattaagaactatattgataattgtcttctgttaaatgatgaaagcactgattcaaagtgcgtagttgttgcagggcagttaaccgatctcttaagaaagagatggggacttataaaaaatcgtgctgataacgacagacatcatgccctagatgccgttgttgttgcctgctgcaccagatcaattgttcagttggtcggtacgtattacagacagcatgaaatcagatatacactagataataaatcagatcttgaatcagacttggatttcaatccggaccagttagatttccctgttccatggaaatttttcagagatgagctggttgccagattaacaattgactcaaaagacgagttgatttcaacaataaagcagcttttcccaaatcgtcaggaaatagagttatcttctgtaagaccattatttgtatccagaatgtgtgagaagaagggcaaaggtgcacttcataaagatacagtaagaagacaaacagataaacttcgagagcagtctttagctgtttctaaactccatctcatagatataaaacttgaggatattacgccagataatcttgttgattatgaaagaaacaggaatctctatgaagcaatcaagagaagaatcttaaagttttacgatagtgaaagctctaaaacaacggaggcaataaagaaactaatcaagaaagattttacggaaaatccgttccacatgcctaacagaaggggagaggaacaatccgataatcctatagtttattcaatacgaaaaatcgagaaattatctggagttcctgttagaaacggtgtggctggaaatggttctatgccaagaatagatgtttttaggaaacaaagtaaatattttgttgtccctgtatattctcattgtaaaaaacttccaaccaagtatgctcaacaaaagaatatgaacgattggaattctattgatgattcttttgaatggtgtttttccgtatataaaaatgacttgataaaaattaagacaaataaggaaacattttttggttactacaaatgctttgatatagattcctgcagaatatcattggttacacacgacaattcagaagaaaaaagagtttcatatacaaaagcaatgttatttgagaaatattatgttgatgttctaggaaatgtatatctgtcaccaaaggaactaagagttgagttggcgtaatattctgatcagcaatcctgcgaaattaagatgtgaaaataactccctaataattgaacaggattgcaaatatcatgttccgcttgaggatatttcctcaatagtaatagattgccctcaagttaatctgacgcaaccggtattatcattctgtgcagatagaggaatcgcaatctacactactgattcaaaacatattccaaatggagtatttctttctttttcgtcccattctaaggcaacaaaacttctcaaattacagttatctatttcaaagcctttgcaaaagagactctggtcaaaacttataaacagaaagattcttaatcaggctatttgcttagaattaagtggtcttcaggaagagtccgattacatgaaaagacttgctgaaaaaatacgttctggcgatcctgacaatacagagtctagagctgctgcctattattttaaaaatctgtttaatgagagtttttcaagaaacgatgatgagaatatgataaatggctgtttaaactatgggtattcaattattaggggagaaattgcaagaagactagttgctcacggattagatactcatataggtttattccacaataattttggaaattccttcaagttagcagatgatcttattgaaccatatagagcaattgtagatctgtttacaaaacagtatatagaatcttcttatgatgaaagacttcccaaaactcagttaattgaattactttataatgaggtttctacccctagaggcaatatgtctgtctctcagtcaatcgaaatacttgtagaaagctatattcgtattttagaaggtaaactagatcagctggaacttcctgttttaaaagctctatcaaaacatttatatgaggataacttacttccttgattaacaactcaattgatattatgcgaatgattgtattttttgatcttccaactattacggttaagaacaaaagggattacgtcaggtttagaaaattcttaataaaagatggctttgatatgatccaatggtctgtatattgtcgaatcatagcaggaaaggattcagaagaatcgcattttaaaagaataaaagacaatcttcctcctgaaggatcagttcgttgcttaactgttacagaaaaacagtatgcttcaattgaaattcttgtaggaaaaccaaaacgacaagagattaaagtcgggggaactcagttattacttttttaaaaaagctatttttcgaatcataattaaaagataaaaattacttttgataaaaatcataacgcctaatcccttaataaataaaggattgggcgttattgtaattgtagcactgtagggaaatcagaggaagctacaacatagaaaacaatctttaaaattgttagaagaaattgtagcactgtagggaaatcagaggaagctacaactgtctcggaatcgccttgaatattagggaaaattgtagcactgtagggaaatcagaggaagctacaacaacctgttctatgatcgtgtattgattgcaaattgtagcactgtagggaaatcagaggaagctacaactttaatatcaaaacctaaagctgttgcaataattgtagcactgtagggaaatcagaggaagctacaactatcattgtttgcctgctcaactgctgacaaattgtagcactgtagggaaatcagaggaagctacaactaagaaaatacctttaattaaattaaaaaaaattgtagcactgtagggaaatcagaggaagctacaacttcacaaataaaaaaacaatatggcaatataattgtagcactgtagggaaatcagaggaagctacaacggtttattcttatgaaaaaaattgatgtttaattgtagcactgtagggaaatcagaggaagctacaacgaatcctttaattttataaaatcctcatggaattgtagcactgtagggaaatcagaggaagctacaacacaggatctacagaccacaattcacactaaaattgtagcactgtagggaaatcagaggaagctacaactcctttgtctgagttacttcctaagctcggaattgtagcactgtagggaaatcagaggaagctacaaccgtactattgtttttaatgcacattttgctaattgtagcactgtagggaaatcagaggaagctacaactaaatacgattccggcataatcaggctgagaattgtagcactgtagggaaatcagaggaagctacaacgatagagtgcgttggacttctaatcgtggtaattgtagcactgtagggaaatcagaggaagctacaacacaaggtgagatatatggaaccttctttcgaattgtagcactgtagggaaatcagaggaagctacaactttctacaaactgccagaatgcatcacatgaattgtagcactgtagggaaatcagaggaagctacaacttcagcattcgttcaccaatgggaactggaaattgtagcactgtagggaaatcagaggaagctacaacaatcagctaggtattgcaaccgttgatcttaattttagcactgtagggaaatcagaggaagctacaacaatgaccaacaaaaaacagaatcaactggtaattgtagcactgaagggaaatcagaggaagctacaacctgttcaattctctctatgccttaatagctaattgtagcactgtatggaaatcataggaagctagaacatattcagagggcatagacaatcgccacacaattgtagcactgtaaagaaacgtaagaaaatatacgcctagatgaaaacggaatttaaaaagttaatataggagccctataacagtttcactaaaaattttttcttaagacaagatccttctgctagagtattcttatcaacagccataggcgaagtaatcattcttatccattcagttaataatatggctgttgagcctacgaaactactcgtcatatttgatagttaacgccttatctaaaacagatttatccgcctttaccacaacgttttccgcatcgtgatctacggctttcttctctatattgcgtggagtaccataatcccaagcatccagatagtaatcaagataatcaatgaggttaaagccaagatcaaggtaatcatatgtgatagaaggattattgactttaatctgagctttcttctgctgataatccatggattcatcaatatcaacaatataaatcccatcaaagcctcggaacacacctgcagatagattattaagttttggacagtagaaaatcagataagttaataccgcctcatttggtcgtctgatatgaaaagagtttacatagatttttctgttcttaagatcaaacatctccatatgattatttctcatgaattcttttacagtagagtagtcgcttatttcttttttcagaagataatcaaacaggataggatcttcaataaagtaagaagtagagaagtgtcctaactcaagagtaaaagcggtctggcggtaaatctgagcaatatcctgattaaatgcagctgagaaaaatttggatgaatcctctctagctatatcaagcagctctttaactactgtagttgctgtttccttcataaattcagaggtggaaacatcaattccttcttctactgctacaagtttatgagctcggtataattttttttcttcttcaaaaggtaaaggatatctttttgacatgatgactactcttgattggattgatttgctgtctttaatcttaacattagatggttatgcctaccgttagaatcttcataaaattgttctgaaaagaaaactaattgttttatattttacttgttaatttgtatctgacaaacaaagaactataggtaattccacaatgtggaaaggtgagaggattccatgcacttcgctaattgggggagcctctttcatgtatgcataataaaagaaaagattgtgaagattatggtttgcaggcagttaagactcgatcttttcgaatataaaaaacaatggaacaagcagaagtgcaattcattcttttccaaacttcataagaatgaatcggaataaagtcttcttgtttttttagaaattagttgtagaacgttagttgaattaaaaatgtaaagccctgcagttacgcaaggctttaacttaaattatgtctttatcagtccgtctaattgacgaacatgacttttaccagcggttatactttgaactcattaaacctgcagatttctcattctctgcaatctgattctgtatgatttcgattcgctgtttctcttcttgggatgccatgaaattaagggttttcagggctgcatttaaggactgattctcagcttttctgcatagttcaacaagatgatttagaggagactttacaagatcatttgcgtttgcagataaacgttcaatctctttctttgaatagatagcgatatcgttttctagaactgtcatagttatctccataaaaagatttacaaaaaaaactgtaaaatatgatttacatcaaattatatgcttatctcatttggaaaaaagaaatcgcttaaaatacccatttatggtgcaactatgttcaataacagtgcaaaatattacctgtgcaaatatacgttttttacgttgatttttaatgtcttttacagtaataaataataaaaaagcatatgtgacttcgtgggctaagttcacatctgcctgttgtttaaagattttttctatttttgagcaatcatagccaaatacacatcaaaggcctgtttggtttcttttacatcatgaactcttacaattgccgcgcctctttcaatacttaaaagagctcctgcaacagagcctataattctccgtgccggatcctttattccacaggcatttccgatcatggtttttcgagaaagcgctgataaaacagggtagcctaaatccacaaaatcctgcatatgctttagaagagtaaaattgtgttcagcggtttttccaaagccaaagcccagatcaaagatgattttctttctgtctatgccgtgagatatagccatttgtgctctgtctaaaaggaatcttttaacctgttctacaacattactgtagttaggatcattctgcatattctgaggcgttccctgcatatgcatcagaataactggaatatccagttcttttgctgtttccattgcattctctctgctaagagctctgatgtcattccagatatgtgctcctgctctgcaggcctccttcataactacaggggatgaggtgtcaacagagataattgcgtctgtttcccttgcaattctttctactgcaggaattactcttgataactcctcatcttcgcttacggtaggtgcacccggtcttgtggactctcctccgatatcaattatggcagcaccttcttttagcatggtgacagcgtgttcaagtgccttgtccgcactgttccacaggcctccatcggagaaggaatcaggcgttacatttaaaattcccatgatttttggagatgataaatcaagaactttatctttacatatgatgttcattagaagtccctagtttttaaggatgttgtgttattttccgaacagattctggaaatcagctatagtctgctgctgaagcttttctatttcttcaggtcttacggtatctggttttgtaatctgactttgaggtatatccagtgcattgtgcgattctgtattgaattttacttcagtcctttgctgtctggcctttataagtctctgggcaaacgctctttcccagccaacctgattacgggtttcgtttttattgcaccagtaatgtctgaagccattgagatctgtaagtgtgtaagatgaatcttcaagaccgcagagtatcgctgtcttatgaaaagtaggaccaggttcccattttgtggtcattgcaaatggagctttaggcacttcaagctgttcttttacataaagaggcagttcaaagacacatccctgccagttctgattgatactcagtttccttattagtcctgcattttccagctcatcaagacacattgaagcaatctgataattaggtacagtagggaagtactgactctgtgaatacagatagtttgctatggcagtaagatcaatgatgcactgatcctgagctgcaagatctcttaagtagaaagcatatagagattttgcgatgtggcttagctgtgatgattttagataatttaactctgttgcgttcatggatctatcctttgaggatattttaacaacattcgtgatgttttctaagagccttaatctatcctgctccaaaaaatgacattaatggttttatatttgaatattaatgatgaaaatttagtgttaattatttgataaataatactaattaaaataacaaaaaattttttctaatgattttcctggttcatgatatgatttatcagaatgattttttttatgggaaataaaatgtcagagcagcataaatcagattttctttcattaggacagacctgtactgtgctggatatttccctgtccactctgaaaaactggcttaaaacaggcaaaattaaagatgattctgctgatggctcactgaagtttacaaaacagcagattgattcaattatcagtagcagaaattccttaaagagaagacgtgctgttgcaaattcaaggcagtcggtcagagctcaggagctgtacgtaaactatatttccaaaaactcaccaaaccatattgccttatccattctggttgaagatttttcaagcaccctaacatatatcagagcgcttttgtgtgaagcttttcttcagctgttaattgaagcaaagaagcttgagacctatgttagttcccattatttcaaagcctaccttgaagatagactggatataggcagatatgactggctgataaaggaacttatagacaagacaccaaagaattcactgttaaaatcctgcagaaatcttcctgaatttgaactgcattatgtcccatatgaggatacacttgggctgatatatctttctctgatggagctttcagcccgccgtcagcagggcagatactacactccgcaggaacttactgatacagccttagagactatttccataaggtcaggccgtgtatttttagatccttgctgtggttcgggtaacttccttttaagacttttaaaaagaggtgccaacgttaatgatctgtacggctgtgatcttgattctctgtctgtttctcttgcaaggatcaactttgctctggctgaggataatctgagtgaagagtttttatgcgctcatctgttaaaggctgatactcttacctctaagaacctgcctagatgtgatgttatcgtgggcaatcctccttttggcagctgtgaagatcctgcagctatcagacgttatgccaaatctcttgaagaggcaaaaaagaccagaccttattttgcagatctctttgttgaaagatcgcttaatctcctggatgagggcggtattgttcagtttgttctgccagaggcgatactgaatgttgcctcgcatgatcttattagaacctttatctctatgcatgcacgtgttaaatctgtccgttatctggatgaggtttttcatgcggtacagtgtcagagtgttgtcctgacccttgagaagacctcttattccggtgctgtgggagaggttattgtaaataccaatgactcaacctatattgtaagacgtgaccgttctcctcttgattttaatttcagaattaccgatcaggaagcgaaggttctatctaagatggatgattttgaacattgtgtaaaactgcgtggtcacgctcagtttgctctgggaattgtcaccggctctaataatggtatggttcataatacacataatagcggtgatgaacccgtactcagaggcgttgatattgaaccttttaaaatcggtactccaaaaagttttgtaaatgtctcccaaagcacctttcagcagatggctcctatagagtattatcgtaatccgataaaaatcgtctatcgcttcattgctaaatatccgattgtggcgttagaccggaagggcagacttaccttaaacagctgcaatttcctgatccctcgttttgataatctttctccggtctatttatgcgctgttttgaattcaagcgcagttcgcttttattttgagagaaagtttcacacaattaagattctgcgttctcttttagaggaagttcctattccgcttgctagtcctgatgaacagctgcagattgaatttatggttaacgatctgatggaagcttcggggatcgaagccgagaaaatcaagcaccagatagaccgaaaaattgctgaaatatacgggcttggcaagcgtgctttaaagttgatttcagcttaaattatttgagatggtaaattgcaaatcctttaactttcaattaaaattttctgagttttttttaacggagaataaacaatgtttaacatgggcaatatgatgaagcaggctcagctgatgcaggagcgtcttcagaaggcacaggatgagattgcaagaatggaagtaaccggcgagtcaggtgcaggtatggttaaaatcaccattaccggtaaccacgaagttcgtcgtgttgagattgacgattctattttcggcgatgacaaggagatctgtgaggatttacttgctgctgcttataatgatgctcaccgtcgtattgaagagcagtcaaaagagaagttatctgctgtaactggcggtatgcagttacctccaggcatgaagcttcctttctaatatgtcttcaagttctctgctcgattcaatggttgaggcactacaggtaatgccaggcattggtcctgtcagtgcaacccgtattgcgtactatcttttagatagaaaacgtagtgaaggtcttgccatggccaaggtaatagagcagggattaaacaacatttctatctgccctcactgcagaaactatactgatgagaaggatcaggaatgcgagctgtgttcttctgctaaacgtagaaattccggcagcatctgtatagttgaatctccatcagatgtaatggcaattgaatcaagttcatcctacagcggtaattattttgtactgcatggacatttaagtcctattgacggcataggccctgaagagcttggttttgatgttctaacccgcagacttaaggaagagaatatcactgaggttatccttgccttaggtcagaccgctgagggtgaagtaaccgcctcctacatcgcagccatagccaaaaagcttaatatcagtgtttctaaaatagccacaggtgtacctgtcggaggagaactgacctctgttgacggtaacacgctggctctttcttttaatttcagacgaaaaatttaaaaaattttcttgaaatagtaaaaatcatccccatttgtatttctagatgacagtgttcatacactttaaaaacaaatggagaatttaaaaaaaatgacagctactgttcatggctttcaaacacaggtaaccaaattattagatttacttgctaattcgctatattcaaacaaggaagtttttcttcgtgagttaatttcaaatgcatctgatgctattgataaacttcacttcatgtccttaaccaatcaggatttaatcaaggatgatcctaacttcaagattcagatccgtcctgataaggatgctaagacacttaccattactgataacggtatcggtatgaccttagatgaggcaaacagccacctgggtactatcgctgagtctggtacagaagctttcatgaagaatctgactggtgatgccaagagagattctcagctgatcggtcagtttggtgttggtttctattcttcatttattgttgccaagaaagtaaccgttattacccgttctgttaatgcttcagaggat

SEQ ID NO: 2723 - DNA, 14649 bp, synthetic construct
  source 1..14649: mol_type = other DNA
  misc_feature 1..14649: note = Synthetic
ccctccttgtatctaaatcaacaactactgtggcgtatttatgtccttttcggatagagaattcgtcaattgccagatgggttgcatctcctaaattaaagggtattgttctttggagaaaacgcttatgaatttttttacaggtatcccatttaagagcagtttaagctactgtatctttaattgagccagccctttctaaatcatcaataactgtgttttctaatctcttagtaaccctagcattatcagagataaaagagactttttcggtgccataattatcgcaatacaagcatttagtggttctgtaggtaatgataaggataaatacataaccaaagaatttatcgtcccttacagttctctttctatactcatggacaactactttatggcttttacaatgggggcatactggaggggctgaaggctctaagtaaagagtgatttcattactagaatcatcaatagagaaatcagaaatattaaagtcaggaaatatttttttaaataataaatcagttacaatattcataaggtcgttttttttagattgattttttgtctattacaatcataaaggaaacgaccttttttgtatcctgacttgtataaaattcacaatgaaatttaattagccacagaattacggaagaaccaaagtttacgttatcttcccttgctgtttaaaaacttatgttattcagagtaactgaggtaaccctgaaaagaatctaataatttcagagctttcacagatcttcgaaagaaccaaaaccgaaaaagaaaagacgttattgctaaaattaagtacgatgtagaatgtttaaattaaggaatttggtttttttaaatatatcctataaaaggacaggtgatgtacacagtattattaaagatcattcctttaaagtttggaaagttataaactcagggcactgtagagtcgatttattgaacttgaaaaagtagttacttatataatgaaagaccccacctaagtggggtcgggtacggtaatctttcgaaaaccttattgtaacaacgtctaattcccttacaatgctacaatagtatttattgtagtaaatccattcagctcttacaaccttcttgactcacttattaaaaaaaatgtgaactaaactacaaaaagttagtatcatttttatttacaataaatatatattttatatttttattaagtaaaaggtctagttatggatttaatctttggtcttgatttgggtatcgcatcagttggatggtctgttgttgatgatgagaataaacgtattgtagaccttggcgtaagagcttttaaagctgctgaaacagaagataaaggtaaatctttaaatcttgttagaagaactagtagactttctagacgtcgtatttatagaagagctaatcgattaaattccctgttaaattacttaataaagagtggtttaatctcttcaaaagatgaaatattaaataatgaacatcatgaaaatccgtggaatcttagggttaaaggattagatggagttctttctaataatcaattagcacgaattatttatcatatctgtaaacatagaggtttttactggtcatcatcagctgaagaaacagaagacacagagaaagggaaaataaaaaaatgtcttgctcaaaattctttagctttgactaatgagcatttcagaactataggcgaaactattctaaataaataccctgatgcgcaacgtaataaagcagatgagtatacaaaatctatatctagagttttgcttaatgaagagttaaagcaaattcttacagttcaaaaagaagtttttcataaccctttattaacggatgatttctttaaagctatcttaggaacgggagataaaaagtcgggatttttgtggaaacagaaacctccccttcaaggagaacagttattaaagatggttggtcattgtcgatttgaaaaagacgaacttagatctccaaaagctaattactttgcagaaagacatgtatggctaactaagttactaaacttacgaatatactcagaagattgtgaagatagagctcttacggttgaagaaatttctattgttataaataagatttatgaacaaaagagtgatataaggtatagctctttaacaacagcttttgtaaaatcaggaatttggccaaaaaatcatcaatacaaatataagggtcttaattatgaccagcttacttcatctaaaaagaagaaagtagaagataccgctagtactagtgaagactcaacagatacaaaaaaaactgcaaaaaaaacaaatccagaaagtaaaattttctataagtcttcatgctatcaaaatataaaagatgcttatatgagtaatagccttgagcaagagtggaatattttaagtacacaaattagtcaaggaaattatgataggtataacaggatcgcttacattctttcaatatataaagacgatgaagaagtcaaaaagcatcttttagattgcggagaaaagtctgaagttgctgaggcattgcttaaaatccgatttaatgggtttagtgcattgtcagaaaaggctttaaaaaagattgtgcccattatggagcagggcaaacgttttgatgtagcttgctcagaagctggttatgctcattataagcagagtcaagatagtaaagagaagagaaaatatcttcctccgttattctcaggaagagaaccaaatggaacgctaataataaactctgagcttgatgatttacctcgtaatcctgtagtgatgagagttattaatcagacaagaaaagttgtaaatgcattagtaaagaaatatggatcaccaaagtcggttcatattgaacttgctcgtgatttatctaaaacatttgaagaacgtatagatatacaaaagcgacaggaagaaattaaagaaagacgacaaaaagaacaagaagaatttgatagaatttttggtgttggaatccgttctggtaaaaatcttgagaagtactctttatataaacagcaagattgcaagtcaatatattctggggaaaccatagatttaggaagattatttgaacaaggttatgtggaagtagatcatgttcttccttactctcgttcttttaatgattctcaagataataaggtattagttttaactaaagagaaccaaaataagggaaatatgcttccttatgagtattttatgtcacataatcttgattggaatcaatttgaagcaagagttttatcaaataagaaattaagaaagaacaaacgctgtaatttactgaaaaaatcacttaataggaattcaaagaaagaatttttagatagaaatctaaatgacactcgttatgcatgtcgctttgtaaaaaattttattgataagtatttacgtctttcagataaagctgataagtcaggatgtgtagttgtatcaggtcagcttacagcttatttaagaaaacattggggactcaataaaaacagatctgaaaatgatagacaccatgctgtggatgcaacagttgtggcttgttgctcaaggagaatggttcagttaatagggtattggtcaaagcataaagaacgtcagtacttaaaagattctcaatcagatccagatttagagagtgatgaagaattactattaaagaaatcaattggaagtcagaagttatattttccatatccatgggttaaattcagaaaagagcttaatttaagagttttctcttcagatattgaagagcttaaaaacgagttgtcattgtttgaaagttatacagaagaagacattagtaaggttaaaacattatttgtttctcgtgcaatacaaaaaataggaagaggggctcttcatgctgatactgtaagaagtcagactgaagaaatgaataaagaaaaggttgctgtaagcagagttaagttatcagagctttcatatgacagaatttcaaaaattgtagatagtgatactagaaataagaatttatgtaatgctttaaaacgacgattcgaagcgtattgtaagtctaataacataaatgaaatttcgaaactaaaagcaaaagattcagcaaagatcttcacaacgaataatccaatgcatatgcctaatagtaatggagaagaagatcctcttaatccagttgtacgaactgtaagagttaaagaaacattttcaggtgttcctataagacatggaattgctggcaatggagatatattcagggtagatatattttttaaggaaggtaagtattatttagttcctatatatgctattgctaaagagcttccaaatagagcgtgcgttgcaaaaaaacatgaatcagaatggactgtgatagacgatacataccagtggtgtttttctgttactcaatatgatcttataaaaattgaacttaaaaaagaaacatactttggatattttaatggattcgatagggccacaggtgctgtgaacattattcttcatgatagatctactgaaaaatataaaaaaggactaataagaagtattggtcttaaaacagcaaaatccgttacaaaatatcgtgtggatgttctaggaaattattatctagctggagcagagaagagacttgagttggcgtaatgttattatatcaaatccagcaaaattgtcgtgtaaggatggggctcttatagtcagacaagatgaaaattatagagttcctctagaggatatatcttcagttattatagataatcctcaagttataattacgcagggtgtactgtctaaagctgctgaatatgggattgccatattcagcacagattcatcacatctcccaaatggcatctttctagctttttctcagtatagcaatcctttaaaaattttaaatctgcaacttagttgcccaaaacctgtttcaaaaagattaagagcggcaattatctctgcaaaaattaaaaatcaagcatcgtgtttgaagttaaatgagcttgaaggaccagatacacttattgaattatcaaagaaagttaggtcaggagatcctgacaatatagaggctagggctgctattaaatattttaagtttttgtttggagatgattttgttaggacggaagaatcatctcttataaattcatgtttaaattatggttatgctgttataagaggagaaatagcaagacgtttagttgctcacggtctttatcctgctatcggtatttttcactgtaatcagaaaaatccatttaatcttgctgatgatcttatagaaccgtttagaccattggttgatatctttacatgcagattcttaaaaacacaccatactgatgaaaatattattttaccaaaagctcaattagtatctttacttaattatgaagtttcaatgctagagggcaatatggctgtttctttagcaacagaatatttaattgaaagttatgttagggtgttaagagattcatcttataagatttcagttccagaaataaagatatttgccgttcataattatgataattgctaattgatatgatagtgaagaagaattatatgagaatgattgtattttttgatttaccaaccattactcagcagaataaaagagactatatacattttagaaagtttttgctaaaagatggattcgaaatgattcagttctctgtatatagtcggattgttgtaggtaaagatggtgaagatctacattataaaagaataaaaggtcatctacctccaaaaggctccattcgatgtttgactgtaaccgaaaaacagtatgcatctattcaatttttagtaggaaaaaagactcgacaagaagaaaaagttggaggcgttcagttattacttttttaaaaaaataggtagaaagagaaaaaatagaccataagttggaaatttatgaaaaaataaaacttgctaatctccgatagaatcaaagattagcaagtaatcggattgtagcattgtaagggaattaaaggaagctacaacgaaaacttacaagactctgtgacagttgaggattgtagcattgtaagggaattaaaggaagctacaacagtagtattgatagcacttactgcattattgattgtagcattgtaagggaattaaaggaagctacaacgctattaatagtgctttggagtacatgaatgattgtagcattgtaagggaattaaaggaagctacaacacaaactatacttaataaagaaatatatgcgattgtagcattgtaagggaattaaaggaagctacaaccgccgattacgacataatcaccttccatatgattgtagcattgtaagggaattaaaggaagctacaacgcatgaatggtgcgcaagacaatcccggcggattgtagcattgtaagggaattaaaggaagctacaacggacaaggccggtaagaactacgagtccctgattgtagcattgtaagggaattaaaggaagctacaactgacgaatatcgatctcaagttttatccgtgattgtagcattgtaagggaattaaaggaagctacaacgaacaactgggaacgcatgaacggcgctcagattgtagcattgtaagggaattaaaggaagctacaactgcggaacatttacaacttgcaaatgctacgattgtagcattgtaagggaattaaaggaagctacaactaaagtgtcagctctttcgtgaggctcccagattgtagcattgtaagggaattaaaggaagctacaactatgaattatgatagcgaagctagtttacggattgtagcattgtaagggaattaaaggaagctacaacataaaattgattgcgttctaaaacttgttggattgtagcattgtaagggaattaaaggaagctacaactcaatctgagcttttaattgttaatgtcaacctaaaaaaaaggatgcagtcctgataattcggcctgtgaaggcttctttggaagattaaagaatgagatgttttacaacagaagctggattggtgtcacaatggatgaatttataaatacactagataaatatattcattggtatgcagaaaaaagaagaaaaattacacttggaggattaagtccaattgattacagaaaaaaatattgggatattataaataagtccaactttatgtcctctcccccttttttttaggttgacattaacaactagaatcattaatagagaaatcagaaatattaaagagagtaaatatttttattgctagcttatctttcgtctaaaataaatattgcttacaagtacttttataataattaggtaaattcaaaaatatagttctaaatggagaactctgtgcaaagtaagaaaaaagctctatttgcaacaccattaccggcaatagcagatattgcaaataaaagtatagccgagattgggcttgactgcgaagttgtcagtgatgtttgggaagaaattgaaaaaaaagtaaaagctaatgaatatcttttgattatttctcatggcgattatgcgcataagctcagagctttaacttctattacagtattagaggttcagagcgatattttttctgtactgaatgatatatctattttaaaaaaacaaggtagcaaaaaaatttatgtgatttttgatagtcacggatttaattttgaatttcctaaaatgcttatctcaggagttgagatctatattttaaagagcaattctaaagaagatctggtcatctctgtaggtgaggctatcttagcaggagccgatggtattgtagggccactgccagctttaaattatattacaggtagtaaaatttttaaatgtccattgtcagtatcagagattggactaaaacgaatttttgaagcatctcagcgcattttacatttagaaaagattaagcgtcttcaacttacaagactcgatctgattattaataatatttctgagggtatagttatttttaatctctcaagagaagccgtatttcataatgttcaggcagacaggatcatgcatggcattagctcttctaaatggtatgaaattatggctcctttgtttaagaaaacttcagatgtaaattcagttgtgatcttaaatggtaaacaggtgttgatgcatactcaacattttgtctttcctaatacagacattgataaccatgtggttattttgcatgaaggtcaagaaattgaaaagtcagaacgctctttaagatctcacaatatctccaaaggtttaattgccaaaacaacattttcgtctttgatagcctgcgatccaaatactttagaattggttaaaagagctgaaatctatgcaaaaactgaaagtaatattttaatttgtggcgagacaggtgttggcaaggagatgtttgctcaatctatacataatgcttcagctagaaaagctgaagcatttgtctctgtaaactgcgctgttttaccaccttctttaattgaaagtgagctttttggttatgttgaaggagcttttacaggggcgcggagtaagggcaaaaaaggactttttgaattagctcataagggtacaatttttttagatgaaataggtgagttacccttagatgtacagagtagacttttgcgagtattgcaagagcgcgaggttatgcgtattggagatgatagggtaatacctgtcgatgtgagaattatttgtgcgactaatcgacatttatgggaactgtcctctgaaggtaaatttagattagatctttattatcgcattaatgttttaaggttaagaattcttccgctttctcagcgtaagggagatattattcctttatttgagcgttacttagaaagcttttttggtaatcgtgatttcacaataactaaagaagctcaggaatttattttgtcatggccatggcctggtaatgttagagagttacgtaatgtggcagaggcttccgttctagacggaaatatcataaagcttagtactcttaagaagattatgtggttaggagcggatagtgaacaaaagctttatgaaaatatattgactgaaaatcactctaacttatcaactttatctgagtttaaatcaaatgaagaaggcataatcgttaagcctgaaaacataggttctctaaaagatctggagcgacaatttttagaaaaaatgcttgaatctatgagtcaagatgaagtgtgtcaacggtttaatatttcaagagtaactctttggcgtaaattacgccacaaaatttagccgctcaccttcttagctctgagagctttaatgttagaaaaattgtttcataaaagttaattcttcctgaatatatggagtagactgagcttcacgaatggcatattcaatattagttaatctcttgaatttgttctttaaattatgccaatgaatattgccatggttaagtctgctcataatgcgattacctttttcatcaaaagaaaaatccttaaaatggatcatagcaatatggtcgcagagttcttgattttcaaaccataaatcccaaagtttagcttgagtttcaatttctgtattcaatactaagttagtaggatcaaagataaattttagagtgtttttaggaacgctatgcaagatttcaaggcaaagttcagggcaatgcaggggttgtaatctaaccggctctaggagcaaggttacaccttcctcttgagcaatagcacagattttaggggctatttttaaaagctgcttgcgtcttttagcaatttcttcattggttatggctacaaaagcgctttctgttcctaaataatgtgcgttgattgcacaagctagtttagcgtattttctgtagatattaaggttgtaggattcagcttcaggattggctaaatcttgataacaaccgacagaagcgatctccaagtgacgttcttgacagttttttaaaatagtatcggttatatctttaccgatgcaatcgtcaaaactttcaatacctaagataagtttgtgaaaaactaattgtacgcagtcatagcctaaatctttaaataaagctacatcttcaggtgtacgacgtcctaaatcgtgacctcttaagccatatttcatagtattttgtcctgtttatataaaagcaaagccacctcaaaaaagtggctttagacatcagttgctattttttatttttcattgtcgtgttttaaagtccagcatttatcgtagctataaccggttaagtcttcaactacagcgcgtactttaggatcgacgtcagctttactaccaccatttttaagtcttgaaacctcggtacatactattttgtgggtttccttattgagatttaaacgagtggaggcaaaccaacctatagctaaaaagataattggcattactacagctataagcatgataccgaattgggtgaattctgattgttcagtagtaccttttacatagccaaaggctgctaaacctacaccaattgctaatgattcaataccagttgctgcacgagagaagagggtgttaactccggtgaagataccttcacggcgttcgccatggataatctcatcaatatcagccataaatggtaattggaagactggaatataatcaataccagcacgacctgcaaaggagattacagctgcaatacataataatatggttaaataatcactaccaatcattgttgaaagcatgtaaaagccagcacaacctaagactacgacacaggtaaaaattcggaaggttttgggggcaccatagcgtaggcataagaaaatgcataataataaagctgcaaaagaggtcatttgtgtaatacctaaaacccaagcggcttctttttgagatataaagagtacagacactacaaaataagtgaagatacctgtagctaagtttttatagatgcatcccatagctaagatgatgcaatgtaaacgataggccttaagttttaggctttgtttaatattgctaaggatagataagaatatctcttttaaagaagaagtatttgcaaatacatgcacttcagaaggatctttttcgaaggtccacatccaaactactatcaaagataaagccatcatgatgccgtaaattacacctgtcataacgaaagctgtagcattttcttgaccatataattggaacatcaatcctgggataaaggcggctactgttgaggaaatcacaccacacatctgtttgccgccagtaagcttagctttatcagtagcattctgtgtcatctctgcaggtaaggagacacaggatacaattaccatagtaaagaccatctcatataaaagatttataaagaaataataggtaagtcccatcccaggaagccacatggctgggaaaaccaccaaaatagaaggtatgcctaagagaataaaaaagcgtcttctaccaaagcgttttccaagacgagttttgtagaaattgtcagtgataaatcccattaccggatttaataaagcatcaaaaatacgggcacaagtaaagatgatggaggcacttacagcagataatccacacatggtggtgtagaagaacatcagccaagcagagattaaagtagtagagccaccacctaagaagtttacgcttgcgtaaccgatgatgtttttaaggccgatctttcttacatttgttggtgcaggatttttaataactgtatcagtcattttgattctccttaagccttgacttcattttcaatgcttgcaaataaaaatggtccaagacctttaggctcattgctgatgattggttctgacatgtaataagcaaaggatccatcacgtctgacttgacctcctaaaccacctacataacaaatcttatttaaatttaagaggtgttcaggagtttcaagtacaaattctgcaattaaaccttgataggcaaatttggcaattttagtaaagctttcatctaaaatatttaatctgatggccttaaataaagcggcggtaatcatgcaagaggctgaagcttcaagataattttgtttacgctcagctaagtctaggatctgataccaaactcctgcatttttgtcttgaactttgactaaggaaatcaagcaatctttgagaatagcgcataaagcttggcgatctttatgagttctaggcatcaactcaataacatcagctaaagccattacataccagcccatagcacgagcccagaagtgaggagatacaccagtattaggatcacaccagtacatagatttagactcatcataggcatgatagagtaggccggttttttcatcttttaagtgtggatatgattttagaaattgcatagcaatatcatcaaaatcctgttcattgccaaagcgagaggcaaaagctgctaaaaatgccgctcccatgtataagccgtcgcaccaaatttgatgagggtagatagctttatgccaaaatactccttcggaagtacgcggatgagttttgatttgttcgtgtaagttaaaagcagctttcttataacgctcatcagatgtttcatcccagagttttaaaacgatcttaccgttgtttaaatgatcgatattatgctcatcaagacgatagccgttaatgctaccatcagcgtttatgaaggtatccattgttttggtgatgaagtctagatattttttgtcagaagtcttcttatatacatcatagataccttcaagagtgagcccgtattcatatccccaatgatcagtaaggtttattttgtgagctataattgaatcggccatccattgagagtaattcataattttttttcctatgtttttattttttattcaaattgtgtccttggggactatgtctttttactatgcaaaaagcatgccaatattcaaaaaaagcttttttgaaggcggttataaagttttatttaaatcgaagttaagttaaaaaatgcttttgtatttcataaatgaaattcatttataaaataattgttgcaaatatgaaataaaagatagatgcattttgcatgacaaagatttggatggatttttattttaagcttagaaaataatagagataggcaatatatggtagtcttataaatgtatagcattgaaataacaaatacataaaattgttttgaataaaggatcaagtatggatcttaaaaagctctccacaaaaattattgacgataattatcttgtaaaccgtcaagaggcattagagttagctagttgtgatttagatttactaggtaagagtgctaaagatatcactcaggctttttttaataataagattgagttgtgtgctatttctaatggaaagtgtggtcgatgctctgaggattgtaaattctgtgcacaaagccgtcattttaaaacagagattgaacctacacctttaaaggataatgaaaccttatttaaagaagctaagtataacgctgagcgtggagtacatagattttctgttgtgactgccggagccttattatcaaagcgtgagcttgaaaatttagctttaggctatcaagaaatatcctctaaattaaatataaaatgttgcggaagtttaggtcttttaagttatgctgattttttaatgttgaaagaacacggaatgacgcgtgttcataataatatcgaaacttcaagacgctttttcccacaaatatgtacaactcatagttttgaacaaaaaattaagtgtattgaagatgcaaaaaaagccggacttgaggtctgttcaggctgcatcattggaatgggagaaactctagaggatagaatagatattgctttggagttacaaaaacttgatgttgtaagttgtcccattaatatattaaatccaattaaaggaacacctcttgaaaatgctaaacctctgtctttagatgagataaagctgacaatatctttatttagacatattttacctaaagtggtactgcgtcttgcaggaggcagaatcaagattaaggatgatttttcctctctttatgattttggcattaacgccatgatttcaggagatatgctaactacggcaggtctgtcaattgcaagcgatcacagtgcgatcattgcctcacagcatcaagcttctttgattgagtagtaaaatttttatataagaaaaccgttattgtttttatttgatagcggtttttttattttcagagcttccacagatcctcggaagaaccaaattaaaaaggtctgatataaaatatcagacctacatatagttactcattcaaagtatcgcgaatatcgtgaccaaaccattctttggagatacgttcaaattcaccattttcgtcaacaagcttaaggccacgatttacttcatcgagcatgcgcttatcaccctcgcgaacggcgataccatagtattctttatctacatgacgaccaatatgaattgactcatagcgatcagtattttctttagctaagaagaaatcattaactggcatatcatgaattactgcacgacaaccaccgttacctaattcgatataagcttcaggaggggaattaaaaatctttctttgagatttaggtaggaatttttcggtaaagaaagcgccagtagttccaatttgcagacaaatgggctctccttc

SEQ ID NO: 2724 - DNA, 12059 bp, synthetic construct
  misc_feature 1..12059: note = Synthetic
  source 1..12059: mol_type = other DNA
ccgcgtcgatggtagtgcaacgtacgtttgtgcgagagtagatcactgccgggctccccttccttaagaccgcctgtttttaactcgcggtttttttatttctgcaatatcattatctttgcctgtcccatctttttagaaaaatggcgtgtgttccgttcaatcaggacgaagaactactttactctaagcaggcggttaattgtgtaaacgaggtcaccatggataaacatgatcgttcgcatttggatgccttggatcttaaagatccgtggcaatttttagccgtaggattcggatccggccttttgcccaaggctcccgggacctttggatccttggctgcgcttcctttttgcgcagctcttctattttgtccgtggtggttttgcattgcttttattgttgtattttctttttttgggatcatagcctcctcaaggacggaaaaggtattgggaatgcatgacaattctgccatcgtcgtcgatgagttcgcaggtatgttcgttacggttttattttacccaagcgatctttattggcttttattagcatttgttctgttcagactcttcgatattttaaagcctttcccaatttcctatttggataagcatgtgggcgggggacttggtgttatgatcgacgatttgttggcaggagctatggcctgcgtttgctcacacttcgtcttctggtgcgtatactaaagtcgttttatcagtagcaacatttgagagcaaaagagaagttttttatttttcagagacaccacgtcttatcggctgacattcgagccaataaaagctaaaataatgggttaaggctttttaaggccttttttattatttttaagacgcggagaactacaacaacatgtcgtcagcatctaatgcgaaagctccagggcttttaaatcgctttttggatgtgatcgagcgcttgggtaacaagctgccgcatataaccatgcttttcatctatgcattgataatcgctttattcttatcattgtttctttccttctttaaccttgattatataaatcccaataccaaggagcagatcaagatcgtaaacatgctctctgctgagaatttgttaacgctcgttgttaattcggtaaagaacttcatgggcttccctccattgggaattaccatcgtagctaccttgggcataggtattgcggagggatcgggctttatcaatgtacttatcagaaagtttttgtcggtcactccgcgtaagcttttaactccgacagtgatctttgtatccattgtctgtcatttggcatctgattctgcatatacgattttgatgccagtctcggcccttatattttatgtctgcggtcgtcatcctatggcaggtgttgcctgctcctttgcaggtcttgccggcggctttacggcctcctttactccgtcgatgatcgatcccgtgatgcagtcctttactgagagcgcctcgcatttaatcgatcccaactacagtgtaaacgtgctttgtaactacttttacgctttaggcggtactatttttgtcattttggcggtatggtatgttacggataaaatcatcgagcccagattatgggcaaccatgcctattgatcaaaagatcaataagaatgatagggaatttgatttgaccaagaccacgtctcgtgaaaacaaggccttttattttaccgtggccgtacttgccgttatgggcattattctggcagccttgtgctatcccgataattccatgctgagagctccggacggttcgcttacctcgcctaaagctccggttatgcaggccatcgttccgctgatctttatatatttctcggctccggggcttatcttcggtttcctgtccggctccttcaagagctcacgtgatgtgatcgcctccatggaagggatcatgaagatgctgatctcctttgtggtcttctgcttctttgccggccagttcctctatgtattcggtcattcggggatcggcaccttgcttgcagtgtcgggagctgaatttttaaagagcctgggaatgccttccggggtcacgctctttggcatcattgtgcttactgctttcttgaacttgcttattacctcggcgacctccaagtgggcaattttatctacggtctttgtgcccatgctcatgatgctggggatctcccctgagcttactcaggcagctttccgcgtatcggattctgcggtgaatgtgtgcactccattgttcccgttctatcctttgcttatttcttattgccagcgctattgcagtaaggccggtatcggaaccttgtcgtccatgatgttgccttatacctttgcgttgctcatagttttgaccatagtactttacacatactggttcttggggatccccttgggattccattccggattcgactatccgtcgaccatgttcccccagtaaaggctagggatcaattgcattattttgaggccgctctcgcggcctttctttaaacataaaacaactctttgattaaggcggagaattttatggatcatcgtaaggaattaaccgaacgttttatacgctatgtcggtatatcctctcagtccgatgcaagtgcaggggttgtcccttcaaccgaggggcaacgtcgttatgccatgctgcttgcacaggagctcaaagatctgggcctgtgcgacgtgagcgttgatgagcatgcggcagtttatgccactttaaaggccaatgtagacggagtaccgtgcataggattttgctcgcacctggatacggtcgatgtttcgctttcgcccgacgtacatccgcagatcatctcgtatcagggcggtgacgttgtgcttaataaggagcttggtattgtccttaaagcttcagagcatcccgaacttgctgaatatgtaggtgaggacattatttttacggacgggacctcagttctgggggccgataacaaagcagcggctgccaacatcatgaccatgcttgcgatcctaaagaaggatccttcgatcccgcacggggagatcaagatctcctttgtcgcagatgaggagataggtctttgcggatccaagcttttggatctcagtaagtttgatcctgattttgcatataccattgattgctgccatgagggcgatgtggtgtatgaaacctttaatgcaggctcagccgtggtcaagatcaggggggtcagcgctcaccctatgtctgcaaagggcgttctgattaatcccttgctagtggcatacgatctgatcagtatgttcgatcgcaatcaaactcccgaatgtaccgagggtaaagagggctattggtggttcaacggtatttccgccgatgccaccttctgtaccttaaacgtaaatatccgtgatcatgacaaatcctcatatgaaatgagaaaacgcgtgttgagagagaatgtagaaaagcttaaaaaggcctaccctcgcgccgatattgagctttccataagcgatacctatgaaaatatttcaaacggcgtaaaggttacggatactcccgtggccttgatatatgaggccttggataagcttgggatcaaggcacatacctatgccatgcgtggaggtacggacggttctgccttgtcgccccgcggtatagtaactcccaattatttcaccggagcattgaatttccattcaaatgctgagtttttacccatatgcgcttttgaaaaatcgctacaggtaacgttaaagctagttgagttggtatcaaaattaactaaatgatatcgctcattaataatgatttgagttcataaatcaattttggagctttcaaaaataataatgggtagatttgcagaaagcatgagttaaatatccagtatttatgcgctttctgctttgttctacttctgctctgaagtggtattgaaactttagagcagcaagtttgcatcataatagaagatgttttggatatagctgaaacctcagtgaataaagattttgatcttttggtgatcgttatccattcacgcgttgcaaatcctcatttatatgaatgaggttaagatacgccttgtgacggttgcggcggatccgtaaaaactctacagtatcagctgactgaaagttgtcggacactggctgatttaatggcggtaaacagttccttccggggtttacgcaaaactgtaagagaacaacttctatcgcatttccgttcaattcttttgcttgtggcttgtgagcagtaaagatcgtctcgtctaatttttaatttgccagctgatttcattcttatgtataagtctccgggcgcattcatatttttgtaattcgagacttgtatagcattgtgacggcttggtatttacatttgtctgtgaatttaactttttccgataacttcaaaagatcattaacgctttatgaaaagctaaaaatagctaagtgtcaaagaaaattcttatttcataaatccaatagaaacatgaactggaggagatgtaaagtgcggaattttggctaaaccagaatttttgatatgaaatatttggctcaaatccccccaccgaagtgggggtaggttcggtaatcttacgaaaaccttattgtaacaacgttaaattcccttacaatgctacaataatgagaattatagcgtcaaatttaacactgtcaattgatttctatattctagaaaaattttttgatcttattaacaaaatttaattttatcgatctaaatcaaattaaaaaatattagtatataaaataaacgatttgagtgagaaaaaattccatggcttatattattggtttagatttaggcattgcttccgttggctggtcggtaattgaccctgacaaacgaattgtagatctcggtgttagagtttttaagaaagcagagaatgaaaaaggcgagtcattgaatgtcataagaagatcaagtcgcctagcacgccgcaggatatacaggaggtcagttcgccttaagaaattattaaattatctcattgactgcggcttaatttcctcgaaggaagatgttttaaaaaatgtaaaccatgaaaaaccatgggagttaagagcaaaagggcttacttctgtattgaccaataagcaacttgcaattgtcatttatcacatatgcaagcatagaggattttattgggtttcatcagcagaaaaacaaacgggagaagggggacttgtaactaacagtttatcttcgaatgataaaattttggcagaaaagggttacaagaccgtggggcaaatgattttctcagaatatcccaattgtcagagaaataagcaaggtgaatacgtaaagtcattaagaagggttgatctgcatagagaactggcagagatctttaaaattcagaaagagcaattctcaagtccgtttattacagaggaattctgcacgaaaatattgggcaatggcgatcacagatcaggttttctgtgggaacagaaaccgccgttgcaaggagatgctcttttagatatggttggtcgttgccgatttgagaaagatgaaaaaagagcaccgcttgctaattattttgtacaacggcatatatggcttacaaaaatattaaacacaagggtgtgcgggagagattgtcaggaaagggcatttaatgacgaagaaaggaatgcaatacaaaaccttccgttggagtcaggcggtgatattaaattttctactttgacaaaaaaattgataaaagcgggattgtgggaaaaagatcaatataaatacaagggactggattatagcttggaagacaaagatcctgaggataaagtcttttgtaaaagttttcctattaacagcattagaaaagtccttaaaggccccggcttaaaacgtgaatgggaaaatattaaaaatgatcttttatccggtcattacgaacgctataaccgtatagcggaggttttaacaatctataaagatgattcttatatatgtgaaagactatcgccctttgaaacaaaagaagtaattaatgctcttttatcagtgcgattcgataaatttagcaacctttcagaaaagtttctaaaaaaaatagttccttatatggagaagggagaaagatatgacgaagcctgtagttcagctgggtacttacattatcaacaatttcagaaaaaatcagagaaatcaaaataccttcctccgctattctctggtcgtgaaaaaaacggaactttaatttttaatgaagaattgggagatataccaaggaatcccgtagtcctaagggtaatcaatcaagcaagaaaagtcttaaatgctttagtaaaaaaatatggctctcctctttctgtgcatatagagctggctcgcgatcttgcaaaatcatgggaagaaagagataagataaacaaaaataacaaaaagaaagaaaaacaaaagacaagcgatctaattgaattcagagaattgctcaataaacattcggtagttttttccgaagatttattggctaaaaatctcgaaaaatacagactatataaagaacaagaatgtaaatcaatatattcaggggaaataatagatatagaaaggatttttgaagaaggctatgtagaaatagatcatattctgccgtattcaaaatcgtttgatgattcaaagtcaaacagggttttggtttttaccaaggaaaatagagaaaagggaaataggatacctttagaatatataacaaacgaagaaaaaagagaaaactttgaagcatttgtaaaaagctctcgactgttgtctcaaaaaaagaagaccaatctattaagacgtagtctgacccctgagggatcaaaagattttttgggtagaaatcttaacgatacacgttatgcatgtagattttttaagaattatattgatagatttttaattcttgacccagctgctgatcattcaggatgtgtggtggttgcgggaactatgactgcctatcttagaaagcattgggggttgaggaaatctagagaagataataggcaccatgctatggatgcaatagttatagcgtgttgttcgaggtcgattatacaaaaagttgctgcgtggtcaagaaacagagaggaactttaccagtcaggtgagttcatagattcaaaatatatggtttcaaatgatctcgataaggttaataagactaaattgtcaaatatcgaaactaaatctcataaaaaaatgagatttccttgtccttggcaaaattttagaaatgaggtcatagaacgagtttatcaggatgacctagatactttgaagaacaaattgagtgagattggatatacagacagcgagctagtaaatgtacggacactctttgtttcacatgcatgtagaagtcagcgaataggagagggggctctacatgacgaaactttgatgcgtcaaactccagaaatgagagaaaaaggggtgatggtaaaaaaagtaaaattacaggacctcaaagaggaatatattttaaacattgtggatgcagatacgcgtaacaaaaatttgtgtaatgctttaaaaagaagatttaaaaaatataaagaagaaaatgggattcaagaagaagttaaattagacgaaagtgatataaaaaaaattttttcaaacgataatccaatgcacatgccgaatcatgaaggatacgaagatctcaataatcccataattaggtcggtaagaatcctttgtaaaggagctggttttcctgtgagaaatggcgtagcgaaaaatggtagtattgttcggctggatatctttaaaaagaataataaattctattgtgttccagtttattcatattgcaagcatttacctaaccgagcgtgtacacaaaataaacaggaggcagaatgggatctcgtagatgattcgtttgaatggtgtttctctttgaggcaaaatgatttaataaaagttgtttttaaggataaaattttttttggctactacattggttttgatcgagcactggcaagattttgttgtgttttgcatgatcagcaggtatcgaaaaaaaatccagttatacgtttttgcatcaaaacagcattaagtgtaaccaaataccacgttgacgtactcggtaattactatattgcgcaagcggagcctcgctttgagttggcgtgtcattttaattagtaatccggctaagctctgttatcaaaacggagctttagtagtgcaacaggatcataattacagagtgcctgttgaagatatatcatcaatcatagttgataatccacaagtaataattacgcaaccgttactatctaaggcagcggagtatggaattgcaatttttagtacagataactcgcatctccctaatggtatttttttaccttttgcacaacaccataactcgcttaacttagtaaatttgcagattaattgcaaaaaacctgtattaaagagattaagaacatctattattgtggcaaaaattcaaaatcaggctcagttgtcaaagctctgtgaatctgtcctaaatatgctcatctagtttgtccgaaactataaaaatttgctcttctattttgtccgatttaaaaaaaactaaaggcgatcgggggtagcgatcgccttcggatggacggcacgggatctgctagcgattgagtaccgccttgggcagctccgtagtgaccgcctgcctgactatctctgcagttatgttctttgtctgattggctaccgcaattagtaatgagtgcatacagatcttgtttatgatcctggcgataccgccggagacggcactgatttcagcgacggcttgggcggaaaacagatcgcacgaggcctcggcataccgcaaatgctgatctatgtagcaggacacatcatgttgatccatgggtggcagtccggcgatcacatctatacgttgggctatggcttctgcgttttcgtggttgagcagttcccacagctcgttttgtccacagagaatgagagagagcggattaccgctgtcgtaatcgcagttgaggaggaaacggatctcctccaacgtctcactacggtgacgaccgctaatgaggtgagcctcatctatgatcatgactattttcttgtgccttacgcgagattcggtcatcagggcctcatgcagttgacgtttgacgtcattggcataatacttgggttcaatacccatctgacgtaacggaacggaatacaaccaccgcggggtcagattggattcacttatatacagacagcggaattgctcggggttgagagacgcagacaggatcctgagggccgtacttttcccacagcctacgggcccggacagcacggcgaattggttgttgttaacgacaaaagacagtcgggccaaaacatcctgtacggcattagacttatacaattgctcggtgggcagtccttgagaaaagggagtgcgtttcattccgaagtagcttaaaaaatcaagtggagacataccgttcattttgcacctgtgtcaagacgactttgtaatttggagaaaggagaggacgagctcgacggcacggcgacagtaccgcatttgggatcattaatgtcgtgtaccgcctccgtcatttccttgtgggtatagaacagcatctccttcacttcttgaaggaatgagctctcatccctgtaggttccttttttcttggcatcctcacgcattaaagacagcaaaagggccggcatctccctgtcggtactatttgcatccggtgtgcatttctcctcgtttttggccgtgtctttaaaatccacatcacctttgcattccaaggggaacagcttgatggtacggccgtcgggtaacagctgttcgacattgccgtcataacctatatacagagaaacccgtctgcgctcatcgacaccgctgacatcggctttatagagaataccgtgtatactgatggtgccgtccttggcgagcttacggctttgagcttgcttgaaggctaagcttatgatctccgcatccaacgtttgtttcgctcgtgacgaattagcaaatactgcgtcgggactcaaattaccaagggcggcactggcggtagtgttgtaacgattgatccacagggccacaatcttctccagggcggagagttttaagtccacacatttttctatctgatgctcaatctcgttcgcagtaaggtatagacgttcaatcattcccttactttccggtgtataaggcttgcagaatttaagcttaattcccgtcacctgacagacatgctcaagctgagcactgcgataaatagaaccgttgtcggtcagaatggaatcaaagcgtccgtagcgctctaaaagcgtacgcagtggatctaatgctatgctcacatcttgggtgtcggaaagcttaaaggccaataccttgcgggagtggttatccatccagatctgcaaataggcattgcatttgatcccttgctcattaacacataccttggggaattctttgacgtcgcattggatctgatccaatatgttttccttacgatatcgaccgtatactgtacgcccgcgacacttctccttatgctctaagtcgcttaaggtcacatgccggttttgcaaatgtcgttgcaaggtagatctacgaaaaatccctttccattcccggtgctcactttcaagtacgacgatgatgttgcggacactgatatgaggatcttgaatgcgcagttgtaccgcccgctccaatgccaaatcaaagtccttgtacagtcttacatgggttccggatcccttgtatttgggaatgagtcctttaatgccgtgactacgatagttgctaaggtaacgctttaaggtcttaacactgatgttgttgtctttagctatctgctttagtaatgtgcgcagctcctcttcctcggcatttaacagcggggcaataagccttagacgctcttcctgatatttaaaaatcttgtcatttttcatgaaaagtcctccctttcagttcacggagcgaattttccgtaaaaaaactggaggcggccagaatgagtatgtggggcgatgatggacaaactcagagagcaacacccgcagcaacgagcatgctcggtggagatgcggggtaagattgcaggagacggtacgtataaaaccgtttatgatcccgctgtgtttggagtagaagtgattgagtacgtaattcctaaaatacatacccgccatgtcacaaagcgttttgaaataggagcagtagaagtggccggcacgggagtttagctctagctttaaatagtcccataagtcaccgcattgacgctttagatctgagagacggacgttgtgctccacaacctccttgaatttcccgctgttaggatgcacatgacaattctcggcatccagttccatttgggctttggccagcaaggtcatgtatttggagttgatgcgcacataggggcacatgaaagacgggaacacgagatgcgtagcacctgacgggatcttacgtctacctcgccgccgttcctttctgactacgttgtcacagtggggacactgctgtgaattacagatgagacgcggcagcttgtaaatcacatcctcatcacgttcgagatcgtgaaaatgccggcgatgatattcatggatcgtgagtttaccgccgcaaaaggggcaacgcagctttgaaatgacaccgggctttaagcgagccctcctaattattttcccgcatgtctcgccttcatcgatgaaatcaaaagaactttgcgctagaatgatcatgcgtgttgaacgcatcgcgatcacttaggccttcgaaactttgggtgatcgcgatctcctctaaaaagaaatcacaaaaaattttccccgcaatcataccccttttaagtacttcgtgcgcacgggctcacactggacgcgttcgcccggcgctgaaggtgtctcgcgccgggttcaagccccgagcgctcgacgcagtgaaattaaggactctaagctttaaaggggttgcctttaggtaatgggtagttgacagttat

SEQ ID NO: 2725 - DNA, 14997 bp, synthetic construct
  misc_feature 1..14997: note = Synthetic
  source 1..14997: mol_type = other DNA
aaatggaacggtttaaaaacattgccggcgccgccgttattacttctggctatggggtggaacgcgaatattgggccgatgcgttttctcttagattagtaaaaaaagccaaattcaatccaaaagcaggcttaaagctatttcaaagattattacaagatagccaaagcatggacgaagcagatggacacccttctttaaaaaacagagccgataagcaagaagaacttctccacctaaagccataatagattgattaagcccgccaaattggcgggcttttccactgttttgaatcaatagaaatttaccgatacaattagcttataaactacaatatgccttttaggcttaaggaggaataatatgatactatttaaggatttaaaagctctgtacagtatcagtgatgctctggccgaccttcaattagaaattgtcggccaaaaaggaacagaggtccgttgtcgctgtgttatgtctgcgcagaatcatcaaaatggcgaccaaaatccttccatgtatattaacttggaaaaaaacttcttcaaatgccactcttgcggggtatgtggggaccaatttcatctactggaatatggattaggtaaaacgagaggcgaagtatggcgatatgtcaatgaacgattgggctataaccagaccaattcatcgcctgcagcaccgcctccggtaccgttagcccctccgcaaaaatggcagcagaaagacgcgttctcggaaatatgtcaggatagcattaacgattgctatgacgtatttgagaaactgggaagcgcctatgacgaaggccatttgaacgtttctccagacgtaatgaacaacatccaaagcgcaatgacccgtcgaacagaccgaatccaatgtttggacatttttgaagatccaaagctcgctgataatgtactccatgagctatgggattttacggaacgtatgaagcgatacctactggagaatatccagaaatagaaaagagcaaggctgccaatgcggcgccttgctcttttctatttggaatttagcaaatctcgaatgtctttaaatacttccccgttggccactccctgggtagccgttatcccgggccgttcaaacacaggcaccggcttaactaatacttccttgcctccgtttttaaacataccataggaaacgtctgattcaatattgctcaaaattcgatacgaatcatcttgcagcattgccacacggacattttttgcaataggcaccatgtcctggggcgctttttgatttcttaaaatggaattcacggcgtcgctcagtttgtctcttcctgtaaatgcttttaattcggctccactttcgctgatgatattaaccgcatttggttgtgcctcttttaaatagttaattactttgtttacggatgcatagtttggaatcttttttgcaattaaatcggcataaatatcactcgcatgatcccaaatagaattatttctaagagccggaatcagattttgaaagttctgcatgaattcactttgcggttttcccgcaaaattggtaaataaatcttttgcaatcgctctagaataggcgatttcccctaattttgcccctaatgcactattacgaataaagctttcaaaaagtccttttgccgccaaccgctgcgaaaagccaagactaatatcagccgtataatttcctattgataacatggcattacggattgccgttggaacaaatgtacctctagccgcttcaacaaggctcatcattttttgagaaattaacggcggaatgaacttgccgaacttttgaagaaccgctgcagttataaccattgtccctgccgtaatggggtcctgttcaaaaaatgcagtcatgttggagatagggtgaagaaggaagtttccaagggactgtaaatcctccgtatttcctgttacaaggccgactaatgcccatgccagggttaaccctcccccaattaaaagggcgcttaaaccggcagccaggcctgcaggagaaaaaattactactgctgctgcccctaagataacccctaagaccataactgcacctcgaactccgctttcagaagcccctgttgcaagataatcatttagattaaagccaaacaagttgcttactttttttgtaatcccatccgtattaccattctttaagtcgttaataacgtcccctaccgattggttagggttattgggatttgctcctggggaacgcacaccgccccctccaccgccgccagacacgccaccaccgcccatcatgggcgccgtaaggcttgcttgtgcattatcttttaattttgcaagtcggtcttgatccgctttcccttggtctaatattccttgaagaaagtccgcattgccctttttaaaatctttttcagagggttttccgtttacccccgtaccagagactgcgcttttgattttttccgcgctaatggagtttgcatcgataaaataactcccatcgggtgccttctcgagtttccccgatataaacaccttatcccctactttaaacatatcaccggttctcttattggtctgaacaaccatttctttaccatcggcatctttcacggtcattttcccatccgaaaccgatgtaacttctacaccatctaagggaacttcataaccaccaaatttggagttgctgtttttcaaataagcgtctgagttagctaacgcagaagaaacggttcccggcttaatctcttgatacgtttctgaattttgcccttcagcattggctccgaaagaagcaaacttgttaactttatagttgataaaaaatgaggctgccccaatcctttgtccggctgaattatatacatcaatcacagcttgattcatggctaaatcttggtagactccgaactttgggttttcatctaatacaaaatattgatttgcttcgacttgctttcccccaacctttataattactcgcgtattagacgcttgtgcaataccaattcttgctcgaattttgtggggctgttctgatgacgattcaatcgggtggggagggtctactgaaagtgaccatctaacataacccttggactgatcccagccgctaggcatatgcatccatacgtcacttgttttatggctatcactatatatggcatttccttcttgttttaatacaacctcttgaccgttagttgctcctgacacagcaacatcaccagttccgtttccagaaggcttaaatatgttctgtaagacctgcgaaaccatggcagctttatatatattagctatttgtcctggattatacggatctagtgaagcgccataccctgtaggtatatttatgtttcctcccgtaaagaaattaggcagagtcaacgtaccattcgtttgctgatagggataaaacgatgctcctgcggtgccactaaatgttagtatagcaaggcttgcaactgccgataaaatctgcttaagtttcatgatttaacctccccatatataggttttcatactaattgtacattgcattttacttaaaacaaaaagagctctcgcatttgcgagaactcttctggtaattattccgtttcaaccgtaaagcctgcaaccgttaaggatgcaactacatcatcaaacggttttgtactccacccttctagataaagaatagcgccctttttatcgtagatagttccatcttttgctaataaaattaaattcttttttactactctagaggctagttccccagccgtagtaaaaccgtcttgtctacgaacaggagttaaaatgggaactttattgattgtaaaagctccggtaagcggctccacaaccacttttccactcgtccattcggcaagtcgattggtttgatttacgattcgctttgcggtttgaggatgtggattgataaattctgcggtggtattaggtgattggtattctggtttatcaacttcatgtaaaaagagagctaaacccattggattgtattcggttcttataagaaggtcaaatccataattatcagcttcccattccttttcgaaaccataccctctgaagaagagtgcttttgttgccgtatcggctaattgcagccctaatccggtaacaccacccttgagggctagtccagctattccaatttgttgaagcataacgcgttcatatgcgttctgccagtgtttcttttcattatgccccaactcatgagccataaccccggcaatacaatcatccggtaaatcagcaataggtgaataaatatatacttgtgcgtcaggcccgcaaaaagcattcattacgttatttttatatacacgaaccatatatgatttggaacgacttgtctccattgcattaagtaattttctaaatatactcgatacgtgtggatcagaatatgttgcgtccttataatttaaataaaaattatctccttcttgaacttcaacagcatcacttgcaaaaatatagcattcgccatgacttgtattgattgataaaactaccaaaaacacaagaatgattgctttttgaagcatgttttactcctccttaaaaaaatatcgctaacgatacttttatttttattatatcatatcgttagcgatattgcacgcattttctttatttttttttagtttttggccacaacaacatttgtggtattggctttgagatttacaaaccgatccaggcggttcatatcccatgcgtcggtcggagaagtgtagggagagtcttcatacaatttagccagatcttgcttactttttatatttatcccttttgtcgcaagcacctttgaagctgtttccagaatactgttcatggacccggtggaaacgctttcttgccgaacctgatccgttgttttatcgctttggagtttgcctccgttttcattttttgcaacctctgcaggatcaataccgcttggcctatctgttttatttccattaactaaggactgaatgccgctggctacagagtataagccattaccgactgattcaaaccctggaatagctaagctaatagaatttgatgttggagactcaacactactagtcatttttccccaaggaactggcatatcgccggttaaaacgctccgaattgcatctgaaatgcctccagcagcattgcttaacccactagctgcagatgacaatcccgtagcagccgatgataaaacaccatcttgcggcaactggtagccgccgctgccgttcatatttgagccagacacgttcaaggaagtccccccgctgcttagcccaccaacaactgttgttcctccaccgctattgatatctccatactgacctcctgagctaccaccgaatgaactaaattcattcacattaaatttaaccgttaccgttacggttccgtgctgcgttggtggacgattgccatgagaatccggcggcgggtagtaatcatagccaaatgagtacgttttactgtatgtgccggctgtgtcgtatgtcagagtttccgtttgagttgtccggtctggaacaaccatggccccgggcggcaaagcaagggtcacaaaactggccgtgatgcttaaaggcttatttttcaaaggattaggagggtccatttctacttttgcggttacatattgaggcccatttactgccactgaatagcctgcattgttgctaatttgattttgcataccgcctactacaccacccaaggaaccacttatagcaccaccattagttaaatcactaatagaaccattgggagaatatgtggaatctgataatggacttgatgatgttccatcattaccatagagatcacctagcccgcttccagaagcacctcccatatttccaccagagaaaataccacttccttctgcgccggttgttcctgtcagatcgcccgtacctgaaccagcaacgcctccaacatcaacggttgaagcgtccaactcaacagaggccgtattaggggaagaacttcctgaactatcaagcaccgttccaaggctattaccagaaaatatagggtcgccagttattgagtctttgggtactatacctgataatactgttgatattattgcatattttgctgcagttgttgcagcctctgcaactttccctgggtctctccctgtcataattgcgccaatcgcttgattcgcaatgttccttattccccctaatgctttttgagcgcccgtcgttttttgagtagtagctatttgtctttgatcaacttggtttgtgttttcacttgcaaacgatggtgtacaatttaaggatacaattagagcacaaagagaaagcgctacattccgtttcattttccttttcataagaacagtttcactcccttcttaatttatactaaatcaaatttaattataagacctatcaaaacattttccaaaagagctgccctttctttttttggtttattccttgttaattaaaccatccaaccccatcactgttcgaatctcttcatcacttacacaacgaagtaatttcagtatagccatattttttataaccgtattcatttttgaataaagcactgggtcctcctgaaacaagctaaaataatcgaaagaggtatcaattaggtcctctattgcttcatctatggtttcaccttcaccataaagctcaatggtctcacaaataaccgtaaatcccccaatttcttcatcccgaataatatgagattgtaattgaagattgtaattgaattccattttcaaaaagataatcaagataagctttattaatatgactgacttccccttgttcggtttctgttattacttctaaaccattcagggccatatgatgaacttgaacatattgtttctttgtatctttaacatttagtgttaacatgagcaaaacctccttatagacaggaataattttttgtttagctagtttaaatcagcaactaaactaggaacgggttctttgtcgagttccttttcatcgggacatataattttatcctcatcttgcataagatcttcttttagagtaactttccatggcttaaataatgttttctccgcagcactcaatttatcgtttaagctatttttcaaatcgaaattagtctgaatttccgtttcaatcgacaatttcttctgcttttcctggttgagtaagtcttccattttttttattcgatcctcttgataagcctttttcttgtgtagtctttcaaggactctatttagtttagattgactttgattggtttcttttgccaatttcttaatatacaaatattgattttgagtaatataggaattgattttggaattgaatccaaaatcatttttatataaggttactaaaacattatctattacaacataatgaatttgttttttggggtcaaaataataatttacattatctttcctgtgcatttttcgcgcatctaaaaatgcttctcgaacctgttcaattacagcattcctagagtccgggttggttcgcagtttttggatctccatttcaatcatgttgcttcgttggcaccaccgttccaaagcatgccaagtaatcactaaattattttttaaaccctcttgaccaccttcgattatcctgctctttattcctaaatgcttttctagaagggtctcactaaatgatacctgttttgcttttatacgagatatttcttccaggtcaaaattattatcatcttgaataattaatgaatattcttctcctgttagttcttcacaaagcttaatatcttttttgatattttcaacgccttttgaagttaatggtttaagtaccatggttttctttccattggcttttattacttgaaatgcaaaccaggaatcatacaaatggacaatgtttagatagtataattctcttcttattgagctcagtacttcttgataatgtcttcccaaaaccaattgttcattaaccattgcttctacttcaggtccttgaaaaccgtatatcgcagcatttctaagagcaattgtatatgctttaacttttatgaagtcttggactgctttcattgctaaatttcgattcacagtactaatatcatgctctcttggctgaatttgatttttcactaaataacacatcctttattccatattaaaaaatcgtcagcaaaacgatctcttatatttaagtatacgtatttagtgtcaattttttttgacgtacgttgcacacgcaaaaagatatgatataataaagatgtcaacgaaaaagcatgtaggagtgtgtacgttcgttatggcaagagcgattccttgataaggaatgcctgcattatgcaggtgtcgtttgaaaacgaccgactcgaaaggtataccccctcttattgattaagagggggttatccttttttaggcatagaatatgttgcacaacaaaaatgctaattgtataattaaattgacaaaagccgccgtcctctgatcaggacgacggtaaccgataggattaggacaggctccaaaggatgaaagccacaagagccaccaccttcagaaccaattcctcgcttaggacgatttggatcttcatggtgtatgtcacctcctatccggagccaaggcactcgcaatgccttggctcctttgtcattttaaagctacttgcgatatactaaagatagaagaaggatagaagaaggataaggaggaatgaaaaatgaatggagctcgtgaaaagccaagcttccataaagaacagatgtatacttcctctgaagccgcgaagcgatttggtacgcttcggaaacaagcaaaagaacggcctcaatatatcacggttaatgggcatattgtcgctgttgttatggattatcagaattatgaagatatgtatatgcgtctgcaagaacttgaagatcaaatcatcgaaaagcgtattgacgatcttgaaaatcatcctgaggccgcggtagcttggagaagtattagaaaataacaaccggctttgtcagttagttttgaagtaattactcattgttaaaaattccttcacatcaaaaaggagtctactttttacaaaaaggcggactcctcttttttgtgtctaaaaacagaaaaagaccggtttataccgatcttttcctgtagttaccactcaggcttaaagctacgcttcgcttcccgcaaagtttcgccgcacaagtaccacaaatacttgtgcttatttcaacaaaagtgttttcaagattactttatttatgcttgcttgcggtttgggaagtttaaacccgaattttttctagcatcaatcctagcttgaatgatagtaaattctgattctagtgcttcatactcaacccgcagcttcgaatcatcgagctgttctttcaaaaaatcattaaatttagtcattggttcattctccttttacccggaaaatcaaagatattattccagattctgaatcataaaatgaacatcctatcataccgcactcttgactcatctttcttatttatattaacaaaagaaaaacctctcgattttcaccgatgaggttcttttttaatcctcatttttacgggcgagggttcccgacttttttagctctctcttatacgggtgagatttcccggcttttttagctctctcttatacgggtgagatttcccggcttttttagctctctcttatacgggtgggatttcccggctttttggctctcttttatacgggtgagatttccctaatcattttagctaaaaataccttgcaatcgtatcttactcctgagtaatattctctgttttacttctccgttactctcggggaagaaacatacaaacgttctttttaaacgtatgtccatggacattttaacttgccattataaacctgtcaagtccttgaaaacacaatagagaataacgttttaagtacaattttagaatgtacatgtacattctaaaacacaaaaaaaatcttgtcaatacaattcccacatccactcaataataccaaacaaccgtatactaaaaataaatgtttatttaagggggcgtcgtttatgaattacacaataggattggatattggggtcgcatcgatcggatgggctgtaattgataatgacaataaaagaattgtcgcattaaatgaaaacctttttgacaaagctgaagattataaggggaaaagtaaagccgaagttagaagagaaaaatcgagcagaagcaagaccgtacgcagaaaagctcatcgtcttattcgagtacgacgtctttttgtaaataccgggcttcttacaaaagatatagtaacgaactttcattttcatccttcccttcttaataaaccaaacgatttaggtaaacgaactagaaagtcaccttatcaacttcgtgccgagggattagatcgttgtctaagtaatattgaatgggctgtcgttctatttcatcttgccaaacaccgtagttttatttctgttgatacaaaagatgaaaatgctcaaaaaatgaaaaaagcaatcaacgaaaatcgttcattgcttactatgtgcgcttaccgaacagtgggtgaaatgtattataaagacgataaattcaaagagaaatgccgaaataagggaggagaatttactgcaactattaacaggcaaatgctattggatgaactaactttattatttgaagctcagcgttcttttggaaatcaatattcatcggttgaatttcaacaaaaatatgtaacaatcttttctagtcaacgccccaccttcacaaattcagcaattgaaaaaatggttggttactgtacgttcgaaccacaccaaaagcgggctccaaaaaattcttatactgtagaacgtttcaatttattgcgggatttaagccagttgaagtatatgattggaatcgaagaatttttcttaaccatggaagaaaaacaagccataattgatttagcctattcaaaggaaaaggtgacctattctaacatccgaactatattaaataaaaagttcaaattcccccctaatgctatttttaaaggtcacccaattgataaagaacaaaaaaacttcacctctctaaaaggatatcacacgctaaaaaaggcactgagtccattaggtgctaatgaatggaatgttttttctcaaaactatcgtctattggatcaaacggtcgaatcaattgctttggggaaaaatgaagcaaatattatcaaacgttttaaaaagattgggctgcccccaaaatatcattctctactttgcaacgtatccttctcaaaattttctcatttatccttcaaggcattaaacaatattcttccgcttatggaatccggcatgacgtatactgctgcttgcgcaaacagtaaatataagggccattatattaaaaatacgcagattcaaaaaacagaccctcttattctgcctctcattcctcaaacactattttcaaatccagttgtatttagagcattatgcaaaactcgccgtattgttcaggcaatcattaaacgctacggcttaccttatgctatacatcttgaaacagctcgtgaactgtctaactctgatgaaaagaaaaaggagatagaagaacaacaaaacaaaaatagaaaggcaacagaaatcctagtcaaggagttaaaggaatttggcataacaacacccaagtattcattaattgaaaaatatcgctattataaagaacaagatggaatatgtccctacagcggtgagccgattaatttggatatgttactgagtgatttatacggaagcatttatgaaattgatcacattattccctacagtctgactcaatgtaatgaacggtcaaataaggtccttgtaaaacaatcggaaaatcaaaataagtctaatcggttacccattgaatatttgggacgagataaagaacgttgggatcgattctgcacctgggtaaaaggctctcgcctttccgtgagaaaaaaacaaactttactccgcgagcctttaaccaaggaagaaagcgaatgttttcgaacaagaaatctcaccgacactcaatatgccgcaaccgcagctgccgagtatttaaaagtgggcgtaacatttagcgataagaacaatcgtaagccgattgttcttattaaaggcgctgtaacaggctttcttcgctacaattggggaataaaaaaagacagggagaagtttttacaacatgctcaagatgctgctgttgtagcagttgccagcgagaagatgctccaacaaatatcagaatactataagctaaaagaaactcaacctcaactgttttataacaaagacaatagaccttcattccctatgccttggccgttttttaataacgaattaaaggctcgtttatcagcaaatcctgtagaaaaaatagctgcctataaaagaatccataagatacctccggtgtattacgacgaagatatttcttgttataaacctctctatccatccattgccgtgcgttataaaattaatggatgtttactcgacgaaacagcgcaaagcgctcttcctaaatacattaaggaaggctacacgattaaaaagattcccttaacggaattagagccaaaacatctcatagaagataaagacggcattattccggtggttggggcagataaagacgttgcctttcgagaagctctgttaaagcggtttactgacatcatatctattgacgaatattataagaaatctcttacagaaataaagaaaatatctaagcaagcctttaccgaaaaattctttaaaccatcaaagcctggtcgtgtgccttctcttgtaaaaagtataaggattattgataaaggtacggccggccatattaagaataacgccctttacaaaaatggaacggatagtctatttaaagtcagcatatttaaaaagaatgaatcctactattttgttcctcattatcggctgccggcactacaaaaaaaggaagttttaaaggctattgttccgaaaaatagtgaagaaaattggattccaatcgacgaaacctttcaccgttgcttttctctctataaaaacaacttagttcgtcttattacggttcgtggtgaagagcatattggatactacaaaggtacgcatagaagaatcaacgccattaatttactttcaaaagagacctcgtttagtatcacagcacctcaaattaagtatattgaacttcttttcgtttcagttcttggcgatattactcgttcaaaaggagacttttcatgagttggagatcaattataattagtaagccttctattttatctgtaaataaaaatcagcttgttgtaaaacagatcgaagaatcgaaaattcctcttgaagatatctcagtaatcattttggatacactacaagtcaatctcacaggatgctttctttcctctgctgcaaaatataatattgctgtactatcctgtgatgaaaagcatatgccctgtgctatttatcaatcctttcatcaacattcacgtcaatcacggatgactcatttgcaaaacagtatgaatctgcccttgaaaaagcagatatggaaattgataattaaacaaaaaataacgaatcagggttctcttttatctctccataactacactgaccatggcttagtttctattgcatcttcagttaaatcaggagataaaacaaatcgagaagcatatgctgctagaatttatttttccatattattttcttccggtgggcgccatggctcaggaagtatttcgttagcacttgattatggatatgctattcttcggtccatcattgctcaacaattagtggcgtatggttttattccctcgctgggggttttccatcataatgagcttaatgcctttaaccttgccgacgatttaattgagccatatcgcccctttgttgaccaatatgtattatcccaaggcacgatatttacagagccactttcaaaggaaaaccgccaaattttagttcaacttattttagaaaatgtaaaaatcaaaaattcttcttattcaatacaaaatgctataagagaaaccgttaaatcattaggtacttgttttattgaaaacgatccttttaaaattactctacccgttttataaatacctaatgatcaaagcgccagtaggaaggtatatgagactgttattgttttttgatttacctacaaagactcctattaacaaataccattaccggcaatttcgtgaatttcttcttagagatggttacgtgatgctgcagttttctgtatatagccgcataattaaaggtgaagaaagtattgataaacatgaaaaacggttgatcgtgtctcttccaccggagggatctattcgattattatcggtaaccgaaagccaatactgtaaaatgaaaattttgcttgggaaaccctcttatcaagaaaatcatgtaaatgcttcacaaattcttcttttttgacgtttttttcataagaaaaaccctagaaacctatatggttcctagggtttttctttcagggaaagagcatgtaggagtgtgtacggaaggtatggccgactcaagtgcggtacaaaatttctcaaggaaagagcatgtaggagtgtgtacggaaggtatggcagtaacactaaggcaagtattgtaaaaatggaaagagcatgtaggagtgtgtacggaaggtatggctccaccccacggcttcggcagctggccaaggaaagagcatgtaggagtgtgtacggaaggtatggcatgtcgtagcccattttgtctgtgacggctgaaagagcatgtaggagtgtgtacggaaggtatggccaatgacgcctgaagcaatgactttagccagaaagagcatgtaggagtgtgtacggaaggtatggcaccccctggttaatggcctgtttgatggctgaaagagcatgtaggagtgtgtacggaag

SEQ ID NO: 2726 - DNA, 23114 bp, synthetic construct
  source 1..23114: mol_type = other DNA
  variation 16547..16555: note = n is a, c, g, or t
  misc_feature 1..23114: note = Synthetic
cttgttttagagttgcaacatttactgatgcaccaacggaagctcccgaagaagatgattggctgccgcttcctgaacctttttgagtggcatttacaccaagaatattaactataatcgtagtattatcaaattttcttggttcttttacatttaattcatgcgaatcttcgtcaaattcaaacggatcatcatcgcctttttgtttcatgacgattgttccttttcctgcattaacattaacactgttcgcattaatatcatcactatttattatataagcagcagttttaccgccaacattttgtacatttacacttccttctataacaaatgtgcttgctttaccgcctgtcacaagagcattaacataagcttcttcctgacctgcgtttacattaatatcgcctgattcaacttttactttagcgttatcaatttttgcagttgcattactttctaaattacttactaaaacagaaccgcccaaaccgaatttggaagcttcatctttatcaggatcgttgccgcctattttttctgaaatcagtttgttaatttcttctatcaagaaatcaactttacctgctgcattatagtttacaatagagtttgcagcattgatattaacattgccttcatcacctgttacattaataactgcaccgttaataacctcagcaactgtgtcatttttaagagtattaactaatatagaacctgctattgctgcagtttcagcagaaccttgagcttttacaaagttattgaataaaccatccatgcttaattcgttattacccgcaaactctcttggttttttaagagcagagcctactgattttaatgtatcaggattcaataactttttaagctctgtatgtaaaaattctgcgtcccaatttgcaacaccatcaccctgatcaaaacctacgcctaagaaaagttccgttttattaccgtcagaacctgcaacctcttgtcctattttaagttcaaaaggattcatcggcatttgtgttgttgcgttaacatttacttcatcttttgcagtaatttttgcgttattggtaatctttgcattacttgtattatgctggtcatcaacaacaaccgctgctcctgctcctattttattattagcgccagcgtttgctattgcttggtttacggttaaatcaacaagattagacgaaacatcaacagtagtcgagttaatcgttgagttatctattgttgcaacagatgtactaatctcatcattccaaattcccgagccggagaattgagtttgtaatttatcagctacattgcttactttatccccaagttttgtaaataatttgtcattcaacaaaccgtacgcttttgaaagaattcctttttcgttatccgtaaaatcagtctttgtctgtgtgttagtttggtcttttgctttaacttcactttctacggaattactaatgttatttatattttgagagacaaatcgtgcgttaccgtatgtagttgttactttcgtttcattgccatcatcatcttttttcgtttctgttacggcatctttttcttttaatgtgattttagaattattttttacatcaatttttgaattggaccttgtgtgattaataagcatagcagcggctataccggtatgttccgagtttttacctacattagaaacatttttgagtgatacatctgtttcattatatccgatagctctgacattcagattagttgtttcaatagtagagttatcaataaccacatttgtatcatctttaacagtgttattcaaaagaacaagattatatgcagatattttgtttttatcttccgaaccgccattatctttgtctttatctttgttaccttcagaacctgtgtcggtcttaccttcagagcctgtatcagtttttccgtctgaaccgccgcctgttttatctttaccagagccggaatctttgcctgaatcatctttattagtatcagatccgctatctgcattgtcttgagcagaagctaaaagttttgtttttcctttatctgcgtctgaattgttatcaggatttttgttatttgaatcggatttatcaccgctatctgcattctggttgttgtctgaaccggaattaggcttttcacctgtaccgccaccttctccgtcagagcctgtattcggtttttcacctgagttaccttctccatctaagcctgagtttggtttttcacctgaatcgtcttgtccttgcggattggaagtatttccgctatcacttttcttctccgtaaataatgacaagaattttgttccgtcatattttagtttttcagtcaagttagatagtgcgttaatattcacttcaccgtcatcggctgaagtcgagattttagaatcttttatgttaacttttgattcagtagatgcacctaaaccatacataaatgcagaacttgaatccatagtggcagtacttatatcaagctttgcttccgcatttgatgttatatcgactgaatcagccgccataatatcggtatttgtaatgtttatgtttgatactgcttttgcaccgtcaaagaaatcataagtatcatcactaaagtagcttttgattgctttccaaacctgccattcataagcaggtgtcccttccggaagctcatcttcattaatcttcatcatgattgccattacgacatctgctccaaacgtaccaatccatttttcataaattgtgtctaatagctgaaggcttgtttctgtagaacttttagcatttgcttcaatagaaattgcatctgcaattaattttgaatttgtaatagttactgttgcttttgcagccggtgcaacatctttgaaactcttatgaattaaattgcttgttgttttatcttgagttgtgtcatcttttttgccgtcattattgttgttttgagctgcttttaatgcatcattgtatgcttttattgtatcatcagatacttctttttcagaagagtcattagcctcaatactaatttctcctgcagccagagtagtgttatctattttcacttcggaagaattttctgaaagcgatgatttttcataggttttatctattgaatatgttgttgtggttttgtccttatctttatcagaagtactattaggattaggtgcttttgttttaactgttttgaggcctgttacagtatttataatggtcgtagttgtagttgtttttgtattttccttgccgttatcagaatttgtagttgtaggattagtattatttccggtattattgtttgattcaattttttctattgccgttgttaaaatttcttcattaactttatttgttacaagagcaattttaccgtcttttaattcgatattatcagcatttgtcgtgtcattagatactaaagaattaaataatgcttctgcagcactatctgcggttatttgcttgtcatacccttgaactcctgcaaaaattgcgggatttgcatttgctgattttgttacatcgtcaggattaacatttgtcaaaattcttctgccataagcatttacatcatcacgcgcaaagactttaccgtttataatgatatcacctgatgagtttgtgataaggctcttatagttatcattttttaaattaaattcaaaatcttttaaattatctccgtatgttttcttgaataaattatacgcattttcagacggcgccattaaagttaatgagccaacattcaaaacacctgatgcaccaataactataccgttaggagaaacaaaaatggcgtgtccgttatagaagttattatccttcatcgtattgataataccgtttataacaacctgattatctacaaggttgacaaagttcttaaaatcagaaccgtttaatttgtatataaggtttgcaatatctccctgtgacaggttaaatttctcatattctctaaaccctgtttcccctgatattttagaagcttcaatattatacactccgttattaccggtaatatttgaaatttccgttgccacaactgatgttggtagtccaaataaaagcatacctgtacaaatcagggttgctgtaagtttttgtaaaaaatttttcgccattcttttattcccaaaatagttgattttcactaaacaatttctcattataattttaacaattaaacgattttctcgtaacatataagagcaaaatatttacaaatttttacatttagtaaaaactctaaaaactacttcctggcagaatttcccccccccactaaaaaaagtaaaattatgactaaaattttgtaaaattttgttgaaaatttttaatttttcatgatattattttcttaaactagaggaaagatgaaaaagagttttatattaatatgtcttgttgcagtccagctatctgtatctgccgccccggagggagctccgattataccgcaggcaggaactgttaatactcaaagcttagaaatgttaagacagcatgagttagaaaggcagattgaacaggattataaaagatttgaagaacgcaaagaatcaggagaagcagaaaaagacgagattgagaaacaaacaaaaggcgaaataataaaagcaaagccggaagaatacgccactaaaggtgtgtatgttgataaatttgaggtatcaccatcctacattatgacagtagaagatgtagaagaaattttaaaagactataaaggcaaaaatttaacttttgagcaattaaaagaggtagtagcaaaatttaatacctggtatgcaaaaaacggctgtgtcacctgcagagcgtttttaccgcctcaaacgctggaaaacggggttgtcaaaataaaacttgttgaaggcagagtaggtgatgtaagtgtttccgaaaacaagtggacaagatcaaaatacatagaagaaagacttgatttaaaaaaaggggatgtttttaatattcaggacttggaacgttcaatggtcttgtttaacaggtataatagcggtgttcaattaacgggttctctgagtgccggacagtctgagatgggaactaccgatgtaaatattaaagctcacgaaaaatttccctttcatataacaggattattggataatgccggaagaaagtctattggcgaagttaggggcggcttaatgctgagagatgacagtttaactaagcatcgtgaccctttgactctgggcttttatgccaataaacacgcaataacaccgtttgctgattataactatcctgttaataaaaaagacggtagattgggattcagcttttcatcttctaactctgaaatcggacacggtgcatacagaatatttaatatcgaaagccgttcgcaaaattactcgttgtattatactcagccaattttcagaaagccatggacagagttaacaagtacaacatctattgcttataaacattccgcaacaagttttgacggaacagatatctttgaggataaagttacaacagctacaacaggtctgacatacagatatgatacaaaaaaagggatttggtacgttaatcaaaatgtcggttattctttcccgatttttgataaaaattcaaattacctgaaattagacggtggggtattaaggctgcacgattttggacatggatttattggaacgataagaggcaattatcagttcattcctaaaaaagatgtcccttatgttgaccaaatgttagccggtggtgcagcaactgtaagaggctattcagaaggtcttttggtagggcgcagcggatatatcttgagcgcagaactaatgttcccgcttggtccaagagtaatttatacaaaaaagcatccaaatactccgactccgtttatcggcagctatgttaaaggttttgtatttgctgatcacgcaggaatattcccatacaaaggaagtggtgaaggtcgtcaaagctatgacggaagcgactttcttgccagcatcggtcttggtacaaaaatcaacttgcctggggaaattaatcttagaatggcgtggggattcccgctaatgagtaaccgatacgagacaagcagctggggaagatttcatatcgacttaagtgtatctcctgattttgatactcttattgcattaagacaaccaaaaggggtaaatgcagaggcaattgaaagcacagacaatgagcctgctacaaaaacagaagtaagtcacggacaaaaatttgtaagagctgaaattgatacaacaaaatctaaaaaagaaataagagaagaaaagaagcttcaaaaacaaaaaacaaaagaggctaaggaaaaagctaaaattgagcaagaaaaaattaaacaagacttaaaagaagaacaaaaaattgacaaattaatatatggtaaacaaaaaacttctaagtgggaaatgttcaaagttaaaacaaagaactttttctcaagaataaaaataaataaaaataaaaagcaaccgaagcaagaagcaatatagtactttttttaaacaaataaaataaaattcttattatcgcaagatcctaaaaatattggaataaaagaaaaacaggctcgggaagttgctcttgatattgaagaaaaatgtttgtcattagttgattaggatatgtcaaaaagcaaacactttttcatcttaaactccctgataatttactctcaaagtaagagtctcaacataaatccaaatattgttattgtctgccataccgtatccttatttattattacagctactgtatgttagactgctttatctcaaaatggaagtcattgagggggaaatgtgtcaaagtgtgtccgggagatagttttcaaaaataaaatactactatgtccaaagttgacatagtgatattttattatgtatttgtaagatggattgatagcctcgtaaagttatttatattcaccttgcagtgtagaaatccaacaaaacaaggagacaaaatatggataacaaagaaaaagattttagtgaaatgacaactgaagatttaaacaaagaagtaccggatatttcaaaacagttttttcagaatttggcacaacttatatacgtacggcctgtgcaaattgataatttagattttaaaaaactgcatgaaatattttccgatattttatgtacgctttctccaagagaaagagatgttttaaggctccgtttgggaatggttgacggcaaactcagaacgtttgaggaaatcggacaattattcggcgtcaaaaaagatgagattcagttaattgaagcaaaagctataagaaaactaagacacccgaaccgcaacaaagagttgcgtgagtttttagatataaactaggtaaaatataaggagtatgacatggattacgaagaactgattaatgaaaagatggaattcggactttatgaagaagctgttgaaatactcaatgaagcaatagaacataagccgcgggaaggggaatattattatctgcgcggcgaagcaaaacactgtcttgaaagatatgaagatgccattattgactatgatactgctattgagttatccaaaaaatacagccattattatcatatgcgcggtcgttcaaaatatcttcttaaaagatataaagaagcggaagccgatgtaacaaaggctatttcgattgacggcttagattacacctcttatcttatgagaggtgatatcagatgtgatatggaaaattattcaggcgcggcaactgattatacaaatgctatggaaattaatcctgataatcctaaagcttatatttattatgctgatatgaaaaaaaatctggatttgtatgaagacgcactgaatctttatgagcaggctcttgagatagctccggaggatgacggaatatatgcaagaattgctgatgtctatatggagcttcgtgagtttaaaaatgcggtaacgtattataccaaagctatcaaacttgattctgagtgggcagattattacaaaaaacgtggtatcgcctatgaaaaacttgataaaccacaacaggcattaaaagattataacaaaatgataaagcaggaattctttgccgaggaaggatatctctataaaggcgatgttctgcaagacttggaacgatatgaagatgctataaaagcatacaaaaaatacatcaagcaaagcggtgaatatgacggtttatataatgccatgggttctgcatatcttgaactcgaggaatatgatgaagctttggacgtattcaaaaaagctattgagttaaatcaaatgtgcgcaaatgctcactacaatagtgcaagggtatatcttaaaaaagaaaattacaaagatgcttttataagcattgaaatggccatttttattgataatgacaaatatgagtattctcttttaagggatgaaatcaataaacatattaatctgtttaaacctgagcaagaagacaaagtcagaacaaataatattaacgataagctgggtaaagctcgtgaatttatcgtggcaaaaaaatacggcagtgcaataaaaacctgcaaaaaggttcttgaaacggagcctgaaaacgaagttgcatacaacaatttagggattgcttattacagtctcggaaaatatgatgaagctctaaaatgctatgaaaaagccataaaaatagcaccaaagtatgcaaaaccgtattgtaatattggcgttattaaggaaaatcagggtaaaatcagcgaagcaattgaatattataacaaggcattatctattgattctactttagaacaggcaaactcaaacaaacagaatgcagatgccaaattaaaaaaaagcagggcggtatcataatatgattaaaaaactatccttatcaatattatgttctgtgattttagtttcttctgtttttgcaaaggaacttggcttgtatgaccactattatctcgcaccgaatcctcaggaaactgtcactaatcctgaaggcagccaagtaattaaagttgacagagaacatggatactatgttgacggcagaggacaggtaccggaatattcaaggattcctccgccgaatgaagataaaattcccacagaacctcatccgacaagaacggttgttccttttgacagatattacgatatcaacactttaggtatgcgcagacaccctgcaatgagtccttggattccgaattacaactgtcattacagcaacagacgggcaaaaccttacacaaaagatgaatttgtagaagtttggtgttcgggggataaagggataaacggagttgattgccagtctaaaaaatatgccataacttttgtgcgggcgagagagtggagctacggagtaatcaaagctccgattaaagcaaagaaaacaggaaagaaagcggcagtttttctgatggtagatgacctgggattagatgcggaagcaatgcacgcagcaaaagactggtcagaactttttaatattccgatattcttcgggacaatagatgcttatataccgagtgattggataatctgatgaaaaatttatatcttattttatgtgtatcaataatattaccggcttttgcagaagaacttccgcctttgtatggtgcagatacttggtttgtacagcctgctgcatgtcagaaaactcaagacagcaattggaaagttatgttgtggagagctgataaacgcagaccaagtccatattggcgatattatccgcatattacaaacagagaatacattgattgcagttactataaatatgtgaactgtgaggactttcggttctgtcgctgctggcaatgtaaggattatatttatccgtatgtggatgataattaataaagatgccttatacaaacgtataaggcagaaacttttcgaattaacttactatagtaacgtttcgaaactatttattgtataatcgcaatataccaaacttaaatgtgtttgtcaagaaataggagtaatatatggaaaaaatattaggtcttgatattggaatagcatctattggttattcaattgttaattatgatgatgaaaattttaatggtgaaattttaaaaacaggcgttcgtgtttttgatgcatgcgaagtagcaaaaacgaaagcatctttaaacgctgagaggagggtgtttcgtggcgcaagaaggcgtttgtctcgaaggagtggtcgtttaaaggctataaaacaattgtttatagagagtggttacttaaccgaagaagatattataagtatttttaacggtaaaaataaaaagacagatgtctggacattaagaaaagagggtcttgatagaaaactttcgaaacaagagttttatcaaattttgcaccaaattgcaaaaagacgcggttttaaatctattcgcaaaagtgaagaggttagacaagaaggcaatttactcaaaagtatatcggaaaatactaaaaaatttgaagatagtaattatcgtaccataggagaaatgtttgcaataatatacaaagatgactcaaaacgtaacaaaagagatgattataaaaattctataccaagagttcttttgcaaaaagaaatagaagttctttttgcaaaacaaagagaatttggttgcaagtttgcgaataagaattttgaagataaatatatagaaatagccttttatcagcgaccattacaatctatggaaagtatgatcggatattgtcaatttgaaaaagataaaaaacgtgcaccaaaagcatcatatacggcagaggtttttgtagcagcccaaaaattggttaatacaaaactcattactcacaatggcgatgtagttgatttaaaccctgaacaaatacaagaattaattaaatttgcacatgaaaaaactaaagtaacatataaacaagcaagaaaagaattgatgatagacgctgataccaggtttaagtctttgcaatacggaaaaattataaaggacaaaaaaaccggtgaaagtgttgaggtaaatcctgaggaacaaactttagttgaattaaaaaaatatcatgaatttaaaaaggctattaaaaattcattaggggaagaattttttaataaaatacaaaataaacctgatttatttaataaaatagcagtagcattaacatatgaaaaatctgatgaagcaataatagaaagattattaaaagataatgttccacttgaaataattgattgcataaaagatatttcaactagtaaggttatgcatttatcagttgaggcaatgagtaaaattacaccatatctgtttttaggtaagaaatacaatgaggcttgcgaagcagccggttacgattttaaatcaacaaatcaagcaaagaacaaccaatatttacctgttttggattatagcgagcaaacgacaaatccggttgtaaacagagcaatctctcaaactcgcaaagttattaatgctcttttacgggaatatggtagttttgacaggattattattgaaacagcaagggaactcggcaaatctcctgaagaaagaaataagattaaagcaggacaaaccgattttcaaaacgaaaaagaacttgctaaaaaacgatgtgaggaacaaggaataaatccgaactcaaaaaacaatttattaaggtttaggctatgggaagaacaaggagggttttgtatatattctaaaaagcctattgatatcagacggttgagtgacgaaaattatactgatattgaccatattattccgtattcgaggtgttttgacgatagtttgaacaataaagttctttgtttatctgatgaaaacagaaagaaaggcaacaaaattccttatgaatatttaaacggaaaaactgattggtttgaatattgttcttggatacgttctttgcatttaagaagcgcaaaggaaagcagattgctcagaaaatcatactctaaagatgatagcgaaggtttttcttcaagaaatttgaatgataccagatatataactatttttataaaagattatattcaggaaaatcttgacacaaaagttgaaacaagaaatgggtctttgacagcatttttaaggaatcaatgggggataaaaaaagacagggaagaaaatgacagacaccacgctgttgatgcaacagttgtggcttgctctacaaagggtatggttaagtttttatcaacgatatctgctaaaagagaaaattatgattttatcaataatatgaaaccacgatttaaacgaccctgggatactttcaatgaagatttacaaacctctattgataagatatttgtatcaagagctccgagaaataaaatacccggaggaatgcataaagcaactatctatagtccaaaacatttggaagaaggttttacaacaataaaaacatcaataaaagatatcaagttaaaagatttggataatatgtttgacaaagaacggaacatagttatttataatcttttaaaagaaagacttgaagaatttaatgataaccctgcaaaagcttttgcacaaccggtttatatgccactgtctgaaacaaaaagagaagcggggataaaaccacatgaaataaaaactataaaattaaaagtttcaggtacatccggtatgctggtacacaatggttttgcatacaatgattctatgccgagagtagatgtcttttctaaaaagaataaaaaaggtaaagaagaatactatctcgtaccaatttatgtttctgattttgcaaaaggtgttttgccaaataaagcaattgtagcgcataagccggaagaagagtggataacaatagatgaaacttataattttaaattttcattattgaaagatacacttattgcatttaataaaacagataaacctaaagatgagattatttgctattattgtagtactcatagagcacatggaagtataattattgaagcgatagataataataaaacattaaaaggagtcgagattggcgtaaaatcattatattccttcaaaaaatatcaaatagatgttttgggtaattaccatgaagtcaaaaaagaaaaacgcaaaaatataaaattaaaaaatactaaaaagagtacaacataatgagttggaaaacattattattctgcaatccttgtaaacttcatataaagaatcagcagcttgtttatcaggctgttgattctgttgaagaaatttctattccaatggaagacataggaacaataattttagaaaaccctcaaattcatattacaaattatatacttgcactttgttcagaatttgaaataacggttataacctgtaataataaacataaaccaatcggcatactcactcctttttaccaacatagcagaaataccaaaattgcgcttgctcatatatacacaaaggaaccgttaaaaaaacaaatttggcaaaaaataataaaacaaaaaatcagaaatcaatcaaatgtgcttaaaatactttttgacgataaccaacttgattattatattgataaagtgcaatccggtgacacaaaaaacattgaaggacaagcttcaaagaaatattggtcaataatgttttgtgatttcaaacgtcattcttctgataagtataatgccgctcttgattacggatacgcaatactaaggggaactatttctaagtatatatcgtcaagcggattaataccctgtttaggagtgcatcattgcaatgaactaaactcatttaatcttaccgaagatttaattgaaccttttagaccgtttgtagatttaatggtcagtaaaatggaatttgtaagcaattcagatttaactaaaaatgataaggcatatttgctttctatactgacaaaacaatgtcaatatagaggagagcagataactgttcaaaacgcctgtgaaaatgtatgtaaaacttttgtaaaaactcttatggaaaaagatacaaaactacttgaattacctgagtttatcggagtgaaatgagcgtaaaaggtgatgatatatttatgagattatttgtattctttgatcttcctgtcaaaaaaaaggaagaacgtaaaattgcaactcgtttcagaaaagatttgctaactgaaggttttacaatgttgcaattttctgtatattgcagagtatgtagaggacaagacattgttgaaagagaaattagaagaatcaagcaggttcttccgccaaaagggaatgtcagaatattacaagttacagacaaacaatacggaagtatgcaatttctcgttggtaccccaaaaaaagaagaggtaatcggtgcggaacaactacttttattttaaaaatttttgcataaaaatgtcagttccctctttatttttaacccttttcggaactgacattatacaataaatactttcgaaaggaaactatagctatttctgtatctatatagcttgtatcgtcattatacaataaatactttcgaaaggaaactatagctgtctgcttgaagtgttgcaccttcatctaattatacaataaatactttcgaaaggaaactatagcctcaccacgttcaaggttattaacatatctattatacaataaatactttcgaaaggaaactatagctctatcgggctgccctgttcttttaaggtgattatacaataaatactttcgaaaggaaactatagcatatgacatgtggcaattacaacagattaaattatacaataaatactttcgaaaggaaactatagcatgtttgtatttgaccatacaaaatataagattatacaataaatactttcgaaaggaaactatagcaccgatgtctttaattatagtctttccaatattatacaataaatactttcgaaaggaaactatagcgacgctgtatttacagatacaacttacagcattatacaataaatactttcgaaaggaaactatagcgcaatgacgtatttcgtcatatcctcaacaattatacaataaatactttcgaaaggaaactatgaaaggaaactatagccttttcatcatcattgcattcctagcattaattatacaataaatactttcgaaaggaaactatagcgtctgtaacgacttctcgccagttcaagttattatacaataaatactttcgaaaggaaactatagcttagttaatgtgatattaacaccatctaaaattatacaataaatactttcgaaaggaaactatagctggtgttccctgcaccaactcatctttttcattatacaataaatactttcgaaaggaaactatagctatagtatggttcttgcgtgtttgtcctcgattatacaataaatactttcgaaaggaaactatagcgacgcagaaccgcaagttacaaaaggcggtattatacaataaatactttcgaaaggaaactatagcgtcttccagttgcattagcaatagaccttaattatacaataaatactttcgaaaggaaactatagcatccaaacgttaaacaatttgtttagacgtattatacaataaatactttcgaaaggaaactatagcgcctttgcgtatgtgatttgattttgccctattatacaataaatactttcgaaaggaaactatagcatttcaaaataaatcagttttgatttaacgattatacaataaatactttcgaaaggaaactatagccggttcgatgaaatacaatacggcaacaatattatacaataaatactttcgaaaggaaactatagcatctttgatgcaattaacgatgtatgcacattatacaataaatactttcgaaaggaaactatagcccgaatggtaaagtttatctcgatgcttcaattatacaataaatactttcgaaaggaaactatagcacagaaaggtatgcacttttaaattgatttattatacaataaatactttcgaaaggaaactatagcatgtacgcttgcatatcaagcaatgaaacaattatacaataaatactttcgaaaggaaactatagcttctcaaaaaattcagggtgctaatgcattaattatacaataaatactttcgaaaggaaactatagctttttgcaatgtccatgatgttatcaatagattatacaataaatactttcgaaaggaaactatagcaatgaagaaaatacatcaagagcaataataattatacaataaatactttcgaaaggaaactatagccataatttgtacaataaccttcatttaaatattatacaataaatactttcgaaaggaaactatagcacttagcaccctcaggtaatactcctacaaattatacaataaatactttcgaaaggaaactatagctgcctgtttcgtcataaattgcgaatttttattatacaataaatactttcgaaaggaaactatagcttgtaacaatatctgaaaaatgaaagctacattatacaataaatactttcgaaaggaaactatagcgatagagttttatctcttaatactgaagatattatacaataaatactttcgaaaggaaactatnnnnnnnnnatacaataaatactttcgaaaggaaactatagcgatagagttttatctcttaatactgaagatattatacaataaatactttcgaaaggaaactatagcccggttccggctcttaggtttcacgcctcaattatacaataaatactttcgaaaggaaactatagcatcctctgcatatagttatcacataacattattatacaataaatactttcgaaaggaaactatagctgcgaaaacgtctattttttccaccgcctcattatacaataaatactttcgaaaggaaactatagcttattgagtggttaattgcttctgcttttgattatacaataaatactttcgaaaggaaactatagcggaatgtagcagtttctgcttgaggagagcattatacaataaatactttcgaaaggaaactatagcttatcagccagtatagctttaacctcatcaattatacaataaatactttcgaaaggaaactatagcttgtttttcctttctgtttttgtgtaatacattatacaataaatactttcgaaaggaaactatagccgtctagtatgtataaagtaaagtaacaaaattatacaataaatactttcgaaaggaaactatagcgattctgtgggtgttccgttatttcttgcgattatacaataaatactttcgaaaggaaactatagcttgccttgtcctctaataacaatgttttgattatacaataaatactttcgaaaggaaactatagctaaattctgtagataaatcatctaaaattaattatacaataaatactttcgaaaggaaactatagctgcaagcaattcaagaatttttatctctctgattatacaatttataaaaagatattgaatgaatttatttacccctgtccatttctgacacaggggtaatttacaataaaaatgtaaaaaatataaggagtagaaataatggatttaaaagttagagaaaaaagtattttaaatgcaggtgatgaaattggtatttcattaagtattaaaactcatattcccgatgaagatttgtggaaagatgaaatattgtgcgaagacgattacaagcacagttacagtattacatatatgctaaacgataaatgtatcggcggttcggattttacccttgatgaaggtgaatatcctgattatttagatgatattgtcggctgcataaaagaagaaatggaagaaacatttccggaagtaacagattacgacatttttgatgttgataataccggggaattcagaactgcaaaagtcagagtaaaagccgtaaaagaataattattgaaaggaaatttttatggaaaacaagaaaaaagtttatttacatggtgaatgtattataaaagaaattgaatctttgcctgaaaatttatcaagaagaaatgatgaaaaatcgattatgatagcagaatcggaaactgtcggtaacgaacatagaatcaaagtaaaagaaggtgttgaattctttgaagatgaaaatggagttctgtatatgaggaatacaagacctacggaagtatattgtttgcactcggaaaggcacgataatattgaaattccggaagggatttgggaaatcgacaaagctgttgaatatgattattcaatacaagaaattagagtagtcagagattaatctaaagaatttaacaatcaatggtggcaacatgacagaaaaattatacaaagataatttatcatactatcaggaatttaatgattatttaagacaaactcttttagaaccaaataagttgtctaaagaaaaaatacaggatttgtgttctgaatattgttattggacaaataaattttcagtaaaacctgtaatcaaagaatggattttagcagatgccgttgcatattgcgactgtcgtttacagtatttatgggaacaacttgttgatataattaatcaatatactgaaaatcaaaacagtattcactcttggtatgacttagactgggacattaatcctgttaaagatttaaaacttatgcttccgtttgatacagaggatttttatcgcagaaccggatgcggcagtcttaatatgcgtttttataaacttatctattattttgattttttaggagttccaataaaagatagaaaattaaaaagattctggaaattttataaaaaaacaatgaatgtatatgctatggggttacatcattattcttcaggcagagaggaagttcatgtggttttaaagcctgatgaaatttatatccaagatggtgttactcactgtatttacaataatgtatactactgcgacggagtaagtgttcctcaatggctttataaggggaataaagacagtctggatgcagaaaaattctgtaatatgcaaaatgcggatttcaggtcaatttttattaaaaaagccggaatagaaaaattccttgaaatgggaaaactaattgatagttatgaaaattatcccgagaatgaatggtgggcaaaatcagaatacaaattaattgacatgaaaagaatacttatccaaaaaattacaagagattttaacaccggaaaaacgtatgttgcaaactatgattacgcaccatttctttttatgaaaaaccaaacaacaggtgaatatcatcttgagggtgtaagtccgaattgcagagatttatatgacgcaataaaaatgcgatataaaggtttagaccttccgagttatgaaatacaagatattaaataaaaggagtaattttatgacaaaaataaaagtaataggaattagtacttgtggaagaagtgcaattaacagatgtataaaaaataaacttgataacattgaatatcttgtgattgatactgatccaagcacaataaaaacttctacatttgccggtaaaagttttatactaaaagatgcaacagagatacaaacacattttaaagaaagtttattatcttttattgaagatacggatattttgtttttaattgcaggactcggaggaaataccagagcagaaatcttggaacatgtatcaaaacttgcaaatgaaaaaggcattcttacaattaatttaattaccacaccattagccaaagatacagattataaccttgaaaaagcggaagaagacaataatcggctgaataagttgttaaagaataactgcattcttaattcagataaattttatataaattttaaaaaatatttaagaaaaggagattctataaaacaaatttatgaatatgtaaatgaagttatttacagaatcatactctcttttgcagatagtcaggactgtatgatgagagtagaaaccggtaactttaaaaaagtttttaactgtgatggagaaatctggtttggtataggtatggcaagcggtgaaaacaaaggtataaatgcaactaaaatagcattgggaaaagaaaagctaaatgcaaatggtgtatttatttcaataagaggcggagaatctttatgtattcatgatacttgtgatgcagcaaccacactgaataacaatattaatgatgatgcaaagataattgtatcaacagttgttgatgaatctatgccaaaagatgacttagaagtaatcgttttagcaacaggatgctaaacgaattttgacacaggcataatttacaattggaatatcaaaaagaaaggaaatattatgacaattgaatcagtagtacaaaaaagttacactataacaatttacggtgaaaaaggaagaatcctaggtaatatcccgacaaatccgggtgatatgttaatgggttatactgcaacaagtgtatctgttaaaaaaggcggatttatcaatgtttataacgaacgcggtgcaatgacttattctcagccggtataaaaggggtaaattaggcaaatgaatatatctaaaatcgattacggccacatgctttggtatatgcgtgaatatatgtgggtaagaccttttgacaaactgaataaaaccataaggtttgaagaagcccctttttctcatctgatggcaggtctgtgtacttttgtaatatgtgtttttggttcatttgcgtttgcttttgaatacattattctcggcaaaggacacggagctgatttagtcggatatatgatgtactgtgattctaaaaataaaaaggaaaataaaaatggaaacaaaagaaatagaacagagaatagcgaatgctgtaaatgaaatcccgataaaagaaatattacaggagtctaaagacaatttaaaaataaaacttgaaagatttgaaaagaattggaatccgcacagaagcatgaattggagacttaaagcaagaaaactgcgtaaagccaaaaaggaaggtattctattatcaataattcataaaatttttggaaactaataaaagataaaatccgcattctcagaataaaacactctaccctatccaaatctgacatacccatattttatactaagaatgtaaaagataagtgtaaaggaaaattttatggaagtaataaagaagaaatttgaaaactttggttatattttgacacccaaggagcaggatgttatcactctgcgttttggaataaaagatgataaacgaagaacgttgcaggaaatcggaaatttattcggagtaacaaaagaaagaattcgccggatagaagctgatgcattcagaaaactcagacacccggagccttatatagttctgaaaaaatattctttaaataaaatttaatcaccatgtccatttctgacatagtggtattttatactaaaaatgtaagaaaaatttgaattcaaaaatgtgataaaatgccgctctggtttatcggattgttattattatgttactgggacgacctcgaagacatatatgatgacgaataaaaaataaagtgtccaaatctgacacacatatattttatgctgtaagtataagaaaaacattgaaaattaaataactaaatctcatagagagtgtacgagggacaagcccgatgactacacagcaacccgagggtaaggttaaacaggctagaacgcctgatatatttacccccaaaggtgctaatgcttgaatgatgagaagctttgtctaactaccaaaaggaacctcctttcctttgctttgctaccacacgaaaaggctcatcattacgatgagtcttttctttttatttatcatttgagcttctgtgagaaagaaaaaagtaaatcagaaaattactgataagcagaactcaaaaagccaacggaggtaaaagatggcaaattttaaatcaaaaagtgaagttgaaaaacaacttccgtcaaaatcaaaaacacattacaccggagaagtctatcctgaaattttttctcacacaaaagattccgaactgaaagaaggaatgcacttagatgctgcgattatgtggttaggctctttcaggttaaacagcggttggttcccgaaagaaaaatgccctgtttgcggaaaagatgaagtcctgattccttatatgtgcggtgggtcgattctgtcaggcgcacacacaattcaattctattgcacaaattgtcacgaacaatttgtaactaatgaccacatagaatattttcggcagatttacagatatgccataaaacacaaagacgaactcaaaccgagcccaaagtttattaattgtacttctgtaatttagtaaaaacccctccggttaacggaggggtttaaatgtgtttttatgtcatcccaaaatcttgtaaatttgtatttttatattttgaatattataaattttattcctattttatgccggtgggaacatatttcccgtgggcattgtatccgtatttaactctttgtccgtttactgacgtgggaacatactcaccgtgtgcgttatatccgtatctgattttttgattgttaacagatgttggtacataatttccgtgagcattatagccatatttaatatcttgtccgccaacagaggtcggaacgtactcaccatgcgcattgtatccgtattttattttcctgtccccgattgcagtcggtacatattcgccgtgagcgttgtaaccatactttactttttcacctccgtaagaagtcggcacataatcaccgtgggcgttatagccgtatcttatatcagctgcaaaaacagcagcagttgagaaaaatccaaataataaaagaactaaaaaacgtttcacaggcttactcctttcattattagtataatttatacttatgtcagaaatggacaggggtaaataaaataaaaagatatatacataaagtccatttctgacatacaggtcttttattataaaaatagaggacgagtgaaaatggaaaaagattttacagaaaagattaataaaagaatagctgttctgcagggattaatgacttttgcttttataattttagcaggttatcttttcggagtacaggtgcttgatttaagcggatataaagcaaaaggtattgcaataaggagtacaaacagcccggcactaagaggaaatatcctgga

SEQ ID NO: 2727 - DNA, 23087 bp, synthetic construct
  source 1..23087: mol_type = other DNA
  misc_feature 1..23087: note = Synthetic
ctgaaacaagtttaatccaaacaatcgggcgtgctgcccgtaacgcttgcggggaagttattatgtacgctgataatatgactgactctatgaaaaaagcaattgacgaaactgaacgtcgtcgtgaaattcagcttgaacataacaagaagttcggaattattccaaaaactatcaaaaaacctattgaaaacaatcttctttcgcttgttgcaagctatcgcaactttgaagatattgttgcagaagaaatggttgatcttggaattgacaaaaaagacttgcctaaacttattacaaaacttgaaaaagacatgcacaaggcggctaaaattcttgattttgagcgtgctgcagaaattcgtgaccaattgaaaaaacttagagaaatgcttaaagaataaagaaaaagcccgaatttcttcgggcggatatctacataatgcaattcttttttcgttgtcgagtaaattataaatacattatttctattttttaaaacatttttaacgtgattttttcggctaattcgtcagaaatattgccaaattctgattttacagctgaaagtttatcagaaaattgagcttcaaaatccttcatagaagcagaaattcttgaggcactttcttgatttacataggctttgacgttaaccgttttctttagttggacaggcgcagtgggtcttgttgcagtcatgtatttgaatacatcatctgctgacacttgtttgttttcggtttgtgtagtttgtgttttttcctctgttttcttttcctcaactgaaacttgaacttttacattgttctttgatgaaattccaaacagatttgtgttaattgcattaatagacataatctctctccttattctcgctgacagtttttatttaatgatatttttttttaagtcaacatttttgtttaaaaaattttaaattattttttaaaatttgcgaaaaagggcggtttgcctaagcaaaccgcccttaaaaaactttttattttattatttcaagtaatgatttttacctacaccgaaacaatttttagcaacatcaactgttccataagcagctaaaccaattgctgaggctttagaaactgcgcctttagttaaaattgttgcagttgtcaaagctagaggaactacattattaactaaagattcgccaaaacctttaacgtagcctattgcagaattgaagaagttacgaacgttattgaataattgtcctttcatttccatatcaaatcgtttgttttgagctttactcattaaaacgcttggtctatcaagtgattttgaatccatatatgcgtctaagccactgtctgcgattgcttcacgtctgcgttcgccggctctaacttgtcctaatttatgagcatcgtatgcaattgccgccaaacctacataacctgtggcttttgctaaaccgttacccaaactaaatttcttagctgctgcggttgttgttgcattttgaattgtcattgacattttgtttatttccttttaattagttgttttgaatttttgtttttgttttactgaggcattcttaatagtattttgtttgcgtaatctgcctcttcactatttggtatttttgacattttctttagaagttttgtggttaactcatcgcctgttattaagttagcttctaatgctgcaagtgataaacttcttactcctaaatcagggtcttgtaacattttgtttgttaatgctgtgagtgctgggttatcctttctttctgggtcttcttgaagtctggctactacgtcttgtcctgccattattcttaattttttatcttgtgagtttaaatatgattctaagtttcttacgtaatgatcagttaattccatttttggcttttcagcttttgttgtattctttgcaattgtttggattgcatcgaccaattcttttggaatttgaacctcttgtttgattggtactgtttgtgactgaattacggttgtttcttttggtttttcttgaacttgaggttctggagtttgaggtgcttttggtttgatattttcggttgaaccttttccgtttgcctctgcgttaattctgtttatatctgccatttgattagcaagtgcggcttgatttagtcggttaatcattggtgatgcaaaggtattaatataatatgctgcgggataacatccgttgttcaaaaccattgtttgatttggcattgcaggcattgtatatttgcctacgcctggagatgttactgatatactaacctttggacaattaccattagcttgtacgtattgttttgatacgttttgcatttgctttataaccttacctaaatatttatttaaccttacctacatatatataaagtctaaaaccatgtaaaaattgcctttttagactaattgttacgaaatgttaataaaatttaaaagtttctcaaatacagctataatcatgatatgaacgattttcaatcacaactgcctaaacgactttgcttaaactgcggtaaatgcggtggaaagttgccagaaacagccttttcagacattcctgaggggtgcggttattatggttacatgtttttgaagcaagaggaacataaacaaaaagttcgccgacttgatgaggatagaattttgttaaaaataaaaattatgaatgcaaaaggtgaagcaaaaagaaaaaaatatcaaaaagggttagaaaaagttgatgaaaaattgaaggaacttgaacagtttggaccaatagatttttaaaataaagaatgcgccgaggtttcacctcggcgcatttagctacaaagtggcggttgctgaaagcaaccgccactttgtaataacaaaattataaattacaatctgcatcttttttcgtttgagcaatatagtctgcaaaaatcaaataattagtcatcactaaaatacaacaataaacgacaatcaacatacttttaccgtatatcataacaataacgtaaagcggtatcaatgcaactaaagtaaacaagacaacttgaatagcatagaaaattaaatctacaataaatgtttttattgactttgcaataactaccaaattaaaagaatctttaatttttcctgtatgtaaatattgcgtaactgttgcaaaataaattgatgagcataacaaagtaagaattgttgaacttacatataaagcaatttgattttcaacaagtacaggaaattttgcacaaagagcaccaaaccccaaatatagcaagaaattaattgcacaaggcattatgcttaaaagaattaccattaacaatgtccaaaacattggaattggcatcaaaaatgatggcatcaacattggttcattatttagcgagcgttttattgtttcaaaaaatactgcaccaaaaatcacgccaaaaacggcatacatggttaaactaataaacatattaccacccattgccgcccaaacagaaagcattaatgggattgacaaaattatcatctttataaaagcgaacttgtcacccattacgtttcttgcgcaatcaataatgtttaccatttttattctcctagaattgttctaaaaatctctcgtcattgttaaagaataatctgatatcatcaattgcatatttcaacatagataatctttctacacccataccaaaagcaaaaccgctatatacttctgggtcaatattagatgcttttaatacgttaacatcaaccatgcctgcacctaagatttcgagccaacctgtaccagaacaagttttacaacctttaccttgacacataatacattgaacatctatttctactgatggttcagtgaatggaaagaaagaacttctaaatcttgttgggcgagatgcgccaaagtataatcttaaaaattcattcaaaacacctttcaagtcagcaaaggttacgtttttatcaatgtataaaccttcaatttggtggaagaaattatttttacgtgagttaatattttcgtttctgtaaaccctaccaggagcaacaattttgataggaggtttcatatcttccattacacgaacttgagcgccagaagtttgaccacgtaaaattacgtgaggcgcaattgtagtataaaaagtatcctgcatatcacgagctgggtgatccttagggaagtttaatttgtcgaagtgataattttctgtttcaacttctggagagtttttatctggagctactgaaaaacctaatgtatggaaaatatcaacaatttcgtttattgtagatgtaattgggtgaacatgaccttgaggaatgtatttacctgtcaaggttacatcaattttttcttttttaagtttttcgtccaattcttttttataaaattcgtcgtattttgcttttacttcggcttctaatttgtttgcaatttcgtttgcaaaagcacctacaactcttttatcttcatctgaaaggtcttttaagttcttcttaattgaatttaattcaccttttctgcttaagtatttcaattttaattcttcaatatctgcaattgaagttgcttttgataaatcagctgatgctgcgtcataaattttttgtaattgttctttcattttcttcctctattttataaaacaggattattttgtttttcgtatccaacagttgttaaatcgccatgtcctgtatatattttcacattatcgtctaaattgtttaatacttggcgaacactattcctaaggctttcgtaacttccacctggtaaatcggttctgccgacacttcctaagaatattgtatcaccagaaaataatttatcatcaacaaaatagcaaacgccaccttttgtatgtcctggagtgtgataaattttaattttttcgtcgccgattgtcaaatcttcgttttcatcaatatattttgtaattggtggaacatcaactttaccaaaaccaccaacaaatctgtctacaaaggttgccacattctcaattaaatccttgtcatctttatgtgcatatattggaacatttggcatattttcgtgtagttctttcaagcctaaaatatggtcaaaatgcccatgtgttaataaaacatattttaatgtagcgttgttatttgtcaaaaatgtttgaatttctggtaaatattcagtgcaatcaaataaaacagcctctttagatttttcatcataaagaagataattgttattctctaacatacctgtaatatacgtttttactaacattcttcacttctcactaaatcaaaaatttctttacacattttaaaaactttttttgcatcttttaatgcaagcatgtttggtccatcacatagtgctttgttaggttctgggtgaatttcaaagaacaaagcatttacaccagcagcaactgcagagcgagctaataatggtacgaaggttctgtctccgcctgttgattcaccatttgcacctggaagttgaacgctgtgagttgcgtcaaacacaacaggatagcctgtttcttgcattattctaagcccacgcatatctacgacaaggttgttatagccaaatgttgtgccacgttctgttaataagatgtttgaattgccagtgctttcaacctttttggtcaaaggcttcatttgttgtggtgctaaaaactgcccttttttgatatttacaatcttacctgtttcaccagctgacaaaagtaaatcagtttgacgacataaaaacgctggaatttgtaaaatatcggctacttctgaaactggtttagcctcatctggcaagtgaatatctgttacgataggcacttcaattttttgttttacatttgcaagcatttttaagccttcttccatacccaagcctctgaagcctgttaatgaagaacggttagctttatcaaaagaagatttgaacacataatttatacctaaactttgagtaacttcttttaatgtttcagcaacttcatataataaatcttgattttctatcacgcaaggacctgcaaaaatagttaatttgtccccgccaatctcgaaatcatttaatttaatcttttttacatctatcataatacgtctattctagctaaaacagatttatttgtccattacaaatgaaagaataaaaaaataacaattctttaactgaatacaaatattaaaagttaaaattatttttatcaaatccttattaaaacatattataaaatagacttcactaagagtttatcaatgttataattaatttataatttagcaaaaaggaagttttatgataaaagttttgtttgtatgtcttggtaacatttgccgttcgccgatggcacaaataatttttgaaaatatgatacaagagcaaggacttgaaaatgagtttgaagtagattctgcaggtacagaaggctataatgagatgtgccatgccggtattcatcgtggaacaaaagaagttttacgtaaaaatggcgtatattttaaagaacattattctcgtaaaataagaaaacaagattatgcttattacgactatattatagctatggattctgaaaacattagcgatattgaatatattgtaggagaagataaagataataaaataaaaagacttttggactacacaaatactcctcgaaacataaaagatccgtggtataccggtaattttgacgaaacttatgacgatgttatcgaaggctgttctgcgtttttagaatatctaaaattaaactcttgatgtaaaatgctttgtactctaatacatggtttgacttctttctaacagagagttttatgatatataaacgtcgaaacacttgtagaaaaatatctatcttaaagataaatttatttaccatttctaatattattataaattatcatttagcttacaaatatctttagttttctataaacttgataacaaaagttacttttacataaattattatgtttttgttataaaaatttgcaaatatttcaattttgagtgatgaatactacacctaaaaggaggttgtatttatggaaaaatgttataatatttcagttcaaaatactcttaaattgaagcaatggtcagctaatatttataacacagcagttgtattggattatttttgttcaactcaaattcaatatgcagaattaaataatatcaaacccatcatacaaaatttacacaaagatgcagattgtcattatgcatattttattaatttagaagatgaaataagattgtaaattcaatatctgttcaaacgttgttcaatatatgtttacgtaatcgacaaaatctgcttatacgttatataattaaaatatggaagaaaaagatttagtaaaaagatgtttgatagataaagatgctatagaaacatatccatttaaggatgataaatatgggaaaattcctgttttgagacataaatccaataacaaatggtttgccttgatttttagtttaaataatatcttatacgtaaacttaaaagctgaacccgaaacaatttcaatattaaaagatcaatatccggaaagtataactccagcttggcatatgaacaaaactcattggtgcaaagtggatgtaaacaaaatagagtctgaagttttagatgcaatcataaaacgaagttttgatattacagcaccaaagaaacgtgttatgtcctaacgactttcgggagtttgattatattgaatgtctatatttcagtattagtaatactttgaatggaaatatcaaactatctgttatcttgttaatacgtaaattctcctttcatttttattacataccattaatcactctgttttagttaaaattcaactatgtgtgttgaattatgttgttaaatttaatttagtatgattttaaaaactcagtgaatttttaatattacaacacaaaacaacacgatttttaacgatttctatatcaacaagtttaagaaaaatatcacttattttgaaaatttatatcacagagtttgataagttttccctcagatttgggattaaaatgagaaaattctcaaacttcccaccgagttttctcaaactaactgataatctacagttttctttatagatataatttattcagaaaaaagtttaaaatggaaagaatacgtttaacaaaatgctcaaactatctgttacaagaaatcatttcatgtgttcttttacattaagaaacttccaacccgtacaagtcaatcatagtgccttatttgccaaaaatatcaatttaaccggaaatatcaaactactcattaaactactacaattacacttgcagtttgatctcttttaacagttagtttgaggtactgcgtgatgaatttgaaccgagtaatcgctgatactaaatagtgacaagtgttttatctattcgctattaaatttatactaaagttaaaaagtgatcttttgacaaatgcaacgaatattctttttgaatatgctatactttatagttttaaatattaataactgtgaactataaagtaatactcaattgaaaaattgttgtttatagtttatacttataaaatattataactataaactatggagcaaaaatggaacattcaataaaatcattacttaccgaaattaagaacaagaaaagtaaatttagtaagatttttagtgataacaaaagtaaagaacaactatataaatggcttaaatccgagttggcgtacacttcaaataatattgaaggaaatactttaactagaaaagaaactaggcttgttattgaggaagatataacgtcatcttcgaaaccttttgtacattatcaagaggcagtaaatcacgcaaaagcattcgactatatcattgatattttaaaatctgacaaaaatattactgaaaatgttgttcttgatattcataaaaaacttttgtctggtattgatgattataatgcaggattttatagaaattgtcctgtccgaatttcaggcagtcgtgtaattttgcctaatcctataaaagttcctaatttgatgagagatttttttgaaaaatttgataataatataacagttgaagatataatcaaaattcaccttgattttgtaagtattcatccattttctgatggtaatggcagatgtgcaaggttgttgatgaaccttttattgatgaaaaatggtctatgtccgattatcataagaccaagggatagaaagcgttatatcaactctattgaaagagcacaattaacagaggatagaaccgattacttgaaatttatgttatcaagattaagtcattcttttgatacgatatttgatatttatgaacctaaaaaagaagatattgatggaaaacttatgacgattgcgaaatttgcaaaggcagtggatttacctgtatcgacaataagatattgggtaaaaattggcaaattaaagcctactatgtacacagaatccggttatatgatgttttctgaaaaacaaattcaaaagataatgcaaaatgaccaagataaggattttcaaataaaatttgaagataaatcttgggatttagtattgaaagattttaaaaaggcacgagattgtgcgaaagaatggggtatttcacaaagacgtgtacaaatttattgtgcagaaggcagaataaaaggtgcgtttaagtggggagaaatttggctaattcctaaaaatgctcaaaaaccagaagaaaaagatagaagaatgtaataaatttaatatttttacaacgtccgtttttgacgttgtcataccctatactcttatgttaaaataagattaaaaaaaggatacaacttattcaaattttagtttatttaaaaataaataataatcttacaaaaaagatgcctaacacttcaagtattaggcagtgcttttcgaaaaatttcctattatagtaacatttcgaaagaatttattgtatataattattataaaaaatattataaaatttgtcaagaaaggattaatatgaaaaaaagattaggcttagatattggaataagttcaattggatatggggttatagaatatgatgatgaaaattttgacggcaaaattatagatgcaggagttagaatttttactgttgccgaaaatccaaaagacggatcttcattatccaaaccacgaagagatgccaaaagtacaagaaaaagattaagccgaaaatcaaatcgtttgtataatattagaaaacttttaatttctaacaattttattacacaagcacaaattgaagaactttggactcaaaataaacaacttaaagacctttgggatttaagaaaagatgcacttaatagaattttatcaaatgatgaattttatagaattcttatgtatattgcaaaacatcgtggtttcaaatcaacaagaaaatcagaagaagcccaaaaagaaggtgctttgctaaaatctataaaagaaaataacgaagaatttgagaaaaataattatcagacaattggagaaatgtttgcttcaaaatttacaaatggagtaccaaaacgtaacaaaaaagaaaaatataataattcaatatcaagagaacttttagaaaaagaaattgatattatttttgaaaagcaacgccaatttgggtcaaaaattgccacaacggaaattcaagacaaatacaaatctattgcgttttaccaaacacctctacaatcaatggcaaacatgattggatattgcacatttgagcaaaatgaaaaaagagcacctaaatgtgcctatacatcagaaattttcacctctgcaggtacacttgttaatctctcacttatagacgaagaaggaaattcacgttttttaactggagaagaaattaatgatattattgaacttgcacataaacaaagtaaagttacatttaagcaagcaaaaaatttattaaacctagacgatgaagtaaaattcaattctttaaattacaataaaaaagataaagacggcaacattattaacccagagattaaaactactcttattgaattgaaaaattaccataaaataaaaaaatcaatcgagcaaaatcttggcaaaacttattttgagacaataaaatatgaccaagatttatttgacaatattgcaacgacacttacatacgaaaaaaccgatgaaaatattgttaaaagattaaaaagccttggtatagataatgaaattataaaatcggtaaaagatttatctatgagcaaaacaatgcatttgtcaataaaagcaataaaaaagattttgccatatatgttgcaaggaatgaaatatagtcatgcatgtgaagaagcaggatataaccattcaatagtattaaaaaataaaatcaaatcaacccaattacccgttttaacaaaagaagaacttacaacaaaccctgttgtaaaccgtgcaatttctcaaactagaaaagttgtaaatgcattaatcagaaaacacgggagttttgacaatataatcattgaaacagcaagagatttatcaaaatcttttaaagaaagacgagaaataaaacaagcacaagaagaatttcaaaaagaaaaagaaaaagcaagacaaagatgtatagaacacggattagatccagataagcccaaaagtaacttattaagatttagattatttgaagagcaaggtggtttttgtatttactctggaaaacctattaagcctgaacgacttgcagacccaaattacaccgacatcgaccatattattccatattcaagaagttttgatgatagcttaaacaataaagtactttgtctatcagaagaaaacagacaaaaaggaaacaaattaccttatgaatatattgaccaatcaaaatggtatgaatttactcaacgattaaaaacttaccatttaaaaacagcaaaatttaatagattaattaaaaaatcatattcacaagaaggtttcatatcaagaaaccttaacgacactagatatatttcaagatttataaaagattacataaaagaaaatcttgattttaataataatttgaaagttgaaactagaaatggttcattaacagcttttttaagaactcaatggggtttgataaaaaatagagatgaaagtgataaacatcatgcattagacgctatagttttggcatgttcaactcaaggtatggtgcaatatttatcaacaatttctgcaaaaatagagaattatgaatttattaatggtaaaaaaccaagatttaaaaagccttgggaaacatttaatgaggatttagaaattgctctttcaaatatctttgtatcaagaaccgtaaatgcaaaagtttccgggcaaattcacgatgaaacaataagaagtgcaaaacacctagacgaaggttttacgacactgaaaacacctcttgaaaaaatcaatttaaccactcttgacaagatgtatgataaagaaagaaacattgatttatacaatataataaaaactagactagaacagtttaataacgaccctaaaaaagcgtttgaagaacctttatatatgaaactttcaaaagaaaaagaggaaaaaggtcaaaacgcaccacaaataaagagcattaaaataaaagatactagtgtagcaggaataaagattcgtaacggattagcatggaatgcagcaattataagggttgatttatttacaaaagaaaatagaagtggtaaaaaagaatatttctttgtcccaatttatatttcagatatgggaaaagaattaccaaataaagcaatttcaaaaagtaaaaacggttggattgaaatggatgccaattataatttttgttttagtatttattcaaacacactactttctataaatatgacaggaaaccccgaagatgaaaatttttggtatttcagaagtatcgatagaagtgatagcagattaactttagattcacacgacagaagcataaaagaaaaaaggatttcacctaaaaacgctttttcaataaaaaaatatcagatagatgttttaggtgaatatcatgaagtaaaacgtgaaaaaagacaacatctaaaaggggctaaatatgggatataaaactcttttatttagccaaccttgtcaattatcagtaaaaaactttcaattagtttataaccctgaaaattctaatgaagatataaaaattccacttgaagatatctcaacaataattcttgaacatttgcaaatcaaattgtcaaattatttattgtctatatgtggagaatacaatattacaatattttcttgtgataaataccatcaaccaaatacaattttaacaccattttctcaacatagtagaacaacccaaatagtaaaaaatcaaataaatatgtcagaaccattcaaaaaaaggttatggcaaaaaattgttcaacaaaaaattactaatcagtcaaatgttttaaaaattttatttaacaatgaagaattagaccgatatatagaaaaagttcaatctggagataaaacaaacatagaaggacaaacatcaaaaaaatattggagtatattatttaaaaattttaaaagacattcagaaacaaaacaaaactatgctcttaattatggttatgcagtattaagaggaacacttgcaaaatatattgcatcaagtggacttattccaagcattggcgttcatcattgtagcgaattaaattcttttaacctagcagatgatttaattgaaagttttagaccatttattgatttaatggttgcagaaatgaaaataaatgaaaaagatacaacaactttaacaaaagcagataaagcatatttattaacaattttgcataaacaatgtcaatataaaaatgaacaaattacagttcaaaacgcatgtgaatatacttgccaaaattttgtaaaaagtttagttcaaaaagatagtaatatattagatttacctcaatttataggagagaaatgagtataaaaggcgatgatatatttatgagattatttgttttctttgatttaccagtttataaaaaagaacaaagaaaaatagcaacaagatttagaaaaaccttgctaaaagaaggttttacgatgttgcaattttctgtatattgtagatgttgtagaggacaagatatagtaaatagagaaataagacggctaaaacaaattattccaccagaaggaaatgttagagtattacaagtaacagacaaacaatatggaaacatgcagttattaattggcatgcctaaaaaagaagaaattattggagcagaccaactacttttgttttaaatttttatcaaataaaaatatcaaaacccttatgtttattaaacttggagttttgatattatacaataaattctttcgaaaggaaactataaccatgacagtattagatataattgaacaaaattatacaataaattctttcgaaaggaaactataacaacgaggtctttgattatgatattgcaacaattatacaataaattctttcgaaaggaaactataactattcgttgttgtctataacatattgcttgattatacaataaattctttcgaaaggaaactataacttgcttgcattgattgaaaaatactacaaaattatacaataaattctttcgaaaggaaactataacacacttgtggtacttgcaatcggcacacttattatacaataaattctttcgaaaggaaactataacgcgatagtaaagtcgttgacaaaaacggcattatacaataaattctttcgaaaggaaactataactgtgtttgtgtttcttctctttgaattgttattatacaataaattctttcgaaagaaaactataactatatgaaatataacacatgtcattatttttttattttagaagaattaaaaaatttttttctaccaaatttatgagaagttttctgacctgattttcaaaatggactttttgtactcatttgtatattttgctaaagtttagtagacatagtgaaagtagcataaataattcaatattcagaaaattttttcatttttatagtcacccaaaagtccattttcgtccagtttgagatcatataatcatatcacttccgacccgtacaaccttttattattaggcttttctacctaactcctctttaaaaatcaaaattcaaaagtgactattaaaccgcattgtaaaaaaataaatttgcaccttttttgcaacttttgccgatttttgcactaaaaaagggttaagctaattagctaaaaccctttaaaataagtggttgcgggggctggatttgaaccaacgacctccgggttatgagcccgacgagctaccaggctgctctaccccgcgttacctgatacacttattctactccataattttatttttgcaagttttttgttgcatttgttaagtttcagcctaaactcattattacatcagctgattgggtatcttttatttttgttttatttataatttaattattacaaaaggagttttttatgaatattttaatatctaacgatgatggaatttacgcaaatggtatcaaagctctttgcgaggctctatcatcatcttatgatgtatatttaatcgcacctaatcaagaacgctctgccgctggacattcaataacgcttaattcaccattaagagtcgaagaagttggctcgctttacgggaccaagcactcatgggctgtgtcaggaactcctggcgactgtgttaaaattggcgttaatgcgattttatcaagggaagaacaacccgacatcattatatctggtattaatcatggtccaaatcttgggcacgatattatctattctggaacagttagttgtgccatagaaggtgcaatgatgaatattccaagtattgccgtatcattaaattcttacaagcctgaatttgaagattttactttcgctgcaactttcgtaaaaagtcttattccaaaattaaaagacttcaagtttccagaaaaatcaatccttaacataaatgttccaggtattcctcaagacgaaattaacggaattgttgttactgaaatgggcggaagaatgttcactgacaattatgaaaagcgcatcgaccctcgtggaaaaacctactattggatggcaggcaaactttcaacagaaaaagaaaatgaaaattctgacatatacgcaattcgccaaaataaaatttcaatctcacctttaacatttaatcttacaagaaaagatgttctggaagatttaaactcagttctttgcaaagacaacctttgtaattggttctaaagatttgcaaaattaagtggcgggattttctaacgaaaatcccgccactttcacaatatattcaactataaattagtcttcatattttttgaagattaatgttgcatcgtgtccaccaaaaccgaaagagttagatgaaacatatttcaaatcagcctttacagctttgtttggaacatagttcaaatctgcaacttctgggtcttgattttcaagattgattgttggaggaacaataccatcgttcatagctttaatacatgcaatagcttcgacagcacctgctgcacctaataagtgaccatgcatactctttgtagagcttaccatcaagtgtttatttttagattgatcaccataaactgttgcgatagctaatgattcaccaatatcaccaacatgtgtgcttgtaccgtgagcattgatataatcaacttcctctggcttaatgcctgcatctcttagtgcaaattccatagcttttgctgctgccgcacctgttggatctggagctaccatatcgtatgcatcacaagtttgtccataaccaacgatttcagctaaaattttagcaccacgttttttagcatgttctaattcttcaacaactaaaacaccagcgccttcactcataatgaaaccgtctctatctacatcataaggtcttgatgcttttgtaggttcatcattgcgttttgaaagtgttctagcagatgagaaaccgccaacacccatattacatacagttgcctctgaaccgcctgtaacgattacatcagcttctccgtattggatagttctaaaagcatcaccaattgcgtggttagaagatgcacaagctgaaacaatagctttgtttacaccttttaaaccgaatttaatagctattttaccagcaaccatatttacaatcattgcaggaactgtaaatggcgaacattttgtgtaatcaccacgttttaacattactaaatgattttcttcaattgtgctataaccaccagctgcagatgaaactaaacaaccacatctgtaaggatcttcttttgaaatatctaagccagattgttccatagcttctgttgcagcagtaacaccaaattttacaaatctgtctaaacgcttaacttctttaggatctaaaaatttagattcatcatattctggaacaataccatatatgtatgttgattgtttttctctgtcaattctgctttctggagcaagagaaataccgcttacgccatttttaatattttcccaaaaattatctgcgcctaaaccataaggtgtaactgcaccgatacctgttataactactcgtcttttttccataatttatacctcatatttacataaaacaaaataaaagagggctaatcataagaaaatgaccgaccctctttttcttaaactttattcattctagtaaattaagaatgagcttcaatgtagtttactgcatcttgaactgtttgaattttttcagcttcttcatcaggaatttcgcaaccgaattcttcttcaaaagccataactaattcaactgtgtctaaagagtcagcacctaagtcgcctgtaaagctagcttctggagttactaagctttcatcaacacttaattggtctacaactactttttttactttttctaatgtactcattgttttttcctcattttttattgtaacatctattactttctataactatattatattaagtaaatatttttttgcaaatttttaacatttttttgttaagttgcaattattgctagattgtaagtccgccgtctacttgtaatacttgacctgtaacgtaagtagcatcaacagctaagaattttactgctccagcaatatcatcagcatcgcctaagcgtttcaaaggaatatgttctgagatttgagcagaatccaagctctttgtcatgtcggtttgaacaaatcctggagctactgcgtttactctaatatttcttgaagctaattcttttgctaatgattttgtaaagccgattaaaccagcttttgctgctgcatagttagcttgaccagcatttccgtatatacctacgatactagccatattaacgattgcacctgaacgttgtttcatcatcacttttataacaggttgagttacgttgaatgcgcctgttaagtttgtattgataactgcgtcccaattttctttgctcattctcatgaacaaaccgtctcttgtaataccagcattgtttacaagaacgtcaattctgccgtatttttcaataattttagcaactgcttcttgagcttcgtcatggtttgaaatgtcaaacttaactgcttcggctttaacgcctaatgcttcaagttctgaaactgttttatttgcagcttcttcgttacctgcgtaattgattacgacattgtaaccagcttgagctagatgtaaagcacatgccttaccaatacctctagaaccgcctgttacaagtgctaagttttcactcataatctatacctcatttaagttttgaatcgttgcttctaacgattctttgtcataaacattgtatgttttaacttctggattaattttcttattaagtcctgctaaaactgtgccattaccaaattcaatgaatgtatcaacaccagcttcaatcattttttcaatagattgacaccaatgaactgatgaataaatttgttttggcattttttctttaaagtttgatgttgtaaattcagcatctacgtttgtgactactggaatttttgtatctttaacttcaatgtcttttacgaattcagcaaatttttcgcctgcatctttcatgaattgagagtgaaaagcgcctgaaaccgctaatggtacaactctttttacacccttttctgttaaaagttcgcaagttttctttactgcttcgtcatcacctgtaattacaatttgtgccggtgaattgtagtttgcaatatcaacataaccgtcaactgcgtccatacattctctgattaatgcttcgtcagctttcaaaacagctgccatagaaccgccttttgtagcgcccattaattccgcacgtttttggattaattttaaagcattttctaatgagatagcgcctgctgcgtaatatgcaacatattcacctaagctgtgaccagctgtaaacgcaggtttaatatcacattttgatttaaatgcttctagtgctgcaattgatgttgtcaaaattgctggttgtgtgttaattgtttgttttaattcttcttcaggaccttcaaaacagattttagatatacttctacctaaaacttcatctgctttttcataaactttttttccaacttcataattttcaaaaaggtcatgccccattccaaccacttgagagccttgccctggaaataaaaatgctacttttttcaattagcctccaattaattcagtaattttcttatttaatcctgtttctacggcttctttagcaactcttactgcattttttattgcgtaagccttacttctgccatgagaaataacagtaataccttttacaccaagaagtaatgaaccaccatattcctcgtaattaattcttgggtaaatctttttcaagaacgcttttgccattagcccaactgcacatccaaaaagagatgaggcaaattgttctttaattaatctaaataataaagatgcaacaccttctgtaacttttaatgtaacatttccgacgaaaccgtctgaaacaacaacatcacaagtatctaaaagaagtttgttaccttcaatatttccaacaaaattaaatttatctttattagcttctaaaagtttgtaagtttcttgagctaaagtgttacctttagtttcttctgaaccaatgtttaaaacacctacacgaggttctttaatgccaagaagttgtttagaatataaagaacccatgattgcgaattgatacaacatttctggagtacactcgctatttgcaccaccgtcgataacaacgattggtttctttaaagatggtaaagttgcagcgattgcaggtcttgtgataccgtgaattctgccaagtccgaataaacttgcagccatcgcagcacctgtagaacctgctgcaaccaacgcatctgaactaccgtcagcaacagcttttacgcttaatacgattgaagattttttcttctttctaattgcttgtcctggatgttcacccatttcaataacttcatctgcgtgtgtaatttttatatctaactttgaaatatcgacattaatgcgtttttttgcaccacgatgtccgcaatcagataaaaatccttcattcttgattttatctaattcacgttcaatatcctcttgtttaccaacaagctcgattggtacattatattcataagcagcccaaaccgcacccgcaactatttcgtgtggagcatggtctccgcccattgcatcaatagctattcttgtcatttttcctctgtaagtttaaaaactattcttcagttttttcttctttaacttcttctgcttttgtttcttcaacttttgcttcttctacaggagcttctgcttttttagttgttttctttgctgtagcttttttagcaggttttttagcttctgttgcttctacgtaatctgcagatttaatgctaactgcttttcctttgtagtaaccacattctgtacatacagtgtgtgctaatactgttgcgccacagtgtgaacattttgttgttgcaggtttaattgctttccaatttgcacgtcttgttgcttgttttcttgcgcctgttcttttctttggtactgccatttttctctatacctttctattttctacttatctagttttatatgtttaaaaacttccattctcggatcttcttccacaaattcttcatctgtttgaaaaacccctttattacaatttataccacaaacttttttatttggtatatttaatattacagattgatacaataaatcataaatatctatttcattttcaccttctaaatctgtaacaaactgtccgtctttgatttcggtttcttgtccgtattcttcttgtagcgtgttttttgcaaacatttcatctatattttcatctaatttatattcaaattctttcaaacataaatcacattctaaagttaagtttgccttaacatttcctgtaatttctataaaatcccctaaagattttatttttaaatgagcttttacaggttcttttgatggaatatcttcaataacttcatcaaaatcaacttctagacacttatttggtgcattttcaatatcatctattaaaatcttattggtattgctcatcttgtagtgccaatcctctaatttgatttgaaattacgcataatcttttaacaggtccgttagcttgtttgtcaactaaaacaggtgttgctgatttcatagcttgttttaattcctcaaacgcaccttgcggattatcaaagtataatacaacagggttaatagtttcttttaaaaacacataaacacctgttctgatttttaattgttgttgataaggttgtgccatttttactccttataaataataattaatatgagataggcgctagaaagcgatagctttctagcgccttaacattacattgttttcattgtgttagcaataatttcgttaaagctatctgcttttaatgaagcaccaccaactaaagctccatcaatgtctgattgacgcatttgttcttcaattgtatttggttttacagaaccaccataaagaattctgatagcatctgcagcttctgcacctgcaacttctttaactacgtttctaatcattgcaataactctgtttgcttctgctgaatcacaagttttgccagtaccgatagcccaaattggttcgtatgcgataactgattttgctacatcttcagaagaaataccttctaaagcagctttaatttgacctgcaatgtgagagtctgtaacgccagcttctctttgttctaaagtttcaccacagcaaataataggtaacaagccacctgctaggattgcttttgcctttttgttaatcatttcatctgtttctgagaagtattgtcttctttcagagtgaccaatgattacgtaatcacaacctgcatcttttgccatttctactgaaatttcaccagtgtaagcacctgattgttcccagtgacagttttggcaagcgatagaaattttattatcgccacaaccgcaatcacattttacagcttctactgctgctaaagaggtgaatacaggagcaattacaactgtaggtaattgtggtgcattataatctttaacgaagtttttaacaccttcgaatacttcttttgcttgtgcttgtaaaaggttcattttccagttaccagcaataataggttttcttgacattttttatctcctcattttgtatcctatacaagttaatcttaaaataaacatatcttgtaatcaagttttatgataatatttgcttatgctaaaaaaatacgacaagtttattaaagattttcaacaaaaaattgataaatattttgaagaaaattctgagtatatttattgccatgaaggttgttctgcctgttgcgaaattggcgaatatcctttttcttggattgaaatgggatatcttatggaagcctttgttgagttgccagaaaacattaagcaacaaattaaaatcaatataaaagaattaaaacaacaaaaacaaaattttaaaggaga

SEQ ID NO: 2728 - DNA, 23081 bp, synthetic construct
  misc_feature 1..23081: note = Synthetic
  source 1..23081: mol_type = other DNA
tgcataaaatcatttgtaataatgcccctgttaacatttagccctgcattttttgcaagttcaatctccggttttactccgattgctaaaattataaggtcataaggaatttttttgcctgaattaagttcaatttcattttcaaaaaatgccttaacgccatcagataaaattaattcaacaccgttttgcctcatttcattttgggcaaatgcagcaacttcaaaatcaacaggcgctaaaatttggctttgcatttcaacaaggcttgttttcagccccattaaattaaggttttccgccatttcaacgccgataaagccgccgcctataacaactgctttttgggcattattattttttatataatcttttattttgtcaatgtcatctaagtttctaaccgtaaaaacatttttattgttaattccgtttattggcggtttaatagggtttgcgccttgagataaaactaatttatcataataaattttttcaccatcttttgttaaaacaaatttttcacttctgtttatttgggtaacttccgtatttaacctaacatcaatattgaacattgctttgaagcgaagaggcgttgaaacaagaattttttctctttcttttataacgcctgaacaataataaggaagcccgcaatttgcaattgaaacttcacctgttttttctaaaattaaaatttctatattttcatctaatcttcttaatcttgttgcgcaacttgcgcctgctgcgccaccgcctattataacaactttcattttttcctcataaaatatttcatatattcgcatattagcatattcatattatcaaaaattttttaaactgtcaattccaatttgacaatattcgcatattgtaatattcttataatatgaaaaccgacattgatattgatgaatatacagctatttttaaagcattagcgcaccccacaaggcttaccattgcatataatttaatgaaaaaacctgaatgcaatgtaaataggatgagtgaatgtttaaatattccgcagccaacggtttcacagcatctttcaattttaaaaaatgcaaaagttattcaaggtgtaagaaacggcaatcaaatttgctataaagtggataataaaaaagttatagatattttatcgcaattagaaaaaaaataagaaagctgccgatattaatttgatttagaaactgaaaataaaaatttaaaatagcaaattttgctttttttgttttttatatttcttgttcttttttaaaaataaaattacaggaattattaaaatgagagtattagcaataaataataacattttaaattttagcggtttatatgttaaaaataaaaatccaaatgcgccgataaaagaaaattcacccaaaaatatagaattgagagcaaaccctgcagatatttttattgcttataaaacaaaaaccccaagtgaagttaaaacatcaattaaagattttttagctgcaaatgaaagaggggttgattttcatataaatatgttatcttcaattcaagcgggctttgaagctgcacataaaacaaccggtgaaatttattcaaacgatgattatataaaaactttaattgaacaattcagccccaaaaatgtaataagcttttttgaacaaggcagtgaatttgatttagacggcaatttaaaaaagaaaattaccaaaaataaagacggttcaattcaaatagattatttttcacctgatggaaaaattgaaagaacaacaaaaacagatagaagaggtgaatggcttgaagttgttgaagggcttgaaacagaaaaagacggcacacaaaaaattcaaaaaaaatacctctttaatttatatgaaaacaggcttgaatcttatgaagaaggaattgaaatttcccctttgggagatgttaaaattcaaaaagaagttaattctaaaggtgttttttcaaaatcgggaatttattttacagtagatgaaggggttgaaatttcaaaagacggaacaaaaacaaccgcaaaaagcctttactataaaacaaaagaaagaaaagatgaaaacggaattttaattccttcagatataacttttgtttataaagaagggcttgttcaaaaaacggatggcagtgaagaagcggcaaaaagccttgtttataaatccataaattcaaaagtttttggaaattacaaagaaggcgaaaaggcttttcaaaacggcacttttacaattcaaaaagaagcatcgtttaatgatgattataattttgaattttataaagaaggaattgaaaaattaccaaacggcacagaaacaacctcaaggcaaattacatataaaaatggaacccctgaaacctatgcaatcggtgctgaatttttccctgatgggagtgaaaagcaaaaatgcgccctttcatttattttaggtgaaattgtctattttgaagattgcacaaaaaatggtgaaggaaaaattcaagctgcagcaaaaattttgcaaaatacaaaacaaggctggaaaaatgtttctgacgttttaatttaagcttcttttatatcttcattaaaatttgcccttaaagtttgaaggttttcatagtaatcttcaccatcaaggtcaaagcttgcaatgtcacggcataaactgctatattctgcagccgttaattcttcccttaaaattgaattaatttcttcccatttttctttggtgtgggcggttgcaaaatcttcagccaaatcgaaagccgaaaccccgaatttttctttataaattctatctgcaattgtgtttggctcatctttatttaggccgtagtgtgagattgcagatgttccttcatacatatcttcataatttttttcaataaaccatttataaaaggggtttattttatctataaactgtgaaaaataagaatattcgcccgtttttaattgattttttttatcaacattcgggttttcaatgtcttcattccaaatttcatcttggtttaaattaacaaaatttgtgtgggaataaaaatcttgaatattatgaacaagccttcctaaatcataaaaagcttgttcataatattcatctgcatctttatcatctgcctttgcagcttgaataaaatcatctacaacaacatcttgcgctttttctaaaaattcatcgcaattttgaagggttgttttattgaaatgctgtgcgcttaggttgtagccatctgttatatttggaattttgcttcttaatttgtctgaatcaaggttgccttgttcaatataatttatggcactgttattaaagcttgaacttaaagcttccgttgttatttggctgtggtatttgccaatcaaattaattgctcccttaatccttatactttttaaaaacaatttttttctaaaaattgcctaaaaattaattaaggaattatttaagggcgcaatttatttatttgcccaatcggcttcccattcaattaacctttgttttaattcggggttttcaatgccatcaatgccttcttcatcataaattttcattatttctttggcatctgaaagcgcttgtttccattcattggtgcctgaaatatcccaacaggttttatggtatgaaagcattgttatttcatcgctttttgaaaggtttaagcctataattctttcttttgcttcttcaagggtgattccccctgccaatagttgttcgtttatttcttttaattctgcattttttgctataatttcttgaactttttggtttgaatgttctcttttaacttgttttgtttgggggcaaagaacccaggcaattgtgtttcttaaagaaagctttcttttgtgttcaagttttctttcttttatttcgagcctttttgcgctttcagcttttttacgttcaatttcaatttgtctaagttcttcttttatgctttcttttctttctgttgctgttggcgcatcacttttcataaaagcttccattgcttctatgtttctttttgtatatatttcttttgcactaattattcctgatagccaattttggaaattttcatcttgaatacttttgaaaaatgcaaggtttttttcatctgccaaatctatgcaatagtcttcaggatatgtaagacgatatgggttttctgttattatatttaacttatcttgaaccactgcttctctgaatacatctttgttttcgcccaatttcttttgcagtgcctttaagcttataattgacgggttgttgtgtcttgaagttaacaatgtatccatgatgtatggcttattgatgtcataagaatcattatttaagataaattgtttaatttcataagaatttattctaagcccgcagtttgccattaaatctgcttttgtgccatagcccagtttttctaaatcacttgcagggaaagagaaagttgaagtttgatctgataggcgaatagaattttttaaacaagctctttcaaaatcgtttgcaggaaccatagaggctcttgcttttgctatttctctttgcttgcctgttttttcaagttttaaaagcccttctttatttctttcatcagttatatcaaaaagaaaatctttagctcgtgcaaagcggtcgcaatgagtattttctaagccgtaaccttttaaagttccgccttgaagtgcatggtcaacagaaactttactaacgccgtatttttcttgaagttcttctgatgttaaaatttcatctctgcgctccattatggaatctaaaaaggccttgttttccccttcgattgtattgaaataaacattattgcgtgtttttattgagggttctaaaacgccattttgtgcatagttcaatattgcatcttcaggaattccttcgtataattcggcaatatgtttgggtgaaatgtattcttcaaaaaagctttcttcgtttgttcttttgccaagtgcaacataaccgccaatttccataccgccttgtaattttggaacaacagaatcggggtaatatagagagcctgttattttttgaatatttttaagaatttcttttttatctgcccctacttcgtcaaatcctatgcttgttttgttttcgcctatacggagtggaaaagaaaatgcaaaatcgccgtttatctctattttgtcatctttgtttttgcttgcgcaaatacccattaaattaagtgcacctaaggtatcttgattattgagcgcggtttgaatttcttctttttgttcaataaaacttgggtgttgccttaaaaatttgcctttaagtttttctgtttcactgtggtagccaaaatctttgtctgtgtatctatagttttgagcttctatatagtgatttgggctaaaatcttctaaaaattttgcactgccttcaatattagaaacgtttcttaaaaggctattttcatcaacttcataatcgtttatagaaattgttttgtttccatattttaaaagagtggagtcataatctcctttaattgttattttgccatcttcatttgtttctgtttcatagcctaaaatgccaagggcttttttgtcgtcgccttcatcaagtgctttttttgcttcttccattcttttggcaacaattttttctaattttttccccaatttttcaggatatactgttgaagggtttattttaaaatcatcatccggaacaaaagaaggcgaaaggtgtttttctcctgtaatttgttcaacatttctaagcagatcatcttggcttatgcctacatcttcataagaaatgggttcttgaagttgcccttttacataaatcttgaaatatggcttaaaatcgccatttattgttattttgtctgtttcaaaatcggaatcaacattgtagcctaatgtttcaaaggctgttacatcatcttcttcttgtaaggattcgtttacactgtttgcaatatttttataatattcaacggcatctttttttgtttgaaatgaatcttttaattttccgctaaaacttacagaatcattgtttggttgattatttagccttaacccgaaaaaagaagcgttgtttaattgtgcagtattatttatgccaaaaaattttaatggggatatattcatacaaaatcttccttattgttatgaaataataaagttttttgaataaaaaaaattgccctttagtttgtttgtttttcttttcttttttctattctttttagttgttcttgtcttttttcttccgttagcttgcattctttaagaagttttttataatattcttctctttctttggggtttgatattttttctgcttcaattaaacccttttcaaatttttgttttctttcataccagccttgatttttcaattttgttgtagcatgacaaatcataggaattccaattggcgctgttattaataaatctgttagaaaaattcctgtggataattctgcaatatgttttccccttttaggaaaaggccttgggttttgatatttatatggaacgtattcttcccaaacaggcggttttggcatttcattttcaattgcagctgcaaatggtgcaaaaaaattgagtgcaaaacaaaaaacaagaaaacaattaatagttttcattataaaaacctttttacttacttaccttttttaattatcttttaaaaaaggcgtataaaaaaggttttttatttaaaaatttacaattttatttggcttcttttaaagctttaagcgccatgattgcgtttggaaagcctgtatatggcattgattgcacaatgacagcagctattgtttctttattgtttccaacttttatgttgcctttaatgtgtgcctttagagtttctttgtttcctgttgcggttaaaattgcaattgttaaaagctctcttgttttaatgtctaaaccacctcttgtgtaaaaatcgccaaagcaaacttctgttaaaaagcggctgacatcatcccctacattatttggaagattttttaagctttgtttaatttcatcaccatatagggggttttgaatttcaaagcctttttcatatctttcattgtctttaaccgttgttgtatcttctaaaggcagttttatacctcttttttcaaaaacttcattcattgtattaattgcatttaaactttttggaaacccgacaaaaggcgctaattggtacattgcttctcttatttcaattggggtaacaccaacatttaaggcagcgtttatgtgggcgtttaattgtggcagagtttgcatagttcctaaaactgttattgtaacaagttctcttgtttttatatcaagttcgcctattgtaaaaacttcgccaaaaatatatttttgcaaaattgccataaattcagggtctgtgccatttttacccaaagggtctaataaaaataatttgttaaagttttctttgcaaatttcttcttttgtcattttatttccttcgctttcatttgcattgcaggtggtgcaaaaaagaaaaagtattaataatattttaaaaaatttatttatattcattgtcagacaccttatcaagccaagttgtcacattgtttggaatgtttgtttcaatcgaaatgtgggcaaattcggaatttggagcagcgccgtgccagtgttccacatttggcggaattttaacaacatcgcccttttttaattcttgaatttctttatttctttcttgatatcttccaacacccatagttacaagcagaatttggccgcctgaatgcttatgccaattggttctcgcgcctttttcaaaggtaacgtttccaattgaagaattaaaaacatcgtcttttttaacaagcatattaaggtgtgtttcacctgtgaaaaattcgctgtatgggttaatttccccttttttaaaaggctggttgttagtttctgccattttatatatgccccctataattaaaactataattataattggaattataaaaattttattcatttcttacccttttaaatttgttttgaaaaattcttcaagttttttaaacggaattttttctaaattgtcgtataaatctgtgtggtttgcatcttttacaattaaaagctctttgttttcaccttttaattttttaaatgcatcttcgccaaaatatctgctatgggctttttcgccgtggataattaaaacgggtgttctaatttcaccggcgtatgctaaaattggcgaattaattaaagataatgttgaagttaaattccagttgccatttgaattaattgaccttttatgaaagcccctttttgttttgtagtaattataataatcttttacaaattgcggttcatcgcccgttaatttttcaggcagcccgattgctttttcatattttcccattttaaaatcttttgttctttgcctgtttaggctttcttttaattcatatcttttgttttcatccagtgaatcaaaatagcctttggcgctgactcttgtcatatcatacattgtgattgctacggttgcttttattcttgtatcaatggaagctgcgttaattccaaaaccgccaaaaccgcaaatgccgattatgcctattttatttgggtcaacatttttgtaattcgataaaaaatcaactgcggcgctaaaatcttctgtgtttatatcgggcgatgcaacatttcttggttttccgccgctctcccctgtatatgaagggtcaaaagcaagggttataaagcctttttctgccattgtttgagcatatagccctgaggattgttctttaactgcgccaaatggccctgaaattgcaattgcaggaagtttttcatctttttttaagttttttggtaaatacaaatcaccgcttaatttaattccaaacctgtttttaaattcaactttttgaacatcaacaagttcgctttttttaaaaactttgtcccaaacaatttcttttgccatggtgcttaaatctcctgtttttaagaaaaataaacatattgtaaaaaatataaaaagcttttttagcataaataaaatttccctttttaaaatatatttttattattaaccatttttttaaaatagcaaatacttataataaataataaataatgcctataaggcataataaaattaaaaaattcttatggtaaaatttttatatgataggaacaatagtaaatacaatttcaattataacgggcactgctataggttctataaccaaaaaaggaataaaagaagaataccaaaatgcgctttttaatgcaattgggctttgtgctttttgccttggggttgcaactttttcatcttcccttccaaacagcaaataccctgttttatttatagtttcaatggcaataggcacaattataggcacatttttagatttagacggcaaatttaataaaatgacatctaaaatggggggttctgatttttcaaaaggcttatctgctgctattatgcttttttgtataggttctctttcaattttagggcccgttcaaagcgcactatacgggaacaacacctttttatttacaaatgctgcgcttgattttgtaacatcaattattttatcttgcgcatatggccttggcattatgtgggctgctcttgttctttttgtttggcaaggttcaatttatgctataagtttatttttgggtgaatacatttcacaaaacttttttaatgaactttcaattgttgggggcattttaattttaagttcaggtattggcattttaaaaataaaagaaatgaaaaccgttaatatgcttccatctctttttatagttccaattctttggtttttggttcatattgtgaaataaacaataaaaaagatgaccgacaaaagccggtcattactttacgcaaaactgcttattatagcaacgtttcgaaagtatttattgtataataataaaataatatgactaattttgtattttgtaaaggggctatgtatgaaatatattttgggattggatataggaatagcatcagttggtttcgcagttgtggaacaagatgataatagagagtttactggaatttctgatgcaggagttagggtttttcgtgctgccgagcagccaaaaacaggagcttctttggcattacccagaagagaaaaaagaggctcaagaagaagattgcagagaagggtgtcaagattatatcgcctgaaacagctttttgtacaaaacggcattataaccgaacaaaatatagaagaattatatataggtggcaagaaaacaatagatgtttggaatttaagaaaagatgcccttgaaagaaaattaactggcgaagaattttatcgttgtttgatgcatattgcaaaaagaagaggatttaaatcaataagaaaatcagaagaagcaaagaatagtggagccttattaaaagcaatagaggaaaattcagtaaaatttaatcaaggaaaatacagaacaatcggcgaaatgtatgccacactatatgcggacgatattccaaaacgtaataaaagagatagttataaaaattcaattccaagaaatctcttatatgatgaagttggtataatttttgaaaatcagagaaagcttggttttgataaagctacaactgaattggaagatgcgtataaaaatatagctttttatcaaaggccgttaagttcatttgaagacaaaataggaaattgtatatttgaaaaaaatgaaaagagagcaccaaaatattcttattctgccgaattgtttacagccgcaactaggattgtaaatacaaccatagttgatgaaatgggcaattctcgcttttttaaagaaagcgaaatactaaaattaaaagatttggcacatattaattctaaagtaacgtatgctcaagcaaaaaaatgtctaaatttaagccaaaccgatagatttaattccttaaattataataaaaaagataaaaagacaggtgaattaattaatcctgaaacctctgtgtttgttgaattaaagggttatcatgctattagaaaagtaattgaaaaaaatcttggaaaagaatactttaattcaattcaatacgacaaagatctttttaataaaattgcttttgttttaacttgcgaaaaaagcgatgaaaacattgttaagaaaatggaagaattaaatattccaaatgaaataatccgctgtgttcaagatttatcaatgagcaaagttattcacttatcaataaaggcaatagaaaaaattctgccttttatgttaaccggcatgaaatataatgaagcttgctttgaagcaggatataatcactccgttttaaatgcaagcaaaaacaaatgttgtttgctccctgtgcttcaacctaatgagatgacaacaaaccctgttgtaaatcgtgcaatatctcaaacaagaaaagtaattaatacattaattaaaaagtatggcgcattcgacactattatagttgagatggcaagagatttgtcaaaatccgtaaatgaaagaagagaaattgaaaaggcgcaggaagaattccaagcgcaaaaagaacttgctagaaaaaggtgtatagaaaacggcattgaccccgatgtgcccaaaagtaatttgctaaaattcaggctttgggaagaacagaacggctattgtatgtattctgggaaatacataccaccttcaaaattaaaagaaccaaatagtgtacaaatagaccatattattccgttttcaaaaagctttgatgatagcttgaacaataaggtgttatgcctaactgacgaaaaccagcgaaaaggtaataagataccgtatgaacatataggcgaatctaactggcatgaatttgtaaacagaattaaaatgtataatttaaaaacagcaaaagttaatcgtcttacaagaaaaagctatcctaaagaagacgaggcttttaaatccagaaatttaaatgatacaagatatatggcaaaatttataaaagattatattaaagaaaatttagattttgataataatttaaaggttgaaaccagaaacggtgcaattactgcatttttaagaacaaattggggtcttgttaaaaacaggcaaaaaaatgacaagcaccatgcgcaagatgctgtcattattgcttgtactacacaaaaaatggtgcagaaaatttcagcaacggcagcgcaaattgaaaaaaatgaatatgtgaacaacaaaaaacccaaatataaaaaaccatgggaaacatttaatgaagatattgaaaaaacaatctcaaatatttttgtttcaagggccataagagcaaaaatatctggagaaatacatgaagaaacaatacgaagtgcaaaacatttggctgagggttatacaactttaaaaactcctataaaaaaaataaatttgtcaatcttagaaaatatgtttgataaagaaagaaatattaaaatatatgaaatattaaaagaaaggttgttggaatttgataatgaccctaaaaaggcttttgaaattcctatatatatgccactgagtgaggaaaaagttaaattggggcaaaggccacatgaaataaaaagcattaaaattaaagataatggcatatcgggcattaaagttaacaatggtttcgcaagcaattcttctattgcaaggcttgatgtttttaaaaaagaaaacaaaaaaggtaaaaacgaatatttctttgttcctgtttatgtttccgattttggcaatgatttaccaaataaaattttccctgttacaaaaacatcgggcaatattgatgaaacttatgaattttgtttttctttgtatcaagattgcctaatatcggttaacatgtcaggtaataaaagcgatgaaaaatattggtattatagaggttttgatattagtaccggtactattactgttgatagcaatgatagagaaatcgaaaaacaaagaatatctgtgaaaaaagctgcgttaataaaaaaatatcaagtaggaattttgggcgatatccatgaaataaaaaaagaaaagcggcaaagtataaaaaggaaaaaataatgggctataagacagttcttttttcaaatccttgtagtttgtttgttaaaaatcgcaagcttgtatatactcaacctgattctttggaaaaaatatctgtaccgctagaagatatttctaccatagttatagatagtcaacaaataaatcttaccagctattttatatcctgttgtgcagagtataatatttgcgtttttacttgcaacaaaagtcatattccaaatggaatatttactccattttatcaacatagcagaaacacaaaaatagtattaaaccaaataaatgttaaagaaagttttaaaaacagagcgtggcaaaaaataatcaaacaaaaaattaagaatcagtcagacgttataagaattttatatgatagagatgagcttgatttttatattggaaaagttcaatccggcgacaagactaatattgaagggcaaacatcaaaaatctactggaatgttttatttgataattttaagcgtcatagaaatgacaaaattaatacccttttaaattggggatatgcaattataagaggaaccatatccaaaaatattgcatcaagtggcttgattccatgtttgggagttaagcattgtaatgagttaaatgcatttaatcttacggaagatttaatagaaccctttaggccttttgttgatttaacggttgcaagaatgcaaataaccgatgatgaaagcctaacaaaagacgataaagcacaattgctttatattttacataagcaatgtaattttaaaaatgaacaagtgcctatacaaacagcatgtgaaaaagtgtgcaagagttttgttcgttcgattgaaaaatcaaatcataatttgttagagctaccgtgcttaattggaggcaaatgagtgtaaaaggcgaggacatttttatgaggttatttgtattctttgatttgcctgttgctaccaaagagcaaagaaggtctgccactcgttttaggaatgaacttgtaaatgagggttttataatgcttcagttctctgtatattgcagagtgtgtagaggtcaagatattgttgatagagaaataaggagaattaaacaaatactcccaagtgaagggaatataagaattttgcaagtgacagacaggcaatatgccggcatgcaaatattaataggtactccaaaaatagaggaaattataggtgcaaaacagcttcttttattttaattttacaataaaaaaatgtcagacccccagagcctgacgctattttgaattttgacattatacaataaatactttcgaaaggaaactataacataagtgtgttaaccttgttataaccgataattatacaataaatactttcgaaaggaaactataaccattcttgaattacaatgaggacaatatctattatacaataaatactttcgaaaggaaactataacgtttagttgtgtggtgttattttaaggggtattatacaataaatactttcgaaaggaaactataacagtatatattttaatattttcaattttttcattatacaataaatactttcgaaaggaaactataacccttcggctgcatgcgatgattggattcaaattatacaataaatactttcgaaaggaaactataactgtttcacttataaggtctcttccgaatgaattatacaataaatactttcgaaaggaaactataacaagcccgaatatcgataaaaacatcgataaattatacaataaatactttcgaaaggaaactataactcatctgaaccgttttgttcatctgttgaaattatacaataaatactttcgaaaggaaactataactatattaataaacaattcacggcaaacgaattatacaataaatactttcgaaaggaaactataaccctggcgaaacatataacttaaaatccatattatacaataaatactttcgaaaggaaactataacatattaagcttgcactataaattgcttgcaattatacaataaatactttcgaaaggaaactataactaaataagctaatctatgagtcgaacgaaaattatacaataagtactttcgaaaggaaactataactcacgcctacaacgatattgctatgattgaattatacaataaatactttcgaaaggaaactataaccaaagtagccagacaattaagaaagtatttattatacaataaatactttcgaaaggaaactataacaggtggaagatgattaaagaaaaaatattaattatacaataaatactttcgaaaggaaactataactgaacttgcaagtgatttaatcagtggtaaattatacaataaatactttcgaaaggaaactataaccaacttcgcaatttcaacttctatattttgcattatacaataaatactttcgaaaggaaactataacacattgtgtaaaaaaatctcttggtttgcaattatacaataaatactttcgaaaggaaaccgttgcgttcttctttttaatgaactttcaattgttgggggtattttaattttaagttcaggtatcggcattttaaaaataaaagaaatgaaaaccgttaatatgcttccatctctttttatagttccaactctttggtttttggttcatattgtgaaataaaatcattaggcgattttatatcccaatttattccctgttttttcaaagcgcaaggaatgcctgcataaagggaatttttaaattccaaattttttgtaacaacacttcttgccgcaacaactgaattttcttctattttaaccccttttaaaataagagaatttgcaccaatccagcaatgtttttctataaaaatgttcttaccttggtttaatactttattatctgctatagaatatacagtatgaccatccattgttcttagctcgcagttttccccaaagatgcattcatctttaatttctattttcaaattgttttcgccataatttgagaacatgcaatttggcgaggctaaaaaatttttcccgataatgcatttggaattttttccgcctgaatttattgttaatttatttgccatatattttgaactttgaatctcaattgttgcattttcacccaaaataaaacggcactttctgaattttaaacaaggctcatgaattattacaattgcatttttacccgtaaactttattcttaaacccgaaataaaaaatactctttttttcttgccttctttggttactttatagattttattgtttttaaacattttataaattcttatatattattcacctatctgcaaggctctgtttgacattgtttttgcgattgccataacgccaaggcttgcatcatacgctctttgagctaaaacggcgtctgccatatcaaccattgggttaacgtttgacattcttacatacccttcttcatcagcatcagggtgccccgggcgataaattttttcaccttgcgtggggtcttcaaccgttcctgtaaaccttacgccgcctgagataaaaggaatggtgccaatgccaaaaacatcttctttcattgtgtttaaaagccctgcaaaagaaatatcttccgttgcgtttaaaacgggaatttttctgacataattcggtgtgtcaagattggcaatgttttttgccgcaatttgaattcttttagagtgaacgtttaaaccttgtctgcctacttcaaatgtatcaattatacccatattttacctctagcttccaacgttaattgccgttttcatttctgttattattgaagttaaatgttttgctgcaacgccatagagcattgaatttttttgcattattgcaagttcatccgttacggagagtgtttgctgttttgcttcaattacacctgatggccccaatttttggcttaatctggtttctaaggaaccgttcattgtatttagatattgggaaaattcaatatcttttcttacataatttggggtgtccatatttgcaatgttgcctgaaattgcttcttgtctgtttgcaattaaatcaagcattaattgcgatttttgtatagggtcttttggtaaatagctcatttattattcccttatatttattgctttttcatacatatcatcaacggctgtcataagcgttgtggatgcaagaagtgaagcattaactctcataacttggttaacgtggtcaaacaaatctacatttgacctttctactgaatattgtgcaattcttgaatggtcaacaacaagtttttcttcgcctgaaatttcggttttaatatatttattatcgccaacttcttttaagccttcagggttatcaaatgttacaacaggaattgttcctttatattcgggctcttttgataaatctttataggtgtaaacatcgccgtttttatcaatttttgttttaacaacatcgccgcctattttaatgcctgagcctacaatgtcgcccccttgtgtcattaaaatgccgtcttttccaaggcaaaaggcgccatctcttgtataataaatttcgcctgtaggtgatgttattggaataaacccggggccatcaagcgcaatatcaagttccctttttgtaacttgaattgaaccttgagagtggtctgttctaacaacgccatttgcatagccgttttcacctaaaatttcttcaaacctgcttgctttataagcatttgttgaccagtttgaaatattttcggaataaaaccccatgcgctcaaattgcgttagtgcattaactgtattccttcttattattccttgtaaattatatccgcttggcatctagattatgaacctcctaattgttgtatggcagttgacagtgattcattttgaagcctgaatagttgcctgtttgcatcaaaatttttcctgtatggaagcatttctaaaaattcttgcgccaaattaacgtttgaaaattcaaggcagctttgttttatgtttggctctaaaactgctctgccatctgctgaaacaacgccgattgtgtcaacaaaatccatttttcttgtttcagggttaaagataaaaagcttgccgtttttatcaattgttaaatggcgaagttcttccggcatgaaaggaagctgaatggcagaacccccttgagttaaaactttttggtcattcagccctaaaagctcgcctttttcatttaatttaaacctgccatcacgtgtaagttcaattgagccgtctttatttaaaagttgaaaataccccttatttgcaattgaaaggtctaaaggctgccctgtttcaacaattcttccgactttatcatcaacggcttctgacagtgcgtggatacctataacatctgcaaaagatgacacaacggcatcttttctttgatagcccactttatcaaaaccttgaacgtttttattcccaattgccataagctccatttgcatgtgcattgcgccaattgaatcatgcagcccgctttgaatatttgaaactgtaccttgaagaagcattttatctttcccttctaaataaagataacttcacaatatctttttcggctttaaaatttaggggtttaggttatttggaataatatcatccaaatgaatgagcctagttttcttcttcttcattaataataaaatttgaatagtcaacttctataataattttaattaagctgtgcgccatttgtacaagttttggggaaacaaagtttgatgatgttatttttacattttgtttaaattcttgtgaattttcagggtcttttgttttttcaatttttacattgcttcttgttgaattttttttgttttcttcattaaacctttttaaaacttcgctttcaggaaaactttcatttgccgttatataaacatcaacttcaaaattcggcgccatttctaattcagctaaaacatttccgtagtttgcggtttcaatcattattttaattgtttcaatgttttcttcttcgtttgggtctgccccttgaattttatcaaaaatatctatatcaaaatcaaggttcatttcgtttctgattgaaagtggaagccaaggaagatatagcattaaaaggtttttaacggtttgggttgaatctgatgaatttgcaccgacagaaaacattgccattagttctttcaactgggaaacattattcgagcccattttagaaactgtcattattgtcatcattaatttttgaacggcatcttttgaattgcccgctaaaagttctgtcagagccgataaatttattttgccttcagttaaaatttttgcaaagcttttggctgtttctgtgttcatattttgaatttggttaataaagctttgaaaatctcttggaaggtttaataaatcttttatataatttgccctttgttcaacttcaacggttgatataaccaattggtttgtatttgataaaattaagcttgattggctttgctgagttgaagcggaataattaattgaagttaatgaattttggcttagggtttgattaacatttgaattaaaattgctgctatttgcagccaaattgtttgcactttgccctgtttggctgtttttaattaaattttgggcatttattgcaaatgtattaactataaaatttattgggttaaagccgttcatagtttaatataataatggttttaaaaatgtttgcaacaaaattttgatttttttattaatcattataaaattaaaactatgttagaagcattttttatacaatttttacctgaatgggcagctgatgctgttgttgacagcattaaaacaattccttttttatttttggtatttttatttattgaactatttgagcatttttgggcaaataaaattaaaagttttttgaaagcttctaaaaatttagggccttttgtcggctctttggcagcttcaattccccaatgcggttttagcattgttgcatccaccttatacactaaaaaatttataacaaggggaacaattattgcggtttatctggccacaagtgatgaagctattcctgttttattaatgtatcctgaatatttaaaatatattcttcctttaattttaataaaattggttattgcaattcctgttggttatttggttgattttcttttgaatagtgaaaatgaaacagaaaatattgaagaagaagaaaatattgaagggtgctgcaggcatgaaattgtggcgcataaaaaaacggattttttaattcacccaacaaaacacacaataaacattttcctttttattttggttttaactttaattttgaattatcttttaaatatttttaatattgaaaaattttccgttaacggaattcattggtatttgcctttaataacttcaattttggggttaattccaaattgcgcaatatccgttgggcttgttttattatttataaaaggcgcaatttcttttggtgctttaatttcaggccttatgacaaatggcggtatcgggcttttggttttgcttaaaaataataaaaacaaaaaagatactgttttaattttaacccttcttgttttaattgggttctttgttggtggcgtggttcaggttttatttgctcattggtaaatgcaagttgatttttttgccgcttgccaaagcttgtcccattcatccactgttaatttttcaaggtcgatattggcttcttttgccatttcttccatttttctaaaccttaattcaaattttttatttgccataattaaggcttgttcagcatctatttttctccaccttgcaaggtttacaagcgcaaataaaatatcgccgaattcaagctccatatcttcttttgttttagctgataaaaattctttaatttcagaattaacgcaagccagaacatcttcttctttttcccattcaaagcctgccttaactgcttttttagaaagtttttgcgctgtcattaaagcggattgcgcctttgaaatgccatctaagtaactttttctgtggggtttttcttctttttttaatttatcccaatttgataaaatatcatctaccccgttaacttttacatttgaaaaaacatgggggtgtctgtggattaattttttgtttatttcatctgccacatcttcaaaagtaaattcattgttatctgctgctatttgagagtgcaaaacaacttgtaataaaacatcccctaattcttcttttaagtgctttatgtcgttatcatcaatggcatcaaccgcttcataagcttcttcaagcatattttggcgaattgttttgtgcgtttgcgccctatcccattcgcagccgttttcgcttcttaaagttttaaccgtttcaagaagtgcatttatattttttgtttccataattttttacctcaccatttgatcaacggttaaaattaaaattcctttgccgccaagcgcttttaggtggtttatgctgtcatagattttatctttatccacaacaacgtgaaccacaacgttttcgctatcgccccaaagtgtcataacggttggagaagaaagccccggaagaaaacttttaacttcttccaattttgattttggaagatgaaccattaaatatttcttttctcttgcgtctataaccgcatttattgcaactaaaagttcttcaatttgttttttaatttcatcgggtaaatttttcctctgaactataacgcagcttgaatccattatcttatcaattatttttaagcggttttgttttaatgttgaacctgaacttgtaatatcaacaataacatctgacaggccaagtgaaggggtaatttcaacggcaccgtttacttcaattatttttgcaattttgcctttttctttgaaatatttttttgcaatgtttggaaaacttgttgcaacgtttataacatcgggaaggtcttctgttttttgatatttgtcttcttctctaactgcaacaaccatatcgcaatagccaaaatcaaacctttttataacatcaagctcaattccttcttcttcaacaatatcaagccccgtaaaaccgatatcagccacttttgcatctaaaaatttaggaatatcttgagttctgacaaatattaaagaacattttttatcttgtgttttaatatgcaaacatctttctgattttgcttcaaaatttaagcctgccgcatttaataattcatatattttttcagataatctgcccttgtttgggattgcaatttttagttcttccattgttctttttccttcttttatgacttcttttttatcaaaaatatgctttaatttcaaattgtttattttataatgtttttagcttaatttttatcaagaggaagattaacaatggaagaaacaaaaaagaaagagtttaaagaaactttgaacttgccttcaaccactttggcaatgcgcgcaaatgctgctgttagagaagttgaaattcaaaaattttgggatgaaaataaaatttatgaaaaaaatataaaccaaagagataagaaaaatgccttcattttgcatgatggccccccttatttgagttccgataaaatccacattggaaccgctttaaataaaattttaaaagatattgtaattaaatataaatctcaaaaaggctattttgcaccatatatccccgggtatgacgcccatgggcttcctattgaaaatgccgttgcaaaaaatattaaaggcggaaaggacgcagtttccccctttgaattaagaaaaatgtgcagagaatttgcaatgaaaaaccttaaaggccaagaagcaaactttagacgccttggcgtttggggcaattgggaacacccttatttatcaattgcacctgaatttgaagctgaacagattagagtttttggtgaaatttataaaaaaggctacattcaaaaaggcctaaaacctgtttattggtgctctcattgcgaaacagctttggctgaagctgaagttgaatatca

SEQ ID NO: 2729 - DNA, 17575 bp, synthetic construct
  misc_feature 1..17575: note = Synthetic
  source 1..17575: mol_type = other DNA
  variation 14156..14167: note = n is a, c, g, or t
  variation 15032..15110: note = n is a, c, g, or t
ttttttctttttggcttcgcaactctgaaaagaaaaaatggaacatcactttttaaataagactcaaattcatgtaaatcataactatattgcataaaataaacgtaggtatattttaagtatctaattctttttataaaactaaaacttaattgccatgcataggcagtttgaggttttggggagtaaaaaaattaacaaatattttaatttcatgtaacattttgtaaacaaacccgttaaattattaaatatttactttcatattgccgtagaacatgttgctacaataggttttttatttttgcgcacaaccgatttgtaagcgtaagggaatatcaaccaaggaaatttatgggtttatcttcatcacaagcaagattacttcatttgaccggcagaatgcaccagattgagtacaaggctcaaaagctcgaagctcaaaagctgcagatggcgaacgaatccgcacgtgtatatgaagaatatgaagacgctcttgatgcgacaaagatacaacataaattactaaacactgacggttccgttactttccatgattctacgattgatgacttgtattttggtgctgcaggaaaccgtttcggtctgttctctacaaaagacggacatatgtatattccgcaggacattgccaatgaatatgaaaacaataaatattctgcctccgactttgctactgctatgacaggttatactccgcctgtagtcccgactatatcgggagatttgtctaacccttacacccctgcatccgaaacggttgctaaagggcaggatatcgctatgacaagaggtcaatccaagaacacttccgtaaacagtgccattacattaacactgaatgacaggataggttcctcaactccgtataactacagtatccaatcaacggacggttccgataccaatgctactttccaatatttgaaaaacggcagactggttatcagcggtgataacctgaaaataacggctaacggaggacaagccgatgatattatccttatcggtaacaacaacgttttagatacaggcgacggtaacgatattgtaagactcggaacagccatggattctcaaaccatatcaggcgcaacaacgggtaataccgtatacacaggttccggcaatgaccacatcacggtaagaacaaacggaaacaaaatcgttgattctgactccggcacaaccgtttggtttgcgacacaatccgttgaaggtcaaacagacacatcaggattatcaaatcctcaaaaaacatacaactacggcgacgcaggcaaaaactccacaagcggagtactgggaacggaaggctatgccgtacaaggtaacactaacgattgccgtttgttctcattaataaacagtttaggcaaaaactcaaaccatggtgatttatcaaactacgttacgattacccaaagcggtgatacatataacgtaaagttcaaaaactatacaggtgcaaataacaacgtaaatatctcaaaatcagaggcagaatcttataaaggcgcatcaggcgatattacaactgtattaattgatatggcgattaacaaactaatgtatatgaaccaagatgacagcgacctgcaaagcggagccacaaaccaatctaacgcattcggcagagcacagtatcagactgtttccaaatacttcttcggcaatgaaaacttcggcgcatatattgacggcgttaacggctgcgacagaacggaatcactcaataagtttacggaaatttggaatgattataacaacggaacaaacggcgttaccaatatgcttgtaagtttcggttcacagaatgataatctcggtattgtctcggggcacgcattctcggttaaaactgtttctcctaataattatgtagagctcgtaaacccttgggacgacgcagacgtattaagactcgattggaacacctttacacaatactaccacggcgtttatactttcggctctcctaaatataacgaaaatatggttttgagaaacgtaaaccaaaaaaatgaattattaggcaatcaaaagtcctatacccttgttaataatgcaggtacaggtaacagcgattgggattattactacaatatgcatcaacaaataacaaatgcgggcggatatgaagtaatccctgaaaatatgagaacaagcaccacttatttaaccaacattataaacagcggaaccgtttatatgaaagaatttgacaaggtaaacagtgccttctgtgatacaagcgtttcaacaaatacaaaactgcgtgaagtctccgacgaaacaaaccttaaaaaagcggaagcaaaatacgaagccgatatgaaacgtattgatgcaaaagataaaaaatacgatacggatttagcagctcttgagacagaaagaagtgcctgcaaggaagaaatggaaacactaaaaaccgttgcaaaagacaacgtcgaaagaacctttaaattattcagttaatccgcatattgtctaaggtcaattttttctgatataattaaatatatgaagaagtacaggaaaaatgtcagaaatttttgcataatagctcatattgaccacggcaaatccacgctcgcagacagattacttgaggcaactggaactatcgctaagcgtgatatgcaggatcagttgcttgatacaatggatattgaaagagagcgcggaatcacaataaaactgaacgccgcccgtatgaactataaagccaaaaacggagaagaatatatctttaaccttattgatactccggggcacgttgatttctcttacgaggtatcacgttcattggctgcctgtgaaggtgcgcttttgatagttgacgcaactcaaggggttgaggcgcaaacattagccaatgtttaccttgcggcagaacaggatttggagattattcctgtcataaacaagattgatttaccgtctgcggatgtagaaaaaacaaaagccgaaatagaagaaaccctcggcatagacgcatctatggcaatccctgtaagtgccaagacaggtgaaaatatagaacaggttttagaggcaatagttgattttattccgcctcctgaagataccgaggataaacctttaagagcactggtttttgatagtgcgtacgaccagtatttgggaacactctgtttctttaagattgtggacggagttatgaaactcggtgaaaaagtcaaatttatggcgtctggcaaagaatacgaagtcgtggaaataggatatatgacaccgcacagagtacaggtagacaaattggaatgcggtgatgtaggatattttgcgggctcaatcaaagaaatcacaagatttgtcggtgacaccgtaaccagtgtcgaacgccctgcaacagaacctctgcctgggtataaagaagcattgccgatggtgttctcggggatgtaccctgtagataacgaagactatcaggaattaaaagaatctttggaaaaactcaaattaaacgacagcagtattacgtttgagcctgaaacctcatcagccttggggtttggattccgttgcggatttttgggaatgttgcacatggatattgcacaagaaagattggagcgtgaatacaacctttctatcgttacgacggcaccttccgttgtgtataaggttcataaaacaaatggagaagtcgttgagattgataaccctgcgaacctgcctcccgcacaatacagagattatatagaagaaccttatgtaaaagtttctattattacacctaacgaatttgtaggaacgttaatggaattatcacaagcaaaacgcggtatatttatcaatatgcactatattgataaggtaagacaagagcttgtatatcatattccgctgtctgaggttataacggacttttatgatcagttgaaatcacgttcaaaaggttacgcaagtatggattatgagtttgcggaatataaacgctccaaacttgttaagcttgatattatgcttgcgggcgagattgtggacgctctgtccgtaatttgtcacgaggataacgctttttatatcgggcaaaaattaacggaaaaattaaaaactattattcctagacagttgtttgaagtacctattcaggcggcaatcggcggaagaataatcgcaagaaccaacataaaagcactcagaaaaagtgtgcttgataaatgctatggcggtgatattacccgtaaacgtaaacttttggaaaaacagaaacgcggtaaaaaacgtatgaaagccatcggaaaagttgaagttccgcaagaggcatttatggcggttttgagtttgaatgatgagtaatataagcaaaaaattaaatttattgcgttattaaaccattttgaatattatagtaataatcatgagtaatttgaagaaaatattattaatcttagttatattcctgttaacagtgtttacgggctataaaatcaatcaggaagataaaacgccaaagaagacggaagtcgttgtatggacacttcaaatggcaaatttttcggattatataaacgggataatcaaggaatacgaggcacagcacccgaatattacaataaaatggattgatgttccgttctccgaaggtgaaaagagaaccttggcggctattttgagcaacaatccgcctgatttggtcaaccttaaccctgatttttcggcacttttagcacaaaaaggagccttagagccgatagacgaaaaaaggttgtcggattttaaccccgatgtcgtaaaatcattgaaatataacggtgttttatacgctgtaccttggtacgcaacctccgccgtaaccatttataacaaaaaacttttgggcaatataagaatccctaaaacttttgacgaactcgccgcaatatctgcggaagtgcaaaggaaaacaggcgcatttgcgtatttcccaaccattacggaaaacgatacaatgctgaaaatcctgaacaaatacggcgtcggagtcgataacatcaattccgatgaaagcgtcagagttttcaatctgtataaaaacttatatcaaaagaaactcatccctgccgaaagtatcacgcagactcatcaagaggcacttgaaaaatatatgtcagagaacgttgtgttctatcagggcggggcaaactttttatctatgataaaagataacgcgccgaatgtttataaaaacaccgaagtcgcaccgcagattgtgggcaaactcggacaaaacgatttttctttgatgaactttattatacctttgagggcacaacataaaaaagaagcacttgatttctgcctgttcttgaccaatcagaaaaaccaacttgaacttgcaaagatgacaaacgttatttcaacgaacaaatacgccctaaaagataaattttataactccgacagcgacgtaatggcgcgcgcaagacactatagcgcaaaacagatagagcatatcacccctgctttgagacagcagaacaaccaaaaagatattaatctgcttgttaataccgctgttcaaacagttttattgaacaaaaaagatacaagaacggcattaaacgatttgaaaaaagaattggcaaaattgagataaaataattacgctggtgcggtagtgaccgcaccctactatactaaaagtttaaactaaagtataaaaacataaccgtactgtcattacgaggaggggaacggcttccccgacactctgccgaacaaaataattaaatattattttgtgagaggtaaatccagccggtttatcgttaatttagagatgaaggggaatttttatttgatatgtaatgaatagccagctggattgccacgaaatccaagccgttggatttctcgcaatgacacacacattaatgtattatttcttttgttaaatttatcgtgaacaggggagtagcaacaatctactattggtagactaaagtctaccctactaaactcacttagtgccttagtgccctagtatcttagtatcttaattcaaacccctgcaagcacaggcggggaacaacagcaaaaacaatatataaccttatatataacgagtgcattttcggttaagtcattttcttaaacctaacctatgacatggtttgcgcgatattgcattgttaagttttgtaaaccaaaatcaaacaaaaaaggcaatttttacgacgataaatacttattaaaagtataaagctctctcttcttatttaaacggacagaccttgataacaaggtcttttttttttggcttatttttgtctggatttgttcactatatctagcgggttaatgttttgtgaatgcaggactaaatcgcacagttctctgattgcgccgtgtccgccatttttggttgagacaaaatcgcaaatattttttacttcttcaaccgcgtcgtgaggacagcatgataaaccgaccttttctaagatacaaatatcaggcaggtcgtcgcccatataggaaacattttcatatgtgaaaccgtatttttgcataatctcttccaagacaggcagtttgtattttatgccttggtttagttccgtaatcctgaggttttcggctctatgagcgacggttccgttttttcttgcggtaattatgactgtgattatccccgctttttcaacgcagacaataccttgaccgtcttttgcgtcaaattttttgtattctttcccgtcttcatcaaagattagaccgccgtcagtgaacacaccgtccacatcaaaagccatcatttttattttacttgctttttctctaagattattttctgacataaaattttcctaaaattcctaaaagatatcaacacagatattttaacacgaataaatcgggggtttaaactattttgcggtacttaaaaaattaattttattctgttggttttccaacagactttttaaaacaaacacgatatattagaataggacaaagtggttatagctgttatttttagattaatcacacaacacaatttaatcctttaattttaaataatatgactaatcgggtacttcccaacaacaagtacccctttttattttctgctcccgcggagcaaaacctaaatctgcattttgcaattccccctcacctgaatacgtaatcgctatcgctcaacggcttcgacctctcccgcaggcgggggcgaggttatggattttgcttttgcaaaatccaaaccgctgctttgcaacggtgcaccccttctacctctaggagaaggacagcagttgtaggcgacgaaggagccatacaaatgcaggatgagggtttatccttacgaataataaaattatcctatatagtaatgccgaaaatgggcgaggggtacttccgcggagcggttattttaaatatttcccccacagttattaacaaatgtaaagattgaaacactaacttaaatcggtgacaagaaaaaaactttatatacatgcgaggtgtaattatgtctgccgacaatggagactggacattatatacatataacaatagtcataaacccgttcgcatacaattaaatgtaggcgacacatgggagagtgtgtcaaaatccaataatatagacgggtttgattcaatatttaacaaggtggacaccaaccacgacggcataatccagcaaggcgaaaaagatgctttgaggaagtttttcaggcgtcgataaacaccaagaacgggcatgagccaatgacctcggaggaatataaacaaaagggattaactgacgagtctaacactttggatataaacatcggtgtgaaaaaatatattgactcattgagcgataaagacatcgaataaatctcaaaatcggatgatacaaccggctcattatatataataaaccgacaagaggacatacagaacgccgacggaacgacgaatgccccaagactgagcaaagtatattcgcaatttaagccggttaaaaagcctgtcagcaattggtctgagggactggacagacatattgacacaatcagtataaccgcagatgacggcagagaaaattttgatgtactggcgaaagaatatcatcaatttgcatccgtactggagcaggcgggcaaagacaacggatttgaggtgagaaaaatcttcgggacgcgagatgcggactggttttaagattacgccatacgccgtgcggacggaaagattatgggaccttctgcaaaagcagttgaaaatttggagagacatttcccgcaaggggaagaggataaggacatagatgccattatccaacaccgagcgaatatatccaaaggagttcagggcaatgcaagattgcacgcaagagacgttgcccaacgaatgccgcatgacgggagcattgtcgaggcaaagagttaccttgagggcggaaatgtcttgaacacttgcaaggcggacggaagccccggagctgtagtcggcgcggaatccataggttacagcctgattgcaatggggttggaaaacactcctcaaaatgttgaaaaagctaaacaacaaatcgcacaagatttggggttaaaacttgaggatgttacgtttttgcctcagtatgattttcacatagatatgctgtatcacccgttacacaacgggcaaatggcagtgccagattatgaagaaagcataaagattttgaaaaacacacagattgcgggcatgagtgacgagacaaaaacagcactcataacaaagcttgaagatattagccaaaagacggcagcgatacgcaaacaggcggaagaggctctcaaaaaagacggatacgaggtcgtaaaactgccaagttttataaatggggtacccgatgatacatcctggtcaaatgacgtcctgactccgaacgaagaggcactcgcaggggtgaatataaactatacaaacggtgtcggcggaactggcaagaacggcaaaaccttcttcataacaaacgattcgggatatcccgaactaaatcaagctgttgaaaaatactttgaacaggctggagtagacaaagtatactttgcccctacaaccgaatacctgaaacaaaacggcggtgtcgattgccgtacacaggaacaacccgaataggggtaataaagatactaaggcagtagggcactaaggcactaagaaagtgaaaagtgtataacttattaattaaaaattatacttcctccccgacttgggaggacagtgattgttgtatcgtcatcctgagcaaaaattctgagggcagttcttttatttttaaatattagcgaaggatctctgttacaagcacaggtggggagtaacaataattcattattagaaatgaataaaggtcctaaaaaattaccaagttaaaacattgtcggaaatcaatattttgtgtgttgagaattttaataaatttaaccattggcaaaaataatgttataataaaaattattacaaatttaatgaaaatttcttgtttttatgcgtccgtttctgacgtatacgcatattaaaatgggatatataaaaagataacctgcaccgaaatgcaggtatacttttcgaattaacttactatagtaacgtttcgaaagattttattgtataatacaattattatacaaatacaaaatataattgtcaataggagcaaggaagaaatgaaacaaaaaattttaggacttgatataggaattgcatcagttggtcacgctattataaattatgatgataagaattttgacggagaaataatagaagccggagcaagagtttttgacgcttgtgaggtagcaaaaactaaagaacctttaaatgcacaaagaagaaattttcgacttgcaagaagaagattggcgagacgctcttccagattaagacaattaaaacaattatttatttcaaataatcttctcaacgaagctcaaataaacaatatgtttcaaggttcaaagaacagaattgatgtttgggaattgagaaaagaagctctgaacagaaaattaaccgttgaagaattatacagagttatacaccaaattgcaaaaagaaggggttttaaatctataaggaaaagcgaagaagcaaaacgagaaggagcgttgttaaaaagcctgtctaagaatgtagaagcatttaaagatagtaattttcagactatcggagaaatgtttgcaactatttttgttgacaaagcaaaaagaaataaacgagatatgtatactaattctattcctaggtatttactcgttgatgaattaaatattatttttgataaacaaagagattttgggttggatatagcaaccgaagaattccaaaaacaaatttttgaaaaaatttttgctcaaaactctattcagtcaatggaaaaaatggttgggtattgccaatttgaaaaagatgaaaaaagagctccaaaagctgcatatacttcggaaatttttgttgctgtgcaaaaaatattaaatacccatgttattgatgaagtaggacaagaatatgaatttgatgaagaacatattaaacgaattttagagcttgcccatgaacaatctaaagttacatacaaacaagtcaaaaaagaattttcattatcagatgaaacaagatttaaaggattaaattataacaaaaagattatagataaaaagacaaaagaagaaaagattgttaatcctgaagaatctgcatttgtagaacttaaaaaatatcaagagtttaaaaaagcaataataaaaaatacaagtaaagaatattttgaaaatataaaagacgtacaaacattattcgataatattgcagaagttttaacatacgaaaagagcgatgatacaatcgttcaatctatgaaagaaaaagaaattcccgacgaaataataaatgccgtaaaagacttatcagcggtaaaagttatgcatttatcaataaaagctatgaaaaaaattataccttttatgatacaaggaaacagatacaatgttgcgtgcgaacttgcgggatatgattttaaaaatgaaaaagaatcaaaaggagaggattttttgcctgtactaaaacaagaagaattaactacaaatcctgttgtaaacagatcaatttcacagacaagaaaagtcgtaaatgccttgattagaaagtatggaaagtttgataaaatcataattgaaacagcaagagatttgggtaaatccgcagaagaaagaaataaaataaaagcgggacaaaatgaatttaaagaacaaaaagataaagcacgagaaagatgtatagaacacggaataaatcctgattctaaaaataatcttttaaaatacagattatgggaacaacaagggggaaagtgcgtttactcttggaaagaagataacggagtaataaaacctgttgaaatagacatagaacgtttagcagaaccaaattatgctgatattgaccatattttaccgtattcaagaagttttgatgacagtttaaataataaagtactttgtctgtcagacgaaaacagacaaaagggaaacaaaactccttatgaatatttaggaaataaggtggattggtataaatattctcaatatatcagaagtttaaatctaaattccgcaaaaacaaaccgaattttaaggcaagaatatcacggaaatacggatacttttatcagcaggaatttaaacgacacaagatatatgacagtattcattaaggactacataaaatcaaaccttgattgtaaggttgaaacgaggaacggttctttaacggcatttttaagaaaccaatggggtataattaaaaatagagatacagataagcaccacgcaattgatgcagtagtgttagcatgttcaactcaaggaatggtgaaatatctttcaaccgtttctgcaaaaagggaaaaaatggaacgagaaggaaatgcaaaacctcgcttttctaagccatgggcaacatttgatgaagatttaacgaaaataaaagataacatatttgtgtcaagagctttggttactaaaattccgggcagtattcataaagctacattgaaaagtccaaaacatttggcggaaggatttacgactttaaaaacggatattcagagtttgtctttatcaaaacttgaaactatgtatgacaaggaacgaaatattgcagtttataatgttttaaaagaacgattggaacagtttggaggcgacggaaagaaagcatttgcagaacctgtttatatgcctctatctaaagaaaaggaaaaagcaggacagaaacctcatgaaataaaaagcataaaacttgtggacaactctgtttcgggagtattattacctcaaggctttgccgataatgattcaatggcaagagtagatgtattctcaaagaaaaacagtaaagggaaagatgaattttatcttgttcctatttatgttgccgatttcgcaaaaggtatattgccgaacaaggtaataaaagcaaatcaaccggaatctgagtggataataatagatgatacttttaaatttaagttttctttattcagcaatacacttatttccattaataaaacagggaaaaaagaagatgaaatttttgggtactatattaaaactcacagatgcacaggtagcatatattatgaaatggttgacggaaagataaatgagaatggtgaacatgtacaaaaaacaattggtgtgaaaacattaaaaacttttaaaaagtatcaggtcgatgtacttggaaattaccacgaaataaaaaaagaaaaaagacaaccgatacattttagaggtgacaaaaataaatgagttggaaaaccgtaatgttttcaaatccttgcaaactttcagtaaaaaattttcaactggtttgcgagttaaaagaggaaaaaataactattcctatagaagatataggaacaattatacttgagaatcctcaaataagcgtaacaaattattttttgagtttatgttcggaatataatgttacaatttttacctgcgataaaaagcataaaccaattggagtattaaccccgtttttccagcacagcagaaatacgaaaattgccataacccaaacaaaaatgaaagaacctttgaaaaaacaaatttggcaaaaaattattaaacagaaaatcaaaaatcaatcaacggttttaaaaactttatataacattgatgaacttgatttttatttaaaaaaagttttgtcaggtgataccaaaaatgtcgaggctaccgtttcccgaaaatattggcaatatttgtttgataattttaaaagacattctgaatcaaaacacaattccgcactagattacggatatgcaataataaggggatgtttatcaaaatatgtttctgcaagcggtctaattccgtgtttaggaattcatcattgtaatgaattaaatgcctttaatttaacggaagatttgatagaaccgtttcgcccgtttgttgatttaatggtcagcggaatggaaatagaatctgatggggaattaaacaaagatgataaaatgtatttgatttcagtattaaaccaacaatgtcaatataaaacagagcaaataactattcaaactgcttgtgaaagagtatgccaaacttttgtaaaagcaatgctcgaaaaaaatattgacaaactggaattacccgaatttatcaagggtaaattaagtattcctatggagtaactataaaaacaatgagcgtaaaagaaaacgatatatttatgagattatttgtattttttgacttgcctgtcacgaagaaagaagacagacgcaatgcgacaaaattccgaaaagaattattgaacgaaggttttacgatgttgcaattctctgtctattgcagagtttgtcgaggtcctgacatcgtagacagagaaataagacgaatagaaacagtactcccgcctaaaggaaatataagactcctaactgtaacagaaaaacagtatggtaatatgatgtttttagttggcatgcctgaaaaagaagaaattatcggagcagaacagctatgtttattttaaattttttcgataaaaattataccaaagcccttgccttgtctaaggtttgagctttggtattatacaatataatctttcgnnnnnnnnnnnntttcgaaaggaaactatagcgttgagtttatgcctgttatatatcctgcaattatacaatataatctttcgaaaggaaactatagcgattgggttggcaatatgaactggtctgaaattatacaatataatctttcgaaaggaaactatagcttattgtctatccacttatttatcatatctattatacaatataatctttcgaaaggaaactatagctctatccattcaaccttagagcctacattaattatacaatataatctttcgaaaggaaactatagcaactatgatgatgtatatattggcagagatattatacaatataatctttcgaaaggaaactatagctaaaccaatgataattacatcaggattccgattatacaatataatctttcgaaaggaaactatagcttatcattattgtttatgtccgtttggtgtattatacaatataatctttcgaaaggaaactatagcattcggtaccatataaataacgttttctttattatacaatataatctttcgaaaggaaactatagcgtttcttttcggtgtaaataaatcaacaatattatacaatataatctttcgaaaggaaactatagccgtcggttaactcttcttggtacttccataattatacaatataatctttcgaaaggaaactatagcgccgttagtttttctgattttgctctttttattatacaatataatctttcgaaaggaaactatagctcaatgtcgtaaacttgtatcaatcggtttattatacaatataatctttcgaaaggaaactatagccaaaaatgcttctgtatctttgtcaagttcattatacaatataatctttcgannnnnnnnnnnnnnnnnnnnnnnnnnnnnnnnnnnnnnnnnnnnnnnnnnnnnnnnnnnnnnnnnnnnnnnnnnnnnnntttcgaaaggaaactatagccaatacaaggtcagtccgtttctccaacgtattatacaatataatctttcgaataaaaactattgaaagttttccccattgcccaaaacgggaaaaggttgtaagatagaaggacagcggagctattacccctctacctttgggagagggatagaatttcgatttgagctgtcagcgaaaatcagaaattcagggtgagggtttgtcctcgcaaatagtaacgaaagatgtaatgtttcttacaaaaacaataacgagaagttcaacaaatttcgtaaaaatcggctggattgccacgttacaaaagcctttttgtaactcgcaatgacagctccgctgatgaaaagtagggtacgaagttataaaagcgaagctaagtgccccctctacctctgggagagggtgtccgcaaggacgggtgagggtttgtcctagcaaataatacataaaatacaaaacataaaaggtgactatgaacaagaattttagagttttaacctcgggcgaaagccacggaaaatgtttaaacgcaataatagacggaatccctgcagggttcccaatctcggaagatacaattaaccacgacctatggcgtcgtcagcagggctacggcagaggcggaaggatgaaaatcgaatccgacaaagtagagattaaatcaggcgtaaggcacggcatcactacaggcgcgcccgtctgtctcgaaatcaaaaacaaagattacgaaaactggaaaacagtcatggacaccgctccggttgaattaaccgacgaaaatatcgctaaaatcgaggaaaaatcgttcacaaagctccgccccggacacgccgactacgcaggctccgtcaaatacgggtttattgacctgcgcaatgtgcttgaacgctcaagcgcgagaaaaaccgccatggaagtcgcaatcggcagtatcgctaaacaaatccttgcccaattcggcatagctgcggtttcccacgtcacccaaataggcggtggtaaattagaagataacgtaaaagtccgaaacggaatattaacctacaaagataaaacctacccgctcacggaaatcggagatttggctgaaaactccgaagtcagatgctttgacgaagaaacatcagagaagatgaaagcggaaatcgacaaagcaaaaaaagagggcacaacactcggcggaaagtttgaagtctattatacggggctccctgtagggctaggctctcatgtacaatatgacagagccttagacgggcttttggcacaagccgttatgagtattcaagcggtcaaagccgtggaaatcggggcaggcacagaggttgccgacatgacaggcgctgaaactcacgatccgtttgaactcaaggacggcaaaatcgtccgcacctccaacaacgcgggcggaatagaaggcggaatgaccaacggcgaaaccctcgttgtgcgcgggacaatgaaagcaatcccgaccatgaaaacccctctgccgaccgttgatatcaaagatacgacagagacagaggctcattttgaacgttccgacacctgcgccgttccggcatgtgcagttgttgccgaggctcgtatcgcgacggttcttgtcgatgcattcttggataaattcggcggcgacagccttaaagaggtaaaagcacactatgaaagctaatatcgttctgacaggtatcatgggtgcgggcaaaacaacggtgggcaaggcactcgcagagattttatcggactatgatttcatcgatgccgacgatgtcatcgtggaaaaatcagggctcactatccccgagattttcgccaagtattcggaagagtatttccgctatttggaaacctctgttttgcgcgaattgtcggaaaaagaagggctcgttatcgcactcggtggcggtgcgtttgaaaaccccgaaaacagaaaaaatttaaaacaaggcggaagagttatttacctaaaaggcacccccgaagagttgtttaaccgcataaaatctgacacaaaccgcccgctgttgcagtgtgacaacccgcaggaaaagttggctgatttattggaacagcgtgagccgaattatttgcaggcggacatcgttatagacaccgacggcaaggatgtagaagatattgcacaagagatagcagagttgttgaaataacggtgttgtaaattttgtactacagaattataaagatccttcgccgatatttaaacaggttagacaatatgtacgatttattgctcaggatgacaattatcgtatggtttctcatatctaaaagcccctgtgttactgtcattctgagcacagcaacagagcaagtgcgaagaatctttatgatatatgatttttcgttgttaaaaaatacagttttattgaacaggaagtttaacctacaaactttgttaatatttttgtcaggcaatgcctg

SEQ ID NO: 2730 - DNA, 23213 bp, synthetic construct
  source 1..23213: mol_type = other DNA
  misc_feature 1..23213: note = Synthetic
agtaaaccggaaattaaagtaacggaaaaaatgtacgatacgcttttgcgtcccgttattacggaaaaagccatgaaatgttctgaaaacggacaagtgactttccgtgttccgttgacggcaacgaaaaccgacgtcaaagcggctgtagaagctttgttcggtgtgaaggttaaatctgtcaatactgtccgtatcagcggaaaaacgaaacgtttccgcggtactgtcggaaaacgcagcgatttcaaaaaagctgtcgttacattggcggaaggtcacaatattgattttacgacgggggtttaagaaatggcgttaaaaacgtttaaagcggtaacacccagccggagacacctcgttttggttgaacgcagtgatctgtataaaggtggtcccgttaaagaattgaccgaaggtttgaataagaccggcggccgtaataatcaggggcgtattaccagccgccgtatgggcggcggtcataaacgtcgttaccgttttatcgacttcagacgcaacaagtttgatgtcgccgcgacggtagaacgtttggaatatgatccgaatcgtacggcatttattgcgctgatcaaatatgaagacggcgaacgttcttatattttggcgccgcagcgtctgcaaatcggtgatacgattatttccggtgaaaaagtcgatatcaaaccgggcaacgcaatgccgttgaagaatatgccggtcggaacggtggttcataacattgaactgaaccccggccgcggcggtcaggttgcccgttcggcgggctgctatgctcagttgatcggtaaagacgccggttatgctcagctgcgtttgaattcgggtgaactgcgtttggttcgcggcgaatgtctggcttccgtcggtgcggtttccaatccggataaacaaaatgaagacggcggtaaagccggccgttcccgctggttggggattcgtccttccgttcgcggtgtggcgatgaacccggttgatcacccgttaggcggtggtgaaggccgcagctccggcggacgtcatccggtaactccgtggggtaaatgcacaaagggcaagaagactcgtacaaacaagaagacgaacgtctttattatgcgcagtcgtcatgcttcgaagaaaaaagcttaattaggagggtagtagattatgtctcgttccgtttggaaaggcccctttgttgacggttaccttctcaagaaagctgaaaaggtacgtgaatcgggccgaaatgaagtcatcaagacttggtcgcgccgttcaaccattcttccgcaatttgtgggtttgacttttggcgtatataacggtaaaaagtttattcctgtcctcgttaccgaaaacatgatcgggcataaaatgggcgaatttgctccgacccgcacgttcttcggtcacgcaggcgataacaaagccaagaagggctaaagaacatggtagcgaaaaaagaaattaaaaaagcaatggcttgcggcagcacgatccgcagcagcacacgcaagttaaatcttgtggctgcgtcgattcgcggcatggaagtcggaaaagctttgactcagttgagcttttctccgcgccgcgtcgcaggcgaagtaaaaaaagtattacagtcggcgattgctaatgctgaaaacaatcacaacatggacgttgataaactgatcgttgccgaagcttatgtcggcaaagcgttggtgatgaaacgttggcaggcccgcgctcgcggacgtgccggccgtgttgaaaagatgttttccaacctgacagttgttgtacgcgaaaacgaggagaaccgttaaaatggggcagaaagttaacccgattggtttacgtttgggaattaaccgtacttgggattcccgttggtttgctgatgctgattatgcaaaacagcttcatgaagatttcaagattcgtgaatacttgaaaaagaagttgtcgattgccggtatcagccgcgtgattgtcgaacgcccggcgaaaaaagcccgcattacgattcattccgcgcgtcccggtgttgtcatcggtaaaaaaggtcaggatatcgacgttttgaaaaacgaactgcagaaaatgaccggcggcgaagttcatctgaacattgttgaagtccgtaaaccggaattagatgctcagctggttgccgaaagcattgctcagcagttggaacgtcgcgtttctttccgtcgcgcaatgaaacgttcggttcagtcggcgatgcgccagggtgcggaaggtatccgtatcaactgcggcggccgtctgggcggtgctgaaattgcccgcgtcgaatggtacagagaaggacgtgttcccctgcatacgctgcgtgcggatgtagattatggaacatcgaccgcgcatacgacatacggtgcgtgcggcgtcaaggtctggattttcaaaggtgaaattctggctcatgacccgatggcgcaggacaaacgtctgtcggacgctcaacgctaagaaaggacatgtaagagatgttaagtcctaaaagaacaaaattccgcaaacagtttaaaggccgtattcacggcgttgctaaaggcggaacgacactggctttcggatctttcggtctgaaagcgatggagcctgaacgtgtgacggctcgtcagatcgaagcggcacgtcgtgcgatcgtgcgccacatgaaacgtcagggacgtttctggctgcgtatgttccccgatgtacccgtttcaaagaaacctcctgaagttcgtcaggggaaaggtaaggggaatccggaattctgggtttgccgtattaaaccgggtcgcatcatgtttgaaattgacggcgtatccgaaaagactgcgcgtgaagcttttgaattagctgccgctaagctgccgatcaaggcacgtttcgtttcccgcagcgtggttgaggaggcttaaactatggctaaaattaaagatttgcgtgcaaagactgatgatgaactgaacgaacagattattgctttgaaaaaagaaagcatgaatctgcgctttcagcagacaagcggtcagctgacgaatacggctcgtatgcgtcaggtgaaacgtgaagtcgctcagattaaaacgcttttatctgaacgcaaaacggggtctaaggagtaataaagatgcccaaacgtattttacagggtgtagtcgtcagcgataagatggataagactgtcgtcgttaaagtcgaacgccgcgtcatgcacccgatttataagaaatttattcggcgttctaaaaaatacgccgctcatgatgagctcaatcagtttaaagtaggcgatgttgttcgtattcgcgaatgtgtgcctttttccaagacaaaaacttgggaagtgctggttgatgccggttaatcgggaaagtagaggatttatcccatgattcaaatgcaaagcaacctggatgtcgctgataactcgggcgcacgcaaagtacagtgcgtaaaggtattaggtggatccaaacgtaagacggcatctgtcggcgacgttattgttgtttctattaaggaagcgataccgcgcggacgtgtcaaaaaaggtgatgttcaccgcgcagttatcgtgcgtaccaaaaaggaaatccgtcgtgcggacggcagcgcaatcagatttgattccaacgctgcggttctgatcaacaaagacggcgaaccgatcggtacccgtatttttggcccggtgacaagagaattgcgtgcgaagaaatacatgaaaattatttctttggcgcctgaagtaatttagtagagggtcaaaatgaaaattaaaaaaggtgatcaggtcatcgtgacgaccggtcgtgacaaaggcaaacagggcgaagttttacgcgctatgccgaagaccaacaaggtcgttgttcaaggtgttaacatggttaaacgccatacgcgtccttcacagacgaatgccggcggcattatttcgaaggaagctccgattgacgtttccaatgtggctttgattgatccggaaacgggtaaaccgactcgcgtcggctttaaagtcgttgacggagaaaaagtccgcgttgcgaaaaagtcgggcaaagtcatcgccgtgaagaaataggagtaggtgatatggcaagactttatgatcattacaagaaagttatccgccccaaactggaaaaagaattcggttataaaaaccagttggaaattccccgtttggaaaaaatcgttatcaacatgggtgtgggccgcgatgcggttgaagaccgtaaggccgttgacgctgcggttcgtgatctgacggcgattgccgggcagaaacctgttgtaacgtatgcgaaaaaatccattgccgcctttaagttgcgcgaaggaatgccgatcggttgcaaagtgactttgcgccgggaacgcatgtatgaattcctggatcgtctggtcacgatggctctgccgcgtgtgcgcgacttccgcggaatttcaaataaaagctttgacggcaagggaaactatgctatgggtttaaaggaacaaatcgttttcttggaaatcgattatgattctgttgataaaattcgtggtttagatatagtattctgcacatcggcgaaaaccgacaaagaagcaaaggcgcttttggccggttttgatatgccgtttgcgaaaaactagagcgattggagaataaaaatatggcaaaaacaagtgctgttgaacgcaataagaaacgtgaacgtctggctaaacaatacaaagcccgtcgtgacgctcttaaggcaaagattaaagatcgctctatttcggaagaagaacgctttgacgccgtgttgaagttagctgaattgccgcgcaattcatccttcacgcgcgttcatttgcgttgtgaattgacaggacgttctcgcgggaactaccgcaagttcaaactgtcacgtgttgtgttgagggatttggcctcatgcggtcagattcccggcatggttaagtctagttggtaacatcaagttaggtaaggagatactaccatgtcattttccgatccgttgggagatatgctgacacgtattcgtaacggtcagcaggctcgcaagagcgacattacggtgccggcttccaagttgcgcgaaagcgttttggaagttttaaagcgtgaaggttttattcgcggttattcgcgtataaatgtccgcaaaggcattgacgaaataaaagttgaactgaaatattatgaaggccgtccggtcatcagcgagattgctcgcgtatccacgccgggtcgtcgtgtttattcacgtgttaaagatttgcagaaattctataacggcttgggtatttcggttttgtcgacgccgcagggcgttatgtccgatcatgaagctcgtcaggccaatgttggcggcgaagttttgtgtaaagtattctaagagggggatttagcatgtcacgtgttggtaaataccctgtcatcgttcccgcaggcgttacggttgatctgaaaggtcagcaggtaaaagtaaaagggaaactgggtgaattagaatatacagcggcagatgacgttgatttgaaacttgaagaaaacaagttgtgggtttcaccgcgtaaatccgaaaccggaattaatcgctcttcatggggaacgactcgcgctcgtttgaacaatttggtcaaaggggtcagcgaaggattttccaaaaagctggaaatcaacggcgttggttacaaagcgcaggttcagggaaaaattttaaagatgagcttgggcttcagccatgatgttgattttgaaattcctgccggattgaaggttgcgtgcgcaacgccgacgaatgttgaaatttccggtgttgataagcagcaggttggtcagtttgccgcggttatccgtgcaaaacggcctcctgaaccctataaaggaaaaggtatcaagtacgagggtgaatacatcctgcgtaaagaaggtaagaagaagtaaaggggaacgaaaatgagtaaggcaagattacaatttgaaggccgtcgtatccgtacccgtgcttccctgcggcgtaaatccgccggacgtatgcgtttatccgtattccgttcgggacagcatatttacgggcaggttattgacgacaaagaaggcaagactttagcggccgcttcgacggttgaaaaagaagtgaagtcttctgtaaagaatggtgccacagttgcagccgccgccgttgtcggcaagctgattgcggaacgtgctctggcagccggtgtcaaagaagtatgctttgaccgcggcggatatgtctatcacggtcgtgtgaaagctttggcggaagcagctcgtgaagccggtttgtcattctaaaggaaaaggtaattatggcacgcacacctaatacagaacgccgtcgtggcggcgaaaaagaacgcgaaaacgatcaacgcgtagaaatgcgcgcggaacgcgatcgcgatatggatgaaatcgttgataagctcgtgtatgtcaaccgtgttgcgaagactgttaaaggcggtcgtcgtatggcttttgccgctttggtcgtcgtcggcgatcagcgcggccgcgtcggatttgcttccggcaaggctcgtgaagttcccgaagcaatccgtaaagcgacggaaaaagccaaacgcgaaatgattcgtattcctttgcgcgagggacggacgttgcatcatgatgtccgcggcagatacggcgccggcgaagttgttttaagaacggctcccgctggtaccggaattattgccggtggcccgatgcgcgctgtttttgaaacaatgggcattcaggatattgttgcgaagtcaatcggttctcaaaatccgcataacatgattaaagcgacgtttgcggctttgaagacggttaattctccccgcatgattgctgcgaagcgcggtaaaaaagtcggcgatgttgtcgctgctcgcgacggcgtgaacgctgcggcagtgaaggagtaaaatcatggctaaaacagcaaaaacgattaaagtcaaacagacggccagcattatcggcgcaacgaaagttcagcgcgcaacgatgttggggctgggactgaaaaagatgaatgctgaaaaagtactgcaggatacgcctgccgtacgcggtatgatcacgaaagttgcccatctggtaaccgtggttgaagaataaacgggcgcgtgcgctgtttgaatttcaggcggcgcacggctgattttaataaagcgagttaagaaaatgaaactgaatgaaattcgtgataacgacggcgcccgcaaaggccgtatgcgcatctgccgcggaatcggcagcggcaaaggcaaaaccggcggccgcggcggaaaaggtcagacggctcgtacaggcgtggcgattaacggtttcgaaggcggtcagatgccgctttatcgtcgtttgcccaaacgcggctttaacaatatttttgcaaacaagtatgcggaaattaacttagggcgtttgcaggcggcgattgataaaggcattgttgatgcttctaaagaaatcaatgctgatgttttatgccaggccggcgttttaaagcagacctatgacggtttgcgtctgctggccagcggcgagctgaaggcgaaagtaaccattaaagtttccggttcttccgaagcagccaaagcggctgtcgaaaaggccggcggacaggttattattgccgaataagtgaatttgaagaatgcaaaagagggggaaccctcttttgcgcgtttaaatttaaaaatttattggaagaaaagaaatggcttctcaaacagataaaatggcgaccggattaggttgggaaacttttgcaaaagcgacggaccttcaaaaacgtcttctttttacgttgggggctatgattgtttatcgtatagggacgtttattcctctgccgggaatcaattcgactgttctggaagatatttttaccagacaagccggcggtattttgggaatgtttaatatgtttacggggggcgctttatcccgtatgacgttatttgctttgaatattatgccgtatatttcggcgtcgattatcgtgcagttggccgcttccgttctgccttccctgatggctttgaaaaaagaaggcgaggcggggcagcgtaaaatgtcgcagtatacgcgttatttaaccgttttgattacgattgtgcaggcgtatggcctggcagtcggactggaagccatggtcggatctgccggaacgtcggctgtattgtatccggggcagtggttccgttttacgactgttgtttctttgttgggcggaacgatgtttatcgtttggctgggcgatcagattacgtctcgcggcgtcggaaacggttcgtcgctgattattacagccggtattgttgccggaattcccatggggctggctcaaacgtttgaattggccagagcgggatccttatcgactgtggggctgttcgccattttgttgacagcgattgctttggtttgtttcgttgttttctttgaacgtgctcagcgccggattctgatccagtatccgaaacgtcagatgggcggccgcatgatgaacagtgaaagttctcatctgccgttaaaattaaatccgacaggagttattccgccgatttttgccagttcgttattattgctgccgatgactatcgtgaatttttccgttaacagcggcaacagccccgactggattgtttctttatccacgatgttagcacacggccggccggtttatctggctttatatgccggcttgattattttcttcacgtttttctatacggcggttgttttcaatcccgaagatacggctgataatctgaaacgccacggcggttttattgccggtattcgtccggggaaaagcacggcggaatatttggattatgttctgacgcgtttgacggttgtcggttctttatatctggcggcaatctgttgtttccctgaaattatgattgcaaaatattccgttcctttcgttttaggcggaacgactttgctgatcgttgtttccgtaacgatggatttcgcgacgcagattcaatcgcatttgatcgcgcatcaatatgaaggattgatgagaaaagcaaaacttaaaggacggctgaagtgatcagtaacggcaaacaccttgttttaatggctcctcccgggggcggcaaaggaacacaggcgcgtttgctgcgtgatcgtttacatattccccatttatctacgggggaaatgctgcgtaatgccgggcgtgccggaacggaaatcggtttaaaagccaaagctttaattgataaagggaattttgttcccgatgaaatgatcatttcgattatttccgaacggttggacgaacctgactgcaaagaaggttttattctggacggttttcccagaacactgccgcaggcaaaagctttggacgagctgttgtttgaaaaaggtcgccgtttggatcatgttattgagattcaagtacccgatgatatgattattcagcgtattatcggccgtttttcctgtgcagactgcggcgcaatgtatcatgatacattgaaaccgaccaaagtgttcggtaaatgtgacgaatgcggcggatcgaattttttgcgcagacaagacgataattggcagacggttgttgaccggttgaagacgtaccgtatgatgacgacgcctgttttaccgtactatcagcatgaaggactgttggaaacgattgacggtacgggcggcgttgacgaggttgccgaaaaaatcaaaaagattatcgggcaataatcgtaatagggcttttttttcttaaagaacacggcggagattaagtttttccggcttgaaacaagtaaaggggcgacacgcagtcagcccctttcattttgtgaatcttggattcttgttaacggaaagaacccaaaataatcatctgctaaatgattaaaacaaattgccataaatttatcagtgtgtcaatattatttaaaacaattttaaagggtgttttccatggattatattttaggattggatttaggcgaaacttctttagggtggtgtattatcgaaacaaaagacggtataccgtacagatttgaaaattttggcgtgcgcatattttctgacgggcgcgaaagtaaaagcaaggaaccgttatctgttgcccgccgaacggcacgcggcatgcgccgacgccgtgatcgttatgttatgcggcgtgatacgttaatgcaaaaactgattgagtatggttttatgccggcggataaaaaagaacgaaaagcattagaaaaacttgatccgtatgagctgcgcacccgggctttggacgaacggctgacttcgtatgaactgggaagggctttgtttcatatcaatcagcgccgcggttttaaaagcaatttgaaaacagataaaaaagatgcggacagcggcgcgatgaaatcggctatttccgaaaccagagccaaaatagtgcaggcaaaagcacggactttgggcgagtatttatatcaggtgaacaaaggtaaaacgtcgacgcagaattttgtgccggtacgcgctaaatctgtcgttaataaaggaaaggcgtcttacccgctttatcccgatagagcgatgtatgaagaggaagtccgcttgattttgaaaaatcagaatattgatccggtaattgccgatgatttatttcagactattttttttcagcgccctttaaaaacaccggaaccgggattttgttcttttgaagaaaacgaacgcagaacatactgcgctttgccggcttatcagcaatttcgccttttacagcaaattaatcagcttactttgctgtatgatgacggtgaacgtcctttgacggcagaagaacgcagtacgctgtatcattatgccgcggaggatttttcccgcctggataaaagaaagcgtctgctgacttggtctgcggcaaagaaaatacttaaaccgttcggggtcaatccgaaagcttcatttaatttggaatctgaacagcgcaaaggattagacgccgattcaacatcggcctggctgtctgatgaaacgtgttttggaaaacggtggttttcttttgaagcgcaaaaacaaaatgaaattgtccagctgcttataaacgctcaaaacgaagaaacactggtaaaagaaattatttcagaatacggtgttaatgaagaacaggcgaagaagattgtttcggctccgttagctgacggtacggcgtctttgagtttgaaagcaattaacaaaattaatccgtttttgcgtcaggggcagaaatatcatgatgcggttgaatctgccggttatactttttcgttaaaaacaaaaggaattttgccggaacattatgacgcttttatcaatccggaaaccggagatatatatacggaattaccatattatggcgaagctttgccgaaacatgtcatcggcggtacgtatgcggcggcagatcgcggtaatccggaagtttattatggcaagatcaataatccgacagttcatatcgctttgaatcaagtgcgaaaattaataaacgagctggttaatcgctacggtcacccggacgaaattgtcgtcgagctggcgcgcgagctgaaattggggaaaaagcaaaaagaagaactgaataaagagctggtgcagaatacaaaggaaaatgagcgtattgcccgggaattggaaaggcttaatgttaaagactcttatgataaccgtatgaaatataagttatgggaagatttgtctgacaatcctttgcagcgtgtctgtccgttttgcggtaaaccgatcgggcatgcggatttattttcggataaatttgaaattgaacatttgcttcctttttcccgctcttattccgatgcccggacgaataaagttatttcatgccgggaatgtaaccgtgaaaaggggaatcggtctccatgggaggcttttcataccgacggcgttcgttggaatgaaattttggcgcgggtagaaaatttttctacgaaaagcgatccgaagaaaagcagagctaaaaaatttcgtgaagacgcttttgaagatttaaatgacgttttggcgcgcatgctgacggatacgcaatatatggctaaaatcgcccggcagtacttatgttttgcggcgcacccgacaaaagtacggggaatcccggggcgtttgacggctcagctgcgtcatcattggggattggaaaatttgtttcccgatgatcaaaaagatcgttctgatcatcgtcatcatgccgttgacgcttttgtcgtcgcttgcaccggccgcggcactttgcagcgttacgccacggaacgcagagattattatgttgcgaaaatgccgcaggaaaaagcgcctcatctgccttatcctgatttcagattggcagatattcaggccgcttttgataatatggcgatttctcataaacccgatcacggcaatccgcagctggcgataaaacaaggaaaaaccgtcgcaaaactgcatgaagaaacatattatggcatggcgggcgaaggggataaaaaaggaacatggaagcttattcagcgtttgcctgtttccgaatttaagacaataacggatttggattgcattattgatcaatcaggaacggcaaatcctatccgcgctttgttggacggcaaagaaaaatcagagcatgaaggggttattcagaagtattttgcagatcggggaacgcataaagtccggacatatcgggagcgcagtaaagaggttgtcgttccgtttacggataaaaacgacaagccgtaccgttacgcgatttacggaggaaatgcctatgcggaaatatactgtcccgaccgcggcaaaaatgcggggaaatggcagattgaaattattccgaactattgcgcgcatcaaaaaggctttgttcctcaatggcggcatacggacgcgcatgccaagttaatcatgcgtctgcatattgacgatatggtcgcttatgaaaaagacggcaaaacggtaattgccagagttaaaaagatgagtggtagcagagtttatatcagagaaaataaaattgctaaagaagaggctgataaattatcatggggagcttatccgtccggtatgcaagccggtaatatgcgtaaaatcactgttaccatagacgggcgcgtcattgatccgaaacgaccgaaggccgacgaacatggatcggataattgaaattgcgcagaataacagacatttagccgttaatcacggttttatgacggtgtcagaggacggtcaggaaatcggccgggtgccgattgatcagatcggagcagttatcgccaatgcgcatggtttgacatattccaataatttgcttgtccgtctggcagaccaatgtgcgcctttggttgtctgcggggcgaatcatgttcccgtatctgttgttttgcctttggaatctcatcatctgcaaggcgatatcattacggcgcaggcggctttgaaacctgccgctttgaatcgtttctggaaagaaatcattcgggcaaagttgacacagcaggctgccgttttaactgcctgcggaaccgttgatactcctttgcgttatatggcaaaacaggttaaaaacggagatcctgaaaatctggaaggacagggggctaaatattattttcagtctttgtttggcaaagattttcgacgggacagggggcaaagcggtataaatgccatgttgaattacggttatacgattttgcgttccgctgtaatccggtcaatcgttgcggccggactgcacccgtctttgggaatacaccactgtaatcaatataacgcaatgcgtttggctgatgatctaatggagcctttccggccgttggttgatttttgcgtttatcgtttgccaaataaatcagatactgtaacgacagaaataaaacaacggctggttgctgtattatcctgtaccgcgcagacttcaaaaggaagctgtgaaatcaattatttaattgaaaatctggctgtttctttggctaaatgcgctttaggagaaacggataaattagatctgccgcccacaatgacagatatggatttgtggggactgtgacgtgtcgattacgggttataatctgatgtggatgatggtgatgtttgatttgccagtaacagaaccggaagaacgtaaacgagcaacggcatttcgtaattatttgttggacgaagggtttgaaatgagccagttttccgtgtatgtgcgtttttgcggaacgcgagaaatggctaatccgtttgttaaaaggattcaaacgcaaattccgccggacggcaacgtcagtattttattttttacagataagcaatttgcagacattattacatttcagaatcgaaagcctgttcctcttgctgaaacgccggatcaactaacgcttttttagaaaatgaaatcagtaaaaaagcctttgttttcaaaggcttttttgattgatattatagcagataattattttgggtcaaaccgcaacttggcatagcagaccaaagcaatactgaagattatagcagataattattttgggtcaaaccgcaacggcgtgggcttgctctggtctttctcaaaaattatagcagataattattttgggtcaaaccgcaacatgaggcaaggtccgatgcttttcgttatcattatagcagataattattttgggtcaaaccgcaacttaatcgccgcgcggactgccgataaatccattatagcagataattattttgggtcaaaccgcaacaggggttgaattaattaaatgaccaagtcaattatagcagataattattttgggtcaaaccgcaactcaaaagttattataaaattattacaaaggattatagcagataattattttgggtcaaaccgcaacataaaagtatttgtcattgttttcgttccattatagcagataattattttgggtcaaaccgcaacgccggtggcggagttatggatgttgtcggtattatagcagataattattttgggtcaaaccgcaacccacgtgacagctaccagatagcgcgggagattatagcagataattattttgggtcaaaccgcaactaaaggctcgtttaatgttgtttaaatcgtattatagcagataattattttgggtcaaaccgcaacctagctagtcaacgaaaatccattgccggaattatagcagatatcaacccactaattcaattttttacatttagcgttaagaatgatgatcaatttacgcatgacggcgacgagagcgaccattttctttttaccgtttttaatcaatttttcatagaagcatttcatttctttatctcttttaattgcggttaaggcgcaaataaacaaagcgcgtttgacttcttttctgccgccgtatacatggcgggccgcgtttaacgtgccgctgtcttttgcatacggagccaagcccgccaatgcggcgatctttcgacgcggcagatatcccaattcgggcagtaatgctaaaagcaagttcgccgtcgtttctccgatcccagtctgtgaggttaaaactttctgcttttgatgtaactgcggcattttttcaataatttgctgcagctctttggccaaaaagttgatttccgtctttaaaaacgcgatatgccggctgatctgttcgtatattttattgtctgtctgcggagattgaagccggttcttttccatttgaagcagttgttttaactcgttcaggcgcataacgtacggtttgatctcgttatctaccggttgaaagagtgtcaatttgtcttgaagccgttttccgtaatcggccaaagcgcgagcgtcgattgaatccgttttagccagctggccgcaggcgcgcataaaagctttgactttacggccttcagcccggtggatcgtaaagccggcctgataaaaggccttgacgcattgtgtttcatagccgccggttaagtcgataatcaccagtgtttcttcggttcgttccaaaaattgaacaaatttatgcagacttttttcatcattttttatctgcatcaattcaccggtttccgacagaaacacgtcaacttttgctttggcgacatcaacgccgataaagcggttaaacatctttttcccttaaaattattaacgtgcacgaatatcggcacaaacaacccagcaagataaaaaagccggcgccggacaagatatctgcgaactttaagctcaattattttacgtccaggcatcggcggccgctttacggttgtcagaagtgtaagagttcaaggcaaaaagtcaaaagaatttttgtttctcttttaacgtgtgtagtgaaaatttttccaaaaaattatcatattgtttttatttattttttctgggatcgaacaatttccggtgtgatgctgcagctggaatcagcgtttttcgttttttctctttttagtgttgaaaaagaacgttgttcttttgtttttaaggctaaccgccgtttgttccccgaacgcccccaaagggctgtatcttgttttgtcaaggtatcgcttcgcttaaaaaagaggtttccccgattttcggtcagttcctgacctgcaaaccgggtgatcccccgcctcttttttaacctgtgacaaaacgctttttctcatcgccgaagggctagttctcaaaaggcaacgctgcgcttttccttttgagggccctcgggtctatgagaaaggaaacgttgcgttagtcgggacagagcgcccgaacgggttctttgccccggcattatttttaactctagagtggaggtaaaagatagtgaatagacaaagaatgctgacggttttactgttggcgattatcttctggctctgtttcattaaaaaactgagctaggcaaactaaagcccctttgatgtgacagcatctcaggggcttttttttaatagtgattagacaatgattatattgtcatattttcctgttttttgcaattaaataatcaggaaagagcgttcagaatatcttcccggagggcttcggatgtaatatttttcttcaccttataacgtaaaactttaatttcagcttgagctaaaaaatcatcacgatcatgatcttttgcctgttgtttactgttattatgagtgtaaccgtccaattcaacaacacaacattttttcaaatctttatcaaatatagtaaaatcaacatgtgatgacaaaattttgctttttgaagcaaaatcaagcggtttaatcagttcaattaaagaaacctgaggaaacacataaaaatccggtaatgcttctattatcttaaagaaaaaaattctttctgatgaattcataaaatctgttttgacataagaatactttttttgtttttttttacagaatagagctaaaattcctaaaacgagcagaacaaataaaacaggaatgatctgttcgaaaacattcatcattgcatcggttaaagaagtcatcattttaaaccctttcacatttaaaggcttataatgactcgctttttagtaaaaatcaattctccggtaaaatttcgacatgcagggaaagaatgatttcggttttgtcttgactgtcggattttgcgcccagccaaccgggcaggaaagacaaaccggcggcggattttgtgtctttgttttcgaccaaaccgcccaaaacgatcaattcggcattgttcgccgtgatatttgttctgatctcgcgcttgacaagcgtagggctgttgtttacgccgctggtcgtttcgctgaagttgctcatttcctgacggaccgacagatttatcacgttatccagtatttccggcgtaatttcaaaaataatgccgctggatcggtaggtcacgctttgcaccggctgaccgtcctgatatgtaatgctgccaagcgtcggcacgtcgttgccgacggtcagcgtcgccgtcgtgttcgatcggacgcgcaggctgggttcggatatcaatttaaagcggtcgtcgctggataatgcagaccagtaagcgttgatgtgtttgtccgtaaatgacagataattgaccagtttcgcgccgttactgagagcaagacctgcgtttttgaatatatcggcgataattgacagactgcttgcgtctgttttcttcgtcgttacttcgtatatcttcccccggataacgatttcacgctgccgtttgtcaaattgtcccaacagcttttttaattttgcgatttcaacgccggaacctttaaagatcaaccggttgttatcgccgctgaacgtgccggaaagcaatccggacaaagccgattttaaatccgaaacggttttatatttcggacggtaaacataaaagtcaaaatcgtctgttttttttacagaactgatataatccactccgccgcgcgtttccagttgataccccagactgtttaataatgtcagcaggttttcctttcgccgaaagtcaaacacccggacgctgatccggcgttggtcttccatcacttcgggttcaagaacgtaatcattgcctaaagtatcatcataaacgaccttgagcagctgcgctatcgtcatattgcccagatcaatattgacgcgcgggccgttcgtctgcgccggagaagtcataaaaacaatgcaaatcattaaaaatatgatgcgtttcataagttcagcccgcctttctgatcttctttcttttcaaattcaccggtaaattttgtaacggtttcgccgtcgatctttccgctcatcatagaaccgtttcctttaaagttttgcgggtattcaaaacgaagcatgccgtctttgtctccaacaacaatatgtcttgacgttccgacgcccagagttcccagtattcgccacctcttggaataattaacgcctgccgggcgaacaggaacgttgcgcggaagtgatgaagatgcaggcggcgatgtagaagatgaatttaaagatgttatgccggcatgtttatccgatttttggtatttatctacagaaaagacagaaaaaagagctttaaagctaaaaaaaagaaaaaatatcagcaggactaacattataaaaaaacgccgattaaatatattttgacgtttgtctacgtcagcttgatatccgccggtaacagaaaatgatttataaagatcaaacacccatttttcataaatgcggtttaatttattaattctcattttttgagcgccggaatatacaaaaacgcgataactccttttcgatccaaaatttttattctgaaccatgcgataagatgcctcgacaacatcgcgtaaaaatttttgtatgtcaccgatagattgatgtattaagacaagatcacagccgcgccctttagcatcgcaaaaatgccggtgttctcgaaagaatattttcgaattttcatttaattttgaagaataaaaattttgcgcttcgtcaataataaccagatcgcctggacggacaaaagaatactcgtcatcttgcctgaccggataaaatgaaggagatgttatatcttccctatcacatacaacaatttcacctatacagctttctggataattttctaaaacatacctttcaaatttgtccggcttaacgccgtcaatattcgtaacaatccgccgtccatcacaaaaagcaggcaataaaacatttttaacaacttcatatgttttgcctgatccgggccagccggtataagacgttatcgacatattgtcctacccgatcaccggtatgcgccggatcataaaacgcagcacaaaagcggacaggcacaaattaaagcctgtcgcaaatttaaatatatcaagaaaataccacatgccggcaggaatttgattaaacaggctgtctaatcctgtaacagacggtaatttatcagataaatacgctataaacgaataagtcaccatatacaggccgaaaaacagaacaaatttaacgattgctgttttaaatatgaaacctaaggccgaattaatagccgctacaacaattccgtacatttgaacctcacgcttttaaaactatggccaaagcacatatcgaccaaagcaacagcataatcacgccgattgtttcgcgctgatcctccattaagtcacaatgcgctgacacttcgtaagttttgccgaaagcctcaaatgacggacgaggacattccgaagtgtgttccggcacttgataattctgcaaagagggaaacagattaaagatcggatcaagaatatttgccgctgttggtggttcgtccaatgtcggctgattgacggccggataatcgcctaaatccaaattcacatcaatattgatattttgatctccaaccgtgccaattccggttcccggaaccgtcgggctgataataccgccgatcggttcgctgccggtatccgttccggttgacggatccgtcaaactgccggttccggtgtccggcgtcaaggtcgtcccgggcttgaccccgccgcccgttgtcaccgtgtcgccgatcggttccagcatatcgccgatcgtcggcggagctggtgaaacttgttcaattaagtccggcgtaattttccccggaacatacggttcgccggtataatccggctgcgccgccgtgtccttccaaagctgatccacaaaatcagacaacaaatccgttgacgctaattgctgtttttccgtttcagttaacgtgtccaaccattcatcaaaaggcttattcggatttgtaacaaccgtttttccccgttcttcacgaatggaagcgttcgcgtccgacgattgttcataaccggaagcaacatctggcaaagcaaaacaggctgaagaatcgtatttataatattgcccttcaccgcaaaccgtctgcggataaccggaataaccgatcaataaataagcagatgttttaacattgtcctttacccaaataatcggcgacatatatcctgtaaaacgaactttatagggaggacttgaattacgccgcccataataaggaataatatcgtcatttgtaaaataccagtaatccggataaacaagaacagaagtaaaagtacgatcatcagataaagtgtaaacccttaaataatctgtagaccaatgcaataatttaaatttttgcgcgtctttaaatgtagaaacaaaccagctgccttgcgggtcatattgaccttctaaggcagtaaaaccgccatacgtcgttaatgtcgttgattgcggatcatgatataaataattgccggtattgctgaaagtagtatcatctacaccattaacaaaactctgagccataccagaatttataaatccgggcgttgcgctaatccccggaactgccgcaacgggaatatcttcggcttctccggatttttcaacctgtgtgacaatgacttcatcgtttgatttagtcaaactgacacgtatttttttacccagttcaaacgcataatccccgacaaccggcaataacatagataaagccaaagtcagccagtttgtcttaccaagaaaagaagcggccgttaaggttttatccagcacgccggaagcgccggatactaagcgcagacaacggttgtcatttgccgccgaacagactttcgtcaatgtccttgataccagcgttttaaccgcgccggaagaatataccgccgcttggactgttccggcggtcaacaaagctaaaatcaaaaaggatacaaaacatttacgcatctaagccctttaccactgcccaggcgcacaccatgccaaaactgaaaaatattatgtaccaccattgaatcagcattttttgcgctcctattccgacttttcaaaaaatgcgctcaagtattcacgcattttttaaaaagtcgggaaagtgtgcaccctttcccaaactccttaacggccaaagaaaccaataactttctttgcgccataaacaattacagccaagccaatcaaaacgcctgcagcggcagcaatagccgcggtcgcatctgataagctgactgtttcaaccatatctgtcaacggtgtatctgaagctgtttcctgtgccatagcagccataggagccaccattaaagcacagcacaaaacagccgatttcttcaaaaacattttcattttttccatttttttacctttcactttctactgctgccaaatgccggacagccgcggcaatccgcctttctcagcggaattatctattgtcacgaaaagctttttcctcaagatattcctgccaatcttcatcagaacaataatcatctggatattcagtttcatcgtgagctgaataaaagaaacgaacaactaaatcagataaataatcagcaattaaaaacgctattaaaatcatacatacataaagcaaggcagatgtaatgtcgcttaaatctaattttgactgaataatatttgttagtgaattgtcagattcttcagttgaagtatttaaaccgcgcgcttcatattctttttttacatctgaataagaaacaaaagaatacaaagaactgccgtccttatacagggtaaaataatcgtttgaactataataaggttcgtcacaggcgctacaggaataacttattgatgaagaacacgttcctgtcgtacagcaatcacagtgataaactttacttttaaataaagttgcggattcaggagataattccgaatatgtaatttctttcagccagtaagataactgttcaggctccgtaactgtaaaattatcattggataaatggcaactgtatccgtccaaaaaacaggtggttttcagatcatgtaataaaattaaattttcgtctgatagtgatgtaactgatgccattgttacttcctaaacatatccaaaacaaaaccggcgccgcgggcgagcacaaaaaggcctaaaaccgtaccgaaactaaacgaaaaatactgcgccgcgattgacggatcgaaagcggtcggatcggcggtgaatatgtacccctctaccagttcggggatcatgcctgcaggacatatcccgttgtctccaacgccctcgatacacgtcaatatctgcgccattgtttaaaactccgccttaaattcttttaaaagacgaaaagctttaaacttgccgtaactcttcatgccgcgaacagtccattcaattttcgcttcgtaataaccggggacggtcacgtcccttaaaatc

SEQ ID NO: 2731 - DNA, 23207 bp, synthetic construct
  source 1..23207: mol_type = other DNA
  misc_feature 1..23207: note = Synthetic
ccgataatgcggtttcaacatcctgaacgcgaacggagcccccaaaagggagcaagccgtcaatcccgcggttaaaggacgctcttttatcgaattgtcgattttgcgcttgaacaaggaacagccgacaaaaccgatcagcgtaatgacacttataaaaggcaaagacaacaacggcaagcgggtgtagagataccctgtgacgtgaacaagtccgagttccaaaatacaccttgcccgaagttccgccgcggcgcgctcttttttatcagccggatgaacggaatcaaactgacgttcaaacaactcgtcggtcggcactctgccgtttgtcagatacgcgacaaactccgccaacgtcatatatttgcgaacaaaaattttggaagacatacaaaacctctttttaaatcaggaggcatattagcacacttaaaaggaatgatttaagcttatattttaatcgggttgcgttgtttgaaaaaattttgtaccttgtaaaaaggtaatttttggataaaaaagtcatcaaaccggaaatgtcctcaaaggaaagaaacatcggaaaaactgttaccccgatgttacccgcaggattttttaaggattgaaccgacacaggaaaaagaggaattaaacaaataaaaacaattagataagtcaaatcttaagatataaaaacttttcgccgtttttattctttctgaacatccgcccgcttttttcaaagcgggttttgttttaactaaaaacaaaaggattgttcagattatgaataaaattatcttgtctttgacggggacgttgctggtgtcggggtgtgccacgatcgtcaccggaacgacgcaaacggttaatatgatgacatcttccggcaaatcggcgaatgcgaccgtaacgtccgcgaacggaacattccccgtgattttgccccaagcggtcgcagtaaagaaatcgtccgaaattttaatcgtcaatgtgacggaaagcgattgcgttttgccgtcagcaacaatgatcatttcccatcaacaaccttggttttggggaaatatcgtttttggcggtctgttcggttccacgaccgattccgcttcgggcgccgcgtggaaatacgacagcaacactttgatcaacgtcattgaaaatgaaaggtgccgtcaatgattatcagcaagcttttgactaaattttttttcgcaacagccgccatttttattttgtccggttgcgcgaccgtttcccaaggaacaacgcaaacgatcaacattatgacgacggccaacaaacggacgaaagcaacggtaactttttcaaaggacaccatccctgtcttgttgccgcaagccgtatcagtcaagaaatcttcaaaagatttaataattacggttgaagaaagcgaatgtgtcctgccttcgaccattgccgtggattcgcacctgacgccttggttttggggaaatatgtttttgagtctgtcggggattcttggttctacaaccgattccgcttcgggcgcgatgtgggaatacgacaataacattttggtcggcgtcgcgcgaaaagatgattgcaaataaagtgaaaggcggcgcgtttttggccgcctttttcatatccgtttccacgtttgcggccgatgcggaatatgaatccaaagtcgttttcgattccgtatcgctggtgttggcggcggaaaagaacgcgtccccgtcatccatgatgggacattcgttccttaaaatatcgggcggcgggcgcgttcacgctttcggttattacgccgcgttggacggcggattgaaatcctatatcgccgcattgttcggcaatcaacgaggcatatacgttttaacgccctacacgtctaaagcggcggaatatcttttggtcgaaaaccgttcgctgtgggaattcgagctggatttgtccgattccgaaaaaacagtgctgaaacgggaaatcggcaaaacgaaaggtaaagaggacgcttattcgttcgtgtcgcataactgttcgtcagcgattgaaagtttgttgaaatcagccaattccgattacggttttgaccgcgtaaagccgtttacaacgcccgtagaatatgcacaattcctttacagaaccggaaaaatcaaaaacgtgtcttacattcgcgcgcccgataaaaaggatcggccggttaaaaacattttaaccgccgctccgccgtccagaattggcatagacacgaaatacgttgaattttcaccggtttatcaggatttgcgcacggtttccgatgcttataataccgaacttgaaaccaaaatgctgtccgcaaagtttgacacgaaaaatggccggttggacaaacttgatttgctgaaattgttttccgttcagcctgtttcaaaatattttcgcatcggatgggaaagcggcggcgttttggaagcaggcatcggaacgggcatgataaaacacggattttccgtttatgccgtgccaatggtcggcacgcgcgacagtcgaatattcgctggcttaaaaactggcggtgtattacatttggcggacaaggcaaaatttatcgccgagtacgaaaccgccacggacaccgacaagttcaccgcctatgccggcataaaagttcacgcaaatacggaactgtatattcaatatgaacacaggcacgcctgcgccgatagaaccgtcgtcggcgcggcggtgtatttttaagataaaagaaaagccccgaacggggctttcctttttgattttgcgggttatctgtccgtccggctggcggcgatttgcgcgcggatcatctttgatgccagatcccgcgcctgcgtcgtttccttgtttttcagaatctgccgacgtttggcgtcgccgtttttcacggccggccgtttcatccccttggtgcgcgggggaatcgtgtcggcgcgtgtcgggatgccgtccaaggccttggaatcgtccttccccgtcaattccttgcggatttcaaagtattttttcatctgcgtcatcgtatgatcgcaaacgtccagatactttccgccgttcaggatttcgggatcgtccttgaaatagttgccgtgctgcgtccacgcgatttccgcaatcgttttttgcgcggaaatcgacatatcgaacgtcatctgcgcgtccttgtccttgccgttcgcgatgtcgcgcagatcctgctgcatcggttccagcaaatagttggcttcgtacaccgacttcgttccctgctggtcgtaccacgatttgaacgtgtcggtcagcagctgatcgcccagctgcgcgtcgttcttgatcaacgctttcgtaaaggcctcggcgatcggcggatagtatttgtagaattcctgtttcggcgcttcgtcgcccaaccggaacatttcttcgcacgccgtcgcggcgtacgcctgcgcgtcggcttccatcgcgcgcatatagatcaggttcgttttcacgtcccatctgttttcctccagattggacgcgcggacgaactgtcccgcgtggcggcattcgtgacacatcgtgccgaccagcttcgcgtcggtgaatttcgggttcagcgcgatgcgcttgtgttccggatcggcaaaaccgaacgcgcgggtcttgctgtctttgataaagttgaagtgatagccgttgtccgccgcgatgcgcagggtttccaaaccggttttgctgcgcgccaaacggttgatcagcgcgatcatgcgcggccggtcttttttcgcgcaataacgcaaatcgacgtcaacagcgggcttttcgtcgggatattcggattttttgtacggcgcgaacgcctgtttcagcgtgccgaccagcttgcgctgcgccagaatggatttccagcgttccatcgtgttgcccatgctcatcgtttcgccgacgttgccgcggggctgtcccatttcgggcagacggcgttcaaacgcgtccttgttcgtcggcagagcgtcaaccgatttgtccggcgcgatccccgcgcgttcctgacggattttaaagaacgcctgtgcgtcggatttcgtgcgttcgccgacggaagcgaaacgctccccgtccagaaaatccggattttcggccgacaggtagttgccgtttttcgtccagccgaccttttcgacgacggttttggaatcgacgttttcggaaaaggtgtaaatgccctcgtcatcgttgccgccgctcgccagattgaagttttgttcaatcgcgtcgtgcatcggttcgatgatatagccttcttcgtaattctgtttggtgcgcgtctggtcgtaccaccctttgaacacgtcggcgacgaccgcgtcgttcaaaacgccctctttggcgatcgcctgttcataggatttgtaaatgggcggatagaatttggcaaacgtcgccaaaggccctttgtccccttggtcttccaattccttgcacgctttgacggcataggcctgcgcgtcggcttccttggcgcgggaatagcggatgatcgacgcgacattcagtttgtcgcggtcgggcagatccgccatacgcacggattgccccgcgtggcgggattcgtggcacaaggtcgaaaccagtttgtcgtcggacgccatgggccctaagccgatatagttgacgccgccgaaaaagcatccgaaacagttcgtcttcgcgtccagaaaaccgaatttgacgccggccttgttcgcgatttccagcgtttcgcgccccgcttcggatttggccaagcggttgacgatgtggatcatgcgcggcaattcgtcgtccgcgcacagcgacaaatcgacatcgaccgtcaatttttcgttcggatcgtaagtgatttgcggttttggttcttccataaccttttgcagcatcgaagaggtcattatttccataacttttgctccttagcgggaacggttggcggcggcgcgcgcgaaagcggccttctgcgcctgtttttcggacgcgtaacgctgtttgttgttcaaaatgcggtctttggcctcgaacattcccgccatcggcttttcgcccattttgggacgttcgcggtgcatataatccggacgcgtcgggatcgtttccaacgacggatcgggtttcatgccggtcagctcctcgcgcattttgaaaaattcgcgcatatcgcccatcgcctgctgggcgacatccataaacttgccgctttccagctgtttcgggtctttggtgtaatagttgccgtcctttgtccaacacgccagcgcgacgacctcttccgcggtcattttctgcttgtcatagaacaaagtcggttccttgccctgtttcagatcgtagatttccttggtcatcggttcgatctgataggcttcctcgtaaacggttttggtgcggatctgatcgtaccacgcttcgttcgtttccgtcatcacgtcgtaattgaccttgccgtgtttgtcataggacgcgcggaacgcctcttcgatttcgggatagcgggcggcgaaaatgttgtaaggcgaccggtcgccctgcagggacaattccttgcacgcggtaacggcgtaggtctgcgcgtcggcttccatcgcgcggaagcacatcaattccgaacgcacgtccatcacgccgaacgcttcgtgcgcgccgcggacgaactgccccgcgtggcgtgcttcgtggcacagcgtgccgaccagcttcgcgtcggattcctgcgggttcaggcgcacccaatgccccgcttcgtcgcacgcgccgcagcagcgcacgcccgcgtcgaaaaagctgaacttgaaaccgttgtccgccgcgatttgcagcgtttccaaaccgcacgggcttttcgccagacgattgaccaaagccaccatgcggggctgatcctccggcttgcattccgtcatgtcaatggcgacgacgggctttgcggcgggatcgtaatcgtctttgaaaacattggcgtcaaaaatctgctgtaacggcatgggtgaacctcgcttaaaaaaacttacgcgaatatagtagaaaagatcgtgattttgtcaatattttttataaaacgcccctccgtcgtcccgcgccgcaaaacagcatttttatttaaaatcaatttgatatgatgaaaaattaatttcttacatcataaaataaaaacggctcgttttatggacgaaaggttaattttccgattcccgacggaatcatatgaaaaccccgccgcggatcggttccggcgacggggagtgtttgaacggtcaaaagcgggacatcacctgcgccgcgccgccaaagacgcgacaatccgcgcggtcacgggattgatcttgcggtcgcgcatcccctgctgcgtttttccggcttctttcgtcgccggatcgttttcactgccgcgcactttcagcgtgttcaaggacggatccggcttttctccggtcaacttttcgcgtttggcgaaatattcctcggcgacatcgcgcgtttccggcgcgatcgacagcttgtccgcgttttccaaaacatccggacgatccgcccaatagcattttccggcggcgttgtgacaaaacaggttgaccacgtcggaggatttaagcttttcgtcatacggcgcgaaatcctcgtcttccatcatctcctgcatgacatcggtgatgtccgcctcgtacgcttccatcatatcgacatccttgtaccatccctcgaacgcgccctgcagcatcttgtccgtcacgggcgattccggatcgggcgccgcgttcataaacccttcggcgatatcgacggaatcctcggcaaagctgttccacggggcggcgtttccggaattgacgcggatttcgtggcacgtcgcggcggcggccgtttcggcgtccgcttccaacgcgcggttgtgcatcacctcgcccctgacatcgtaacatccgtattcggccgtcgcgccgcggatgaattgctgcgcgtgtctggattcatgcgccagcgtcgccaccagcagcccgtcgtccatactggggttcaaaacgatcatggcgctgcccgcttcgcaaaatccgcaagtgtccttttgcttttccattgtcagcgtgtatccggctttggcggcgtcctccaacacggcgcggccgaacggcgagttttcggcgatcgtgttgaccagatgcgtcaaccgcttgacatcggcggggccgcatttcttccccggacgcccgacgatttggatatccaccaacggcttttcatcgggataggatttattgggaacgttttttttgccgaaaacctgtttaggggttgaatttgccatttgaacctccgccggacttgtttaaatcaaatggaagatagcaccgttttgacaaaaacaaaacacattttttgtcaaaaacggataaaaaaacactccgccccgtttgaaaagatgttgccaacgcgcaaaatccgtcgtatattaaaggaagtgataaaccgctttccgtaaaggaggggatttttctcttttcgccggagaagagctttttatggttgaattttcgtctgttttcgggtaattttcccccgaacagctgattttgtgtttatcggagaataatctcctcttacaaaaggatgtgaattttatggtacaggttatcgtacgtgacaacaatgtcgatcaggctttgaaagctttgaaaaagaaaatgcagcgcgaaggcgttttccgtgaaatgaaattgcgccgcaactttgaaaagccgtccgaaaagaaagcccgcgaaaaggccgaagccgttcgccgcgcccgcaagttggaacgcaagcgtttggaacgcgacggattctaagcatcgcgaaaatccataaaaggcggaagagaaatcttccgtctttttttgtgctttttgcggccggccgttcatagctgccggcgattttgtctattttggaaaaattacgctatttcttgacacccccgccccgcccgtgctatatatattttaaagtatgcaggaggatatcccatggacaaaacatcgacagccgcacaaaaggacaaactttcgccggaacaggccgcgtccatccggatatcccgcgaaatggccgccaaactgaaaaccaagtgggaggatctgcaaaaacgccaaaacggccggcgcgtcagatcggacgaccgcatcagctccgtttccatcatccgcagccgtcagggcaaggaatccgtgcgcgtcaacatgggcgacggccgcgaaatcctcggcgcgtccatggaacgggcggccgccgaatttgaaaaaacggcgcgcaaagtttacgccggttccagaatcgaagaatttttaagaaagatcaaagaaaacggctgggatgccgtcgaaggcgaaatccccgccgaaatcaaggacgccgtgcgcagcgcgtgcgaacgcgcgaacatttccctgtcgtccaaaggcgaacgcgccaaggaacgcgaagcgtcgcagcgcgctgccgaaacggccgaccgcgccataaaggccgccgtccgtcccgccgcgcagccggccgcgttcgacaacaaaaaagcggccgatttcattgtcgccgccgccgtcgccgacttcgccgcctccgctttctgtaaaaacagcggcataaagatgatcaagccgacgcaacaacgccgcaagggatcgtcctccaaacgcgaaacaatcgccctgaaaatgccggacggctctttatttaacatcgatcaggtcggcgacaacatcaacgccaaccgtgtcaaagcgcaggcgatagccgaaactttgttccgtcgcgaaaaagggtggcctgcggaaaaaggcgacgaaaaactgttggcggccatggcgaaactgaaaatcgaaacgctggccgatttgctgcaaaaatccggccgcgtcaacaacgtgtccgacaaactgatccctgaaaaatacaaggccgctttggcgcaggaaaaagagaaagacatcaacaatttgaaaatattcaatgaaaaattccgcccgccaagagccaatggcggaaataaaaccaaacgcaccgccgaaaccgtatcgctggatatgcgggtcggacgcaatattgacgatatggtgcaggaatgccgcgcgaacaaaaatgaaaataaaaaactttccgccgaggatatgaacaaatacaccctgctcaacttttacggcaaaatgaacaaagaggacgtcatcacacccgccgctgaaaaattcgcggcgcaaatggcggaaaagggcgtttccggtaaagagttgttcgccaaatacaacaacggcaaaacgtcgcaaaaggaaatggaaagctatatcgccgaccgtgtcagcgggaaactgcccgcccccgccccgaaaaaaggcaaaaagaagaaaaaacagaacacggccgcctcccccgccaaaaaaacggccggcgcggaaaaaacaaccgcgaatgaaaaacggcgcgtgctggaacagatgaaagcggattacgcggcgcaaaaacgaccgcagcccaaaggattgcagcagcaaatcgccggccggcaaacaacggccgccgcgaaaacggcaacaggcaacaccgcgccccaccccgccgccaaacggccggtcgccctgtcccccgcgatgcaggcggcgctgatcaaacaacgcatcacgcccacgcgctgaccgccggaacgcaagccggaatccggataaccgcgacatcaaaccgcgccgcgctttcaaccggctgcaacacctgatcgccgcgttccgaacgacagcagcaccggatatccgatcgccgtactatcataaaccgccgccgcgtcacagccgaccggcggctttccatattcttttgataaaaagaaagggggcgacgcgcggtcaacccccgaattttgtgtgtctttgacacttgttagcggaaagaacacaaaataatcatctgctaaatgatatatggatattgccatattcaaccgaatagtgcaagatatttttagttgattttcacacaggggttgcaaatggattatattctgggattggatttgggatcgacatcattgggatggagcgttgtcgaattggataaaaccggcgtccccgtccggttggaacgcatgggcgtgcgcattttttcagacggacgtgacagtaaaagcaaggaaccgctggctgtcgcgcgcagaacggcgcgtggaatgcgcagacgccgcgaccgctatgtgatgcgccgcgaaacattgatgcgcaagctggtaaaatacggtttgatgcccgaaaatgaatccgaacgcaaagccttggaacggttaaatccatatgaactgcgcgcaaaaggactgaatgaaaagctgccgccctatgaattggggcgcgccttgtttcacatcaaccaacgccgcggatttaaaagcaaccgcaaaaccgatcgcaaaaacgacgaagccggcgcgatgaaatccgcgatcagggatttgaccgaaaaaatgaccgaaagcggcgcgcggactttgggtgaatacttgtataatttaaacaaagacaaaaaatcgacacagaatttcgcccccgtccgcgtgcgcacgcatttggaaaaaagcaaggccgtttattccatgtatcccacgcgagaaatgtacgaagacgaagtgcgccaaatctttttaaaacagaatttaagcgatgaaatcaaagccgatttgttccatacgattttcgatcagcgccctttgaaaacgccgccgaaaggccgctgtccctttgaaaaaagcgaagaacgctgctatatcgcctttcccgcgtttcaacgttttcgcgcgttgcagcaaatcaatcagctgcgggtacgcgacgactttaccgaagtcgaattgaacgacaagcaaaaacgggaactgcgccattggctgctggatgatttttcaaagctggacaaggattaccgcctgacgttcgcggcaattaaaaagattctgaaattgcccaaaaacgttaaattcaatttggaatccgaacgccgcaaaggattggacgcggacaagacctccgcgcagctgcgccctctgttcggaactatttgggcggaaaagcaggacgaaatcgtcgatttgctgctgaatatggaaaacgaagacgaattgaagcaggctttacggaaatacggcttgcccgatgaacaaatcgaacgggtgctggccgtgaatttgccggacggcacgggatcgctcagcttgaaagcgatcggtaaaatcaatccttttttggaacagggaatgatgtacgacaaagcggtcgtcgcggcgggatatgtgttttctaaaaaattcgacaagctgcccgataaatatgaatctttcattgatcccgaatacggcaccgtttttgatgaactgccctattacggacaggttttgccagaacaggtcatcggcggaacgggtaaggacgaagacagaaatgatgaagccaaatttttcggaaaaatcaacaacccgaccgttcatatcgcgttaaaccaagtgcgaaaactagtgaatgccttggtaaagaaatacggtcatccgaattcgatcgtcgtcgagctggcgcgtgatctgaagttgtcgcgcgacgaaaaaaaacgccttgaaaaagagcaaacgcaaaatgaaacggaaaataagaaaatcgctgaggaatttcaaagattaaattcggaaaaaggactaaatatcaaaaataattacgataaccgtatgaaatacaaactgtgggaagattcgtccaaaaatccgatgcaacgatgctgcccgttttgcggcaaaccgattcccgcggtggaattggcaatgtcggcggaatttgaaattgagcatttgctgccgttttcacgctcttatctggatgcgcgatcaaacaaagtactttcctgccgccggtgcaatcgtgaaaaaggaaaccgttcgccgtgggaagctttccataacgacgccaaacgctggaatgaaattctggcgcgcgcggaaaatctgcccgaaaacaaacgctggaaattcaacgaagacgcttttaaacgactgcaagatgaaaatggcgacgtgctggcgcgaatgttgaccgacacgcaatatatgtcgcgaatcgcgcggcaatatttgtgttttgcggcaaatccgaaacgggtttacggcattccggggcagttgacatcaaaattgcgcgagcattggggattaaactccattttaagcgaacagcacgaaaaggaccgcaccgatcaccgccaccatgcgatcgacgcttttgtcgttgcttgcaccagtcgcggaacattgcaaaagtatgcgacagaacggcgtgatttcggcgaaatgccgcaagaaaaagcaccgcacatccccttccctgcgttcagattggcggaaatcaaagaggcttttgatcaaatcgtgatttcacacaaacccgatcacggcaatccgcgaaaggcgatccggcaaggtaaaaccgtcgccaaattgcacgaagaaacatattacggcatgatcggcgaaggcgagaaaaaaggaaccgtacggttaacgaaaagagttccttgtttggcgtttacaaagtcgttcaaccctcaaaagaaaccgtataagctggaggatattgtcgatcaaaacagaacagcgaacaaaattcgtaaacgattggaaaattcagatcccgcggattacgaaaaaatcgttatggcatactttaacgaaagaggtatgaaacgcgttaaagtgtttgaagaccggaacaaaaatgttgttttggcgttccatgacagaaagacggggcaaccgtaccgttacgcgatttacggcggtaacgcgtatgccgaaatttactgtcccgaccgcggcaaaaacgccggaaaatggcagctggaaatcataccgaattttaaagcacatcagaaaggctttgttccgaactggcggcacacggacgcgcacgcaaaactgattatgcgtctgcacatcgacgatatggtcgcctatgaagaaaatggagaaaccgttattgcgcgcgtcaaaaagatgactggtaatttattctatttaagacctcatcatgtagcgaaagaagaagccgataagttgtcatgggctgcttctgcagaacaactcaggctacataatggacgtaaaatcaccgtcactattgacggcgttgttcttgattcaaaacgtccgaagggcgacacggatggatagaatcatcgaaattgcgcaagataatcgacacttggcgacggagcacggatttatgactgtcgccgaaaatggatcggaaataggccgcgttccccttgaccaaatcggcgcagttatcgccaacgcgcacggcttgacgtattccaacaacttgttagtgcgtctggcggagcaaaacgcgcctttggtgatttgcggcagcaatcacgtccccgtttccgttatgcttcctttggacggccatcatttgcagggcgacatcatcacggcgcaagcggcgatgaaacaaacaacgctgaaccgtttttggaaagaaatcattcaggctaaaatcagacagcaggcggaagtattggacgcctgcggtttgccggacaaaccattgcgttatatgattccgcaaatcaaaagcggcgatcccgaaaatttagagggacaagccgcgcgattttattttcaaacattttttggcaaagcttttcgccgcgacagaacgcagcaaggcatcaacgctttgctgaactacggttacacgattttacgttccgccgttattcgcgcgattgtcggcgcgggactgcatccgtccttgggcattcaccattgcaaccaatacaaccctatgcggctggctgacgatttaatggaaccgtttcgtcctctggttgatttttgcgtgcatcggctggtcgttgacaaagtggaggaagtcaacaccgccgccaaaaaaagattggtttccttgctgtcatgcacggcacaaacggacaaaggcgcgattgaaatcaacacactgattttaaatttggccgtttcaatggcgaaatgcgcgttgggacaggcggaaaaattggacttgccgccgccgatgacgggaatggcgctgtggggattgtgaatgtcggtaacggggtataatttaatgtggatgatggtcatgttcgatttacccgtaactgaacccgaagaacgcaagcgcgcgacggcgttccggaattatttgctggacgaaggttttgagatgagccagttttccgtatatctgcgtttttgcggcacgcgcgaaatggccaatccgtttgtgaaacgaatcaaagcgcatattccgcccgatggaaatgtcagtattttattttttacggacaaacagttcgcggatatcattacatttcagaatcgaaaacccgtttccatggctgaaacacctgatcaactgacgcttttttaaccttggaatatagaaaaaagcctttgtttccaaaggctttttccaatcatattatagcagatggttattttgtgtcaaaccacaacctttccaggtgtttttaaaggaaaacggtattatagcagatggttattttgtgtcaaaccgcaactcaacctaagtggtggacttcaaataagaaattatagcagatggttattttgtgtcaaaccgcaacttccctttcagccgtaatcaaatcgccataattatagcagatggttattttgtgtcaaaccgcaaccagcgggagtaaaatatgaagacaacaaacattatagcagatggttattttgtgtcaaaccgcaacatatcccgtcgattttgttggttgccgattattatagcagatggttattttgtgtcaaaccgcaacgaacacgccgatgaattaagagagcgtcaaattatagcagatggttattttgtgtcaaaccgcaactgggtggtgcgatatgaaacattcctcgaaattatagcagatggttattttgtgtcaaaccgcaactaatgacccttctaaacttctggactttatattatagcagatggttattttgtgtcaaaccgcaacaacgtacactttcaaccattcgcgacgttgattatagcagatggttattttgtgtcaaaccgcaacagaaatggaagcacgctgtcggcgtggcgaattatagcagatggttattttgtgtcaaaccgcaacccatatggtctttgcgatattggtgaagttattatagcagatggttattttgtgtcaaaccgcaacgcgaagccaattcggttatcattccgtcaaattatagcagatggttattttgtgtcaaaccgcaacgattttggttcaatgctgcttggcgctcagattatagcagatggttattttgtgtcaaaccgcaactattcgtgcgacttttcgcccaatttgattattatagcagattgccaccccatatcgtacaattttttgaatataaaatataaaaaaattacaagtaacaagttctattctgtatattaaaaaaaacatttaaaagttacttttagttgcatataaaaataagccaatagtaatctgactccatcttttctgtctttaacaacatcatgatttatacgttcaaataaattgttttatctaaacaggggagaggtatctctcccctctgtaaatatcagcggatgaaattcgttcgttcgacgggttcgcgttccagcggcgtgatgccggctttggcggcggcttccttgcatttcagcaggtatgccatgtttttagccagaatacgcatattctgcatcccctctttgtcctgccggacttcgtcgggggtgttgccgtgaaccatattccaataacggccggaaacgaccggcatttccgaaatctgaaaatacttgttcagctgatccaaagccgccgttgcgccggcgcgtctggcgcaaacgaccgccgcagccggtttcaaacggaaaacgtttctttttccggcggattcggaataaaaagccctgtccataaaaggggtgatcacgcccgaagccgccgcgtaatgcaccggtgatccgaacacatagccgtcaaatccggccgccgtttccacaaattcgttcacgcggtcgtcaataacgcatttgcccaattcggcacatttgcggcacgccatgcacgggacaagcggtctgacgccgatttgaaagatttccgcgccgacgccctctttttccaactgggcggcgatttccgtcaaagcagtgtatgtgcatcccttttcatgcggcgaaccgttgaccaacaaaactttcatagccttatcctttcaaaaagcgggtacaaaaaaccgccctgttcaggcggtttttcggtttaacagacattacgattatctggctttgtaatccatagcctttttcatcacgacctgctgcggcgccgtggcggccggcttttgctggtactggcgttttctcgcttcgatcgcggcgcggcgttcgtcgtaattctttttgaattcttccgttttgttcacgtcgcgctgttgatgtttctgcgagaatttcgccgcgatgatgtcataagcgtacgttttgaaatagccgctgttggccatcgattcgtacaaagccaccacgcgtttggcgtcgcgctgtttgttttccgtgcggccggggcgtttgaattccgaaatctgcggatctttgactttggaattttcgttgcccgcctgacggtagccgttcaaaatgcccgcgatgtctttgaaaacgggaatttccttgatttcattgaccttgatgtgcattttcggacgccagttcttccacgggatacggctggcgccgccctgttcaaagactttcaggtctttgccgccctctttggattcggaacgctggcgcgtgccggggatgttgcccatatagttggtgcggaacatatccgagaacgggaacaacagcattgcggaacgggattgccccagatagtcggcaaccgcctgttcgtatttttccggacaggaacgcgtgtcgtgcgcggggtcggtcacggcgtgtccgccgacgcgatcccagcaccccttttcgttcaaagcccagttcagggcgcaacgctgggattcgtactgacggaattccatatcgcgctgctggctgctttcgtaatatcccaagtagtctttcaaatgcacgtcgcgcgccgtccattggctggccaaagacggagtgtcgtgcgtggacggagccgccgtcgaatactgcgggtattcttcggggtggcggaacgcgttgttgtttccgccgtgctgatatccccattcgcgttcaaacggcatcacgcggtaggacaaaatcccgtgatccatcagcttgtcctgaaatccgggaggcagctgccccaagtcttcgccgatcaacatacatttgttgcggtgggattccaacgcggcgaccgccatcaaatcatcgacggggtagtacacgaacgcgccttccttggcggatttgccttcggggatcatgtacaaacgcgccaactgcaaaacgtgatccaaacgggtgcagccggccgttttcatgttgttgcgcaacatttcgacaaacggttcgtaagccgtgtctttcaacgctttcggcttgaagcccatcacatcccagttctggccgttcggcgacagaacgtctgccggcgcgccggcggaagccttcatatacagatccttgcacccccatccttcaaatccgaacggagcggaaccgacggcgatatcggtgtacaaaccgattttcataccgctttccttgcaggttttctgtacgttttccatctggttcaacgtttcaaactgcagataggtatagaaaccgacgcggtctttgttggcttcggcgaacgccttgacttccggcgttttggaatcctgatattccttcggccaatcgcgccaatcggtcagcttcggttcctgcttggcgaaatgttcacacagcgtctggaacaccgcaaaatcctgcagacgttcaccgccgtcgcgcttgaacgcttcaaatttttccttacgttccggcgaaccgtttttcacgaactggtcgtagcatttttccaaaacgggtgttttcagtgcaaacgcggccgtgtaatcgacatcaacgccgtcctgcgccttgcgccgtttcgccgtgtattcgggcgaatcgtacaaagccgtggcttctttgctctgctcgaattcagggacggccgtcacgtcaacataaacgtggttgaaataggtacggctggccggcgaatacggcgaagcttcctcggccgcttcggggaacatggcgtgcaacgggttgacgcccaaaatgcccgcgccgcttttaccgacggtatccgcgatttccgccaaatcggaaaagtcgccgatcccttggttttcatcggaacgctgttcatacagctgaacggggacgccccacgctttgccgccgtctttgatatcaatcgggtcgtagcatttcgtcggcgcatagatcatgcgggtggatgccttgggctgcccggggatatccatttccagcgtgtgatatccgatatcgaaatcggccggcattttaaagccgcgcttttcatatttgacgccgttgatttcgcgtaccatcggcttgccttcgtcgtcgtatttcaaataagtgtcggcgattttaacggttccggcctgcgtgttgccgttttcctctttgaccgaccagctcaactgttcgctgtcttttccggcgggaacgacgaattcaacctctttttcgcggtctttacgcatgacgcaaacgggccccaagggagaagcgtactgcgcatccaaagccttgttcaacgtttcattgatgtcgcgggcgtattcctgatcggacatattgccttgcggtttcaacacgtccagcgcgatcagcagggactgcttgttttcaatcgtcgcataactgtcgatacccgccatgacggccaagcgatgtaattcgtattcatttaaaatagccattttagacctcgtaattgaaccgttaaaatctgattagtaagaatagtatgacatctttttcggattttccagttttttttggaaaaaaaaatcatttttccggaaaaaacatttgcgtcgttccaatgttccgacggccgaacggccggccgcccccgttttttatgaaagttcaatcggatacattgtattttaaggccttcagaccgcccaaaacttccctttccgtcagataaaacgccgcaaaacgcaccgacaacggacgcaatcgcaaaaatatagccgtaaaaagtttccggaaaggataaagcgcgcgtttttatgtcgttttttcaaaaacagactcggcgtcgtttgccggtttggaatttcgcgctttttcaaacaacgcggccagcccgtcccgccccttttcccgcgcgatcgccgccgccgtccggccgccgtaaacgggcgcgaacggatcagcgcccgcatccaacaacaaaacagcgattttttcatatccgcgcagcaccgcgtcggccagcgcctcgtcccgcgttcgggctggagtcgtcagcaaaaagcgcgcgctttcctcttttccgtgcgcggccgcgccgatcaaggcggcatcgacatccccgccgacgcgctcataaagatagcgcaccgtcgccgccgttccgaacgaagccgccgcgacgatcgcccaatcgtcccgcgcgccgccttgcaccagacattcgaccaacggcagccgccccaattcggcggcgttgcgcagcgcgccggccaaatcggcgggtttcgcgtccggaatcgcccgccgcagcgcgtccaaatcattgttcttcaccgcctcgaaaacaccggtcacgatcgccctccgccttttaacggttcaagcttaaatcaaagcggaaaaaaatcaacaaaaccctgcggttttcctgaaaaaagcgtgtcatttcgttgacaaaaaacgcgaaatgtgaaaaaatgagaataagaaaagaatttcttggaaagaacggtgaatagaaatgtcatctgcgaaggtatcttcaagcgcgcccgtagggcacacggcgccgaccgttaaattgaacggcgtccgcgcggcgtcccccgcgtcggtcagcgcgtccgtgtccgctttgaacgattcgaccaacgtcggcacgtccacagaccaatacctgcccgccggcgacgatgcggccgttcccgttttcgaccaaaaaccggaggaagaggaactccccctgccccgcgcgtcattgaacgacgacgacgcggccatgcggatcgggctgcagtttatggaacacggcgcgccgtttttcaccattcaagaggttgaacaacgcgtcgaaacctatgaacgcaccgttgaacaatccgacgaaccgttacgcaaaaggacgcaggggttcggatagaaccaaacaggaaaggaacgcgccatgaaaatcgcatccgccgctttgtcaggcatccgttcggcgcaaatccgttttgaaaacagcgcgaatcgcattgtcaacgcccctttcacccccgaaacgtccggcgaaccggccgtaaatcccgtcaccggcgcacaggcggttggtgttccgtcacccgccttcaccgccgcggaggatgtttacacgcaagaagccgtcaatatgacaacggccgttttcgcctataaagccagcatttccgcctttaaaacatggaacgaaacaacgcgcgaaaccattgccgccctgtccgtttaattttttttcaaaaaaacaaaaaaaactattgacctgagagcgaacgggctatatgttgcgacgtgttaagggcgtgtagctcagctggtagagcacttgacttttaatcaagtggccccgggttcgaatcccggcacgctcaccaaaaaaaccctcgtgatcaatcacgggggttttcttttgccggaattcccccgttcacggggcggccgttgcgcgcgggttggttttagctttttcggatacggatttgatattcaaaacgcaggatggttttaaattaaatctatcccgcggttttcgtttaaggacaggataaaccgccccttaatgcccgttaaaccatcgtgcgaccgctcgaagtcggcgcggataaggaagaaccgcgcggcgtgttcaatatccgtcagtttttccggcggcgacgatgccctttaaatttttggcgagatttggttaaaaccaaccggcacacgacagcggcacctattcgcacgcggctttttcaccacggcgcgtccgaaaaattttatattgaaaaatatgaaaaggctgatattttaacaactgggtccatagctcagttggttagagctgggcgctcataacgccttggtcgggggttcgagtccctctggacctaccaaaaaacctccccgtgcgggaggtttttctttgttccggcgatttcgggcggccgttccgcgcgcgggatacttccaactgaaaaaaaacgcggaacggccttaaactcaaaccattccgcgtttttgttcaaaccgaccggcttaaccgatcatcttttccaaaacgtccgcgaccgaatccaaagcagcggtgttgatttcctccaccgttccggcgtcacacgccgccgcgacggcggggtcgatcggcaaacgcgccgtgtgttcgattccgtattcgacggcggtctttttcaaatgcgatttgccgaagatttcatattcccgtccgcaatcggggcatttgaaatacgacatattttcgaccagcgcgatcacggggatgttcatcatcttggccattttcacggcctttccgacgatcatcgaaaccagttcctgcggcgaagtcacaaccacgatgccgtcaaccggcagggattgaaacacggtcagcggcacgtcccccgttccgggcggcatatcgacgaacatcatgtcaatgtcgccccaaacaacgtccgtccaaaactggcgcaccgttccgccgatgacgggaccgcgccacaacacggggtcggtgtcgttttccaacagcatattcaccgacatgatttcaatgccgccgtccgtttcggcggggaatatccccttttcattgccgaacgccttttgcgtcacgccgaacgccttggggatcgaaggccctgtgatatcggcgtccaaaaccgccgttttacgcccgcgccggttcatcgcgaccgccagcatcgacgttaccgacgatttgccgacgccgcctttgccgctgacgacggcgatcacctttttgattttgctgccggcgttcggggcgtccttttgaatttccttgcgttccccgcatttcgcgccgcattgggaacagttgtgattacattccgtcataaccgaatctccattgttttttttacgttcataacccgatcgcggcgcgccgtcaaccttttgacgctttaccgcggcgcaaaaagaaaggggattttcatccccctcctttgatttcattgtcagtgacagcggatgctttcgtccgcgtcgtcctcctgccccatcaaagcctgcttcgccttggccttgttttcctcttcctcctcgttccattcgatcgggatcaaaggacggatcagggcgcgtttcaggacttcctcggcgttggaaacggggatgatttccattccctttttcacgttgtcgggaatttcctccaaatccttttcgttttcctgcggaatcaagaccgttttaatccccgcgcgcaacgccgccaacagcttttccttcagcccgccgatcggcaaaaccttgcccagcagagtgatttcgccggtcatggcgatgtctttggacacggggatgcccgtcatcgcggaaaccagagatgtgcacatcgcgatgcccgcggacggcccgtccttgggggtcgcgccttccggcacatggatgtggatgtcgcgtttgtcgaacagatccggacggatgccgaattgcaccgcgtgcgaacgcacgaacgaccgcgccgccgcgatggattccttcatcacgtcgcccagctgccccgtttgcgtcacgcggccgtggccgggcatcatgacggcttcgatcgacaggatttcgccgccgacctccgtccacgccagccccgtcgtcacgccgacctgatcctgtttttccgcaacgccgtaagtgtaaacggggatgcccgcgtattttttcaggttgcgttcg

SEQ ID NO: 2732 - DNA, 14660 bp, synthetic construct
  misc_feature 1..14660: note = Synthetic
  source 1..14660: mol_type = other DNA
ctcagtcaacgtcgaagaaatcagcacggtttcctccgtatcgggcggaacggcggaagtgtcccgtttggacaatgttcaaatggaagaactgctgatgttcccgaacgatgttatgggactggcgttcactttggcggaaaattccgtcggcgtcgtgtttttgaacaatcccgacgaagtcaaagcgggcgaccgcgtttaccgcacgggacgcgtggtcgacgttcccgtcggcgaccgtctgctggggcgcgttatcgacccgctgggcaatccgctggacggggcggggcggattgtaaccgtcaaccgccgcaaaatcgaacgggaggcttatccgattatggcgcgcgcccccgttgccgttcctttgcagacgggcatcaaggcgattgattcctttacgcccatcggacgcggtcagcgcgaattgattttgggcgaccgtcagacgggaaaaaccgctttggcagttgatgcgattatcaatcagaaaaacacgggcgtgatttgcatttattgcgcgattgcacagcgcggcacggcgattgcccgcgtggttgacaatttgaagaaatacgacgtgatgaaaaacacaatcgtcgtggcggcttcgggcgacgaaacggcggggatgcagtacatcgcgccttacgcggcgacggctatcggtgaatactttatggaaaagggcaaagacgttctggtcgtttacgacgatttgaccgcgcacgcccgcgcgtaccgcgagctgtctttgctgttgcgccgaccccccggacgcgaagcgttccccggcgacatcttttacattcattcgcggctgctggaacgttcgacgcgcttgaagcccgaattcggcggcgggtctttgacggctttgccgattgtggaaaccgaagcgcaaaatatgtccgcgtatattccgacaaacatcatttccattacggacggacagatttatctgtcttcgccgatgttccaaaaaggcattctgcccgccatcgacacggggcgttcggtgtcccgcgtgggcggcgacgctcagctgcccgcgtacagcgctttggtgggaccgttgaagctggctttttcgcagttcgaggaattggaaagctttgcgaaattccgttcgcacttggacgcggaaacggaacgtcagctcaaacgcggacgcgccattcgcgccgtcatgcagcaaaagcagttcgcgcccgttcccgtggtcgaacaaatcgcgattttgttcgcgacgaccgaaggcttgctggacaatgtggcggacgatatgcgcgaaaaagcgtacagagccatcgcgtcgctgatgaaaacaaagcacagggacacgacggacgcgattctgcaccgtgaaaagctgactcccgaacgtaaaaaagcgttggcggaggatattcggtcggcgctgattaacgaacatgttgtgacagccaagcaggtgtgagcatggacatcgaaggtctgcaaaaacgcatcaaaaccaccaacgatttgcgatccatcgtttcgacgatgaaatcgctgtcagccgtcagcattatccaatacgacacggcgctgaaatcgctgattgaatacggacgcacgattaacttgggcgtcgtggctttgatgaaaaacggcgatttgcagattccccgcgaccctcagctgaagcccgaagcccgccgcgctttggcggttgtcatcgggtcggacacggggctggtcggcaaaatgaaccgcgaagtcgtgcagtacgcgcaggattttctgcgtcaaaagggctttacgcttgaccaagtgaactttatcgccgtcggacgtcaaatcatcggtcagctgatgcgcggcaagcaaaacgtcattgaagcctatcccgtttcaaattcggtcaaggcggtcagcaaaacggcggcttccgttctgattacggcggacaaatacattcatacgcaccacgtgacgcacgtttacgttttttacagcgaaaaacgcggcgtcagcgtgtccgcgacggaaacgttgctgatgccgctgggaacggagtggatggaacggttgaaaaaacgcggatggcccggacgcaatctgccgacgtacactttgccgcccgaaaagatttactccgccctgctcaaagagcgcttgctgattgaactgtccaccgcgataacggaagcgttgtccgccgaacatcacatgcgtttgacgacgatgcaggcggcggaaaagaacattgacgaaaacttggaagcgatgaacttgcagtatcagcagatgcggcaggaaaacatcacgaccgaactgctggacgtcgtcaacggcgccgaagcaatgagaaagaaaaagtgatgccgcgcttgattcgggaaatccgccgcaggacgcgccatgttttgccgcctttgttttggctggtgctgacattttatttcggatggcacgcagtcaacggcgaacgcggcctgcgccgcatgtttgaactgaagcaggaaatcgccgttgccagacaggtggccgaggaaatcgctttgcgccgcgcggaaatggagcaaaaagtccgcatgctgtccccgcaaagcattgatgtcgatatgctggaagaatctgcccgctccatgctgaacatggggcaggacggcgattatatcattttagaaggttctgaataatcaaatcggcatcggggatgtatttgaacgtcaaaaacacggcgattgccgcgtaaatgcccgcaaacacgtcgtccagcataactcccgtcgcgctgtgaagcttggagtccgcccagcaagcgggatagggcttggtaatgtcaaacaggcggaaaaagaaaaacgccgccgcataccccgtaaccgtcatcggcgcaaccgtcaaagccagccattgcccgaccacttcgtcaatgacaatcaatccggggtcttcgactttcaattcgttcatgacgacttttgccgcccaaacaccgatgaaatagacggcgacgcttgcaatcagcagtcccgtcaatcccgtgtagtgcatcagcgcccagccgaacggcaaagccgccaacgatccgaacgttcccgatgcgacgggggctttccctgatccgaaccacgtccccaagataaaagcggcttttgtttttgcggtcattttttgcctttcgataaaaaaaagttttaaaacgcttttatcatatagtatgattcccgaaaagacaaaaaggattcttgcgactgtggacaaagaaatgacaaatcacaaaccgtcattgttccgccgctggttcaaaccgcgggaagttttaattcgcacggacgcggacgtcagatgtttccgagtccccgcgtggacacaggcggcggctgtcggaacgttggccgccgtagggctgtggggcgtgtttgcatcgggatgttttttcaatacggccagacttttgtcagaacaggacaaacgtgcgcgcaccgcaacgcaggcgtatcagattttgttgggcgaagtcaacgctttgaacggttactttgaaaaaatagccgacgaactgaattcaaactatgccgaattggatcgactgcgggaaatgaacgttcccgcctcatccgttgtccggaaacaacagtttgatgaaagtgtcgatgcggaggatggcgaaaacgaagaaaacgcggtgcaggagcggcgcgcattgctgcgggcgcagaccgatgccgtcagagccagactggtcgagcttgcgcgatctcccgtttcggcggaggcgggattgtacaaagcggctttgcagcgcgacttggccatggcggattccgaggtcttgcgcgacagagtgcgcaaactggaaagcttggtttccgccatgcaggatacgcaggttttggcgttcagaaaaatggcgtccgtcgccaacgaaaatatcaatgccattgaaaacggcttgaatgatgtcggtcaatctttgcaggcggcgggactggggatgaattccctgctggggcggattcgccgcgacaaggaaaaaacaggcgtcggcggtccgtttattcccgctccgatgccgcacaaaggaaacaggctgaatattgcgctggccggcttgaatcaacggctggataaactatatgatttaacggcactgcagaatgctttgccgattgggaaacccatcagccgaatccgtgtaacgtcgccgttcggcgcgcgcgaagacccgttccaaggcgtccccgcgcggcacgaagccgtcgatttgggcggcatgacgggcgagcctgttcatacaaccgctcccggcaaggtgattcgcgcggggcggtggggatggtacggaaatatggtcgaaattgatcatgggttgggattcagaacgcgttatgcccatatggacaagattcttgtcacaaaaggcgatgccgtgcgcacgggcgatcaaatcggaacggtcggcagcacggggcgcagttcggggtctcatttgcattatgaaatccgcgtcaaggggtatgccgtggatccgatgagttttatgaaggcggaaagaaatgttttcaaagattaaacacgaaagcggagctaaagttctgaataacgacagacgtcccaaatcaccgacgattatcagttcggatttgacgataacgggcgatttggtcagcgaaggtgaggttcatattgacggtattgtcgaaggcgatatccgttgccggctgttggttgtcggcgtaaacgcgcgaattacgggcgccattcaagccgatgttgcgaaagtgcatgggaacgtaaacggtttgctgtgcgcgcgttcggtgtttttggcgacgacggcaaaagtaacgggtgatataacgcacgaacgtttggaaatcgaacaaggcgcgtatctggaaggaaactgccgtcacatggacgacccgattccggcggaacaggggcctgtcgatctgatgctgacggatgaacgcaaaaacgcgaaaaaataattcatgaatgacgaaaccgattttcaccgccgcagaaaagcgttcgttttgctgacggatgccggtattttgctggcgcaggacgggtttgcggggtctcatgcggatttgctgaagcaggcgggctttgtcgaaagtcaagcgcgtctgattatcgaaagcatgcctcgcggatatgctttggatggaaacgtgtatttttatcaaggggcggactttgacccgttaagcgatgaaaatcgcaaaacggcaaggctgtggttgccgtttttcaaacaaaacgggctgctgacgggaacggcttttgacgggatgcggcgcggggctgtcggacggccgtggcaacccgttcggaatttgtgattttttttcattaacgctttgacgtgaggggggcttttgggctattcttgcgtcaaacattgttttttacatttggaaaaggatttttcgatgtctttacctcttatgcccaaagcgaccgccgtttggttggtcgacaacaccgcgttgacgtttgaacagattgccgatttctgcgggatgcattccttggaaattcaagcgattgccgatggcgatgtcggatcgtccatgatgggacaaagtccgattgccaacggtcagctgaccgctgaggaaatcaaacgctgtgaagccgatccgaaagcatcgctgaagctgaatgaaagcgatttgcctgcactgtccgtccgttccaaaggggcgcgctatactccgatggcaaaacggcaggacaaacccgatgcgattgcgtggattttgaaacatcatcccgaattgtccgacgcgcaaatccgcaagctgttgggaacgacgaacaattcgattgacgccattcgcaacagaacacattggaacatggcgaacatcaaggcgcgcaaccccgttttgctgggactgtgcacggaaatcgatttgaaaaaagcggttgaagtcgcgccgaagtctttgaaaaacgaagcggctcctttggatgtcgaagacgccgaagaataaggatgaaaaacgatgaccgatgaagtcaaagatgtaaacggcgttgatgccgccagactgttgagctatatcgaacgcgtcgaacggctggaggaggaaaaaaaagctttggcgaacgatatcaaagaagtgttcgaggaagccaaatccgccaatttcgatgtcaaagccttgaaggccattttaaaaatccgcaaacaggatgaaatggaacggcaggaggaggaattcatgttggaaacgtacaaacgtgcgttgggcatggattaagatttttcgataaaacaaaacaggcgaaagtttttaaccttcgcctgttttttatgtgttttgaaaggggtaaaaaagtgccgccgcctttaggggaaaaggcggcggctttcagattcctttaaggggttggaggacgcaattagggggttgcgtcaaaggaatactgaacttgcaaacccaacacgtgggctgttgtctggtacttggcatcaatcggatcaaccgaatgaacattgctcaagctgtgacggtcgttgtgtacagaataatgcggcaaatacaggaacatataccccatatcgaacgtccaagcgtttttcttgtagctggcgccgacggcaaattcccaacggtcgttgtcggcaatcgctgttgtgcgttcgtgcgaattgggaacggggctttcgtcaaaaccgatacccgtgcggaacgtccagttttcggaatgataatagtccatgccgatgctgatgtcccaggtgtttttccaacgctgggcaacttccacaggagaggcgaagtttttaatccgcaacgcgtcaaaccgagtccagcgcgtccatttggcacctgcgctcaaaccgattttgtcgttcagcttgtggaacgcggacagggaaaccagttcgggagcgtccatgggcaaagttgcaggaacggttttattcaaatagcctttcattatatcaaagtcgcctttgatctgatgctgtgaacgcgaacggtatgcaatgcccgcgcgggtgtttttggtgaattcgtacattgcgccgacattcaaaccccatccccagtcttccaaatcgaattcattttcaaattttacgcccggggcaatcgttttcgatgatgtcaaatcgacattggcgttgcgcgcgaaaatgcccaagcccaacgacaatttgtcggtcgctttgacggcaacggcggtcgaatagtcgataacggacaattcggaattgatgccgtgatccgtgccgatccaatccttggggtattcaatcgccagaccgaacggaacataaacgccgaaaccgacggcaacgcggtcgctgaccttgtattgcgcaaaaaagttgggaacggcggttgtaacgtcaacgttcgtcgaatcggcgacgccgctgtaaaaaccgctgcgataagctcctttgacatccgaatgtaaattgatgacggaaatgcccgcctgcatgcccgttccgcccagcgtcatacccgcagggttgtacgccaaagcggaatagtcgtcgccgacgacaccgccgcccgcgtaagctctacccaagccggcaacgctgaaatcatttaactgccaacctgcggcgttggcggaagtggaggcgcaaacacctgtcaacgccaaagcaataattttagaagtggtcttagccatcggctttatccttggtttcctttttgtaaagggcgataatcgaacgcgtttgtttaatcatcagggaaatcagtttgtcgatttccttgttcccatagtcttgccatttaacgtgcttcagcacggtttgtttgcggactttgaacgaaaacagcgacgcgaacagcgggaacgtgtacagcgtgatttcctcaatcgtcgcgttgtccgtcgcggcggtcgctttgataatcaaatccgcgaaaattttgtgaatcgggaaaatcaatccttcgtacagcgtggaaaactcctcgcccggattggcatattcatgcaaaaacactgtcaccgcttcatcgggcagctgtgtggaatacaacagctctcccaacgatttcaaaatgccgcacaaagccgtttccgcctgttcgggcgttgaatttttgtcgctcaataccgcgacggccgattcaatcgtttcgtcaaccgccgtcctgacaccgtgaacgatattttccaaaacagcacggtacagcccttgtttgccgccgaaataataggcgattgcggaaatgttcacatccgcggcgcgggcgatttcacgggttgatgtttccgtgtatcctttgtccgcgaaaacggcggtcgctttttccaacaaacgttcttttgaatccgtaggcatcgaaagagctgtccttttgtttaacgaaacagtgccactttagcatataaaaattaaaagtcaatcaatcgtttgaatttttttaaggaaagagcttattcgctcaaaagcctttgttcttcaacaggttggacggttattgcgccgacggggcaggcgattttacacgcgccgcagccgatgcaaaggtcggaatcaaagcggggaaagtcttcaaagcgttcttttttgacggcgtgtttcgggcatttcatcacgcacagcccgcatttgacgcatttcgattcgtcaacgcccgccaatcccgtttgggtgcgccgtttgtcggacaggctcaaacggcgaatcgctccagacgggcagacgtcgccgcatttatggcagtcgaacgcgcaaaagttttccgataaatcgatatgaacggcgggataatccgaatcggcgtttttcaaaatcttcatcgggcagttttgaacgcataaattgcagttcaagcagttgttggcgaacttttcgggactgcgcgcgccagcgggaaggatgacgcttttgactcttgccgcgatttttttgcttacaatcgcgccgcttttgaacgccaggacggcaaatgccgccaatcccgccccgccgattaacattttgcggcggctttcgttcatggcgagcggataggcgggaatcctgccgaaccgaatcccgccgcgcccgcatacgcccatgcacttgaagcatttgatacaggtttcgttgtcgacttttttattcttgtaatcaatgctgcccgtcggacatttcgccgcgcacatgccgcagggaacgcatttgcggttgtcaatgccgacttgaaaaaacgaatgtttggcaatcaagcccagcaccgccccgacgggacagatatgaacgcagaaaaaacgtttgccgaacgcaacaaacagcgccagaacgaccgccgccccgatgccgaggtaagtgccgcttgccgccgaaccgaacagggtgtaggggtcaatatagcgcacaaccgctgccgatccgccgattaaaacgccgaacaccaaagcggcaagaacgtatttgaacggattgcttttgcgcacggggattttgcggcgaaacagcagaccgacaatctcttgcaccaaaccgaggggacacagcgtcgaacagtagattctgccgaacaacagcgtcaaaacaatgattcccgcgaacaggcaggcggcaaacaccgtgccgtccagaatcgtcctttgcaaagcggcggtgaattgaacgtcaaggattttgacggggtagtctttgcccgaaaacagtaaaacaacagcgcccaaggcaatcagcgcgacgacaaagcgcaggtatttcaaagctttcatatcagccgctccttcttacaaaccgcagataatcgtgacgctgcacgccataatcgtgccgcccgcgatttcaaagtgtacaatttagggttcactctaagtcaagagaaaaataaacggcaaaatgaaaagggggcgacgcgcagtcagcccccttaattttgtgtgtctttgacacttgttagcggaaagaacacaaaataatcatctgctaaatgatagaaacatcttgccacatctatcctaatagtgcaagatatttttagttgattttttaggagctatacaaatggattatattttggggttggatttgggggcgacttcgctgggctggagcgttgtcgagttagggaatgacgacgttcctttgcggttggaacgcatgggcgtgcgcattttttcggacggacgcgatagtaaaacgaaagagccgcttgccgtcgcgcgcagaacggcgcggggaatgcgcaaacgccgcgaccgctatgtcatgcgccgcaaaacgctgatgaacaagctgataaagtacggcttgatgcccgaaagcgaagcggaacgcaaggctttggagcggctgaacccgtatgaattgcgcgtcaagggattggatgaaaaactgttgccgtatgaactggggcgggcattgtttcacatcaaccaacgccgcggctttaaaagcaatcgcaaagccgaccgtaaaaacgacgaagcgggcgcgatgaaagaggcgattgcggatttacgcgaaaaaatgaccgcaagcggtgcgcggactttaggcgaatacctgtacggcttgaataaaggcagggaatcgacgcaggactttacgcccgttcgcgtgcgcacgcatttggaaaaaagcaaaatcgcgtattccatgtatcccacgcgcgaaatgtatgaagacgaagtgcgtcaaatctttttgaaacaggatttaagcgatgaaatcaaagccgatttgttcaaaacgattttcaatcagcgtccgctgaaaacgccgccgaaagggcattgtccgtttgaaaaaagcgaagaacgctgttatatcgcttttcccgcttttcagcgtttccgcgcgttgcaacaaatcaatcagctgcgggtgcgcgacgattttaccgaagtcgaattgaacgacgagcaaaagcgggagctgcgccactggttgttggatgatttttccaagctggacaagaattatcgtttgacgtttgccgctgtcagaaagattttgggaagccaatacaaaaacgttaaattcaacttggaatccgaacggcgcaaggggctggatgcggacaaaacaaccgctctgttgcgtcctttgttcgggacggtttgggcggataagcaagacgaaatcgtcgatttgctgttaaacacggaaagcgaagacgacataaaaacggctttgctgaaatacggtttatcggacgaacaaatcgaacaggctttgaccgccgatttgcctgacggcacggggtctttgagcttgaaagcgattaacaagatcaatccgtttttggaacaaggcatgctgtacgacaaagcggttgttgcggcgggatatgtgttttccaagaaattcgacaagctgcccgaaaaatatgaatctttcatcaatcccgaagacggtgaagtttttaatgaattgccttattacgggcaggctttgcccgaacgggtcatcggcgggacaggcaaagacgaagacaaagaagacgatgcaaaatattatggtaaaatcaacaatccgaccgttcatatcgcgctgaaccaagtgcgccaactggtcaatgcgttggtgaaaaaatacggacatccgaattcgattgtcgttgagctggcgcgtgatttgaaactgtcgcgggacgaaaagaagcgcgttgaaaaagagcaagcccaaaacgaagccgaaaacaagaaaatcggcgacgaattgacgcggcggggaatcaaaaacaattacgacaaccgcatgaaatacaagctttggaaagattcggcagaaaatcctatgcaacgttgctgtccgttttgcggcaagccgattcccaaggaggaagaggcgatgtcggcggaatttgaaattgaacatttgttgccgttttcgcgttcttatctggatgcgaggtcgaacaaagtcctttcctgccgccggtgcaatcgcgaaaagggcaaccgttcgccgtgggaagcttttcataacgatgccgaacgctggaacgaaattttggcgcgtgttgaaaagctgcccgaaaacaagcgttggaaattcaacgaagacgcttttaaaaaactgcaggacgaaaaaggcgacgtgctggcgcgtatgctgacggacacgcaatatatgtcgcgaatcgcgcggcagtatttgtgctttgcggcgaatccgcgttttgtttacggtatccccggacagctgacgtccaaactgcgcgaccattgggggctgaactccattttaagcgaacaaaaggaaaaagaccgcaccgatcaccgtcatcatgcgattgacgctttcgtcgttgcctgcaccggccgcggaacgctgcaaaagtatgcgaccgaacggcgcgatttcggtgaaatgccgcaggaaaaagcgccgcacattccttttccgacgttcagattgtctgaaatcaaggacgcgtttgataaaatcgtgatttcgcacaaacccgatcacggcaatccgcaaaaagcgattcgggacggtaaaaccgttgccaaactgcacgaagaaacatattacggcatggcgggcgaaggcgataaaaaaggaacggtacgtttaacaaaaagagttccctgtttagcttttacaaagtcgtttaatcctcaaaaaaagccgtataaattggatgatattgtggatcaaagcggaacggcaaacaaaattcgggaacgattggaaaattcaaatcctgcggattatgaaaaaatcgttatggaatactttaacgaaaggaaaatgaagcacgttaaagtatttgaagacagaaacaaagacgttgttttggcgtttaatgacagaagaacgcacaagccgtatcgttatgcgatttacggcgggaacgcttatgccgaaatttattgccccgattcggaacgaaagaatgcgggaaaatggcaaattgagattattccgaattactgtgcgcatcagaaaaattttgtgccgaactggcggcataccgatgctcatgcaaagctgattatgcgtctgcatattgacgatatggtcgcttacgaaaaggacggcgaaaccattattgcccgagttaaaaagatgagcgggggacggatatattttagggaaaacaaaatagctaaagaagaagcggataaactgtcttggggtgcatatccgtcgggaatgcaagaaagaaatttaagaaaaattaccgtcaccgttgacggagtcgttcttgacccgaaacgaccgaaaggcggtgcggatggatagaatcatcgaaatcgcgcaggacagccgtcatttggcggtagaacacggctttatgaccgtttccgaaaacggaacggaaatcggacgtgttccgcttgaccaaatcggcgcggtcatcgccaacacgcacggtttaacgtattccaacaatttacttgtgcgcttggcggaacaaaacgcgccgctggtgatttgcgggtcgaaccacgttcccgtgtccgttttgctgcctttggacggacatcatttgcagggcgacatcattacggcgcaggcggcgatgaagcaaacgacgctcaatcgtttttggaaagacgtcattcacgcaaaaatccgacaacaggcggaagtgcttgccgcttgcggtttgcccgacaaaccgttgcgctatatgatgacgcagcttaaaagcggagatcccgaaaatctggaagggcaagccgcgcgatattactttcaaacttttttcggaaaaacgtttcgccgcgatcgaacacagcagggtatcaacgctttgctgaattacggctacacgattttgcgctccgccgttattcgcgcgattgtcggcgcgggactgcatccgtctttgggaatccaccattgcaatcaatacaatccgatgcggttggcggacgatttgatggaaccgttccgtcctttggtcgatttttgcgtgcatcggttggtcgtcgataaaatcgaagaagtcaatgcgatcgccaaaagaaagctggtttctttgttgtcttgcacggcgcaaacggacaaaggagcggtggaaatcaacacgttgattttgaatttggcggtttcaatggcgaaatgcgcgatgggacaggcggaaaaattggatttgccgccgccgatgacgggtatggcgttgtggggactgtaaatgtcggtaacggggtataatttaatgtggatgatggtcatgttcgatttgcccgtaaccgaacccgaagaacgcaagcgcgcaacggcgtttcgcaattatttgctggacgaaggctttgaaatgagccagttttcggtttatttgcgcttttgcggcacgcgcgaaatggcaaacccgtttgtcaaacgcatcaaagcgcatattccgcccgacggcaacgtcagcattttgttttttacggataaacagtttgcggacattatcacttttcagaatcgaaagcccgttttcatggcggaaacaccggatcagctgacgcttttttgatagcaaaatatggaaaaaagcctttgtttccaaaggctttttccaaacacattatagcagatgtttattttgtgtcaaaccgcaacaaaatcaaaaggaaataagcaaatgacaaaattatagcagatgtttattttgtgtcaaaccgcaactctctccgctctcgagaaaataaatttgccattatagcagatgtttattttgtgtcaaaccgcaacatttcatatatacagtttg

SEQ ID NO: 2733 - DNA, 12381 bp, synthetic construct
  misc_feature 1..12381: note = Synthetic
  source 1..12381: mol_type = other DNA
ggcttgcgccggggcgggaaaggcttgcgccaaggcgggaagagcttgcgccggggcgggaacgggtcgcgggcggtttggtaaggcgtcaaccgccgccccaccgccagattcccacggactatcgggccggtctttgcaccaagggcgcacggcccaataaaaaaagaggccactctttcgagctgcctctggatgctccgtagagcagggcctgcgtatatttccacttgttacgaaaagtgggcgggcctgagttggttagacgccttcattctatcctgagtcaggcggctgtcaagcaattaccgctttgacctgttggttatcgggccgattacataattctatccgtatatcttggtaggatgaatgcatgaaaacactggggctagacttggggccgaactcgatcggctgggcagtggtcgaagacaattcagacggaagcgggcggctgatcgatgccggggtgcgggtgtttcccgagggggtggatgcgtttgacacgggaaaggaatcgagccgcaacgagcagcggcgcacggcgcggatgatgcgtcggcagattcgtcgtcgggcgcgtcggcggaaagtcgtggaggcggcgctggtggaagcgcggctgctgcccgataacgaagccgggcgaaaagccatcctggcaaccgacccctacccccttcgcgcccgcggcgtcacggagaagctcgacccgttcgagatcgggcgggtgttttatcacctgaatcagcggcgcgggtttttgtcgctgaaaaaagtctcgaaagaaaaggtcgagaaagaacttaaggcgatcgagaagcgcaaggccaaggcagccgaatcgggcaagcccgaagaggccggcaagaaggaagacgattcgaagatgctggcacagatcgccctgctggcgcagaccatcggcgatcggacgctcggcaagacgctgcacgcgcagcaaaccgagggggcggcgcgcacgacgcacgggacaatcatcccgcatcgcatccgcagtcagcacacgtcacgcaggatgattgaagaggaattcttaaggatatgggatttccaaagtgtgcatcaccctcagttgctcagcgaccgatcctgtttcggcgcgaggggacgactcggcgcaagggcgacgcgcgatgcggagccgatcaggttcccaatcggtaaacacgtggggccgactgccaaggcggagcggctgattgagattgcccggggccttcttgcccgagacgggatacatggcctcatcttctttcagagaccggtttattggctttcctcgacgattggcaagtgcgagtatgaaccgaaagagcagcgatgcccgagggccgaccgccgtgcgcagcgctatcgcctcctctgcgacctcaacaacatgcgttacgaccggcccggggactatggagagaaggccctcgacgcggagcaaagggccgatgtgatgagactgctggagtcgcagaaggaggtccaattcagcaggattcgcaagattcttgggccattcgaggacattcagatcaacttggagcaaatggtcagccgcagaggaaagaaggcaaagaagggcgtcgatgcatcgacgacccccaagcgcgagaagatgaaggggcatgagacggatgccgagatgcgaagcgtctatccgaagtgggacgccttcgatgacgcggtcaagacgcaaatcgtcaccgtgctcgtgggtacgcgcacgcgcaacgaaaaggggcagcgatcaatcgaggagcgtctctgcgccattccgggcgttgactccgcgatcgccgaaaagctagcgagcgcagaccttcctgataaatacctgagcgtttccttgaagttcatcgaaaaggtgcttccctaccttgaagcgggtacgcggctttcggcgaaggacaaaggagagatcggggcgatggaaagggccggctacgaatcggggttcaagggtctgaaagagccgctggcagtcctgccggcgccaaactcgcgcatggcgatctcccttaagtacatcactaatccggttgtgaaggcggcgatgtggcagatttggaccgttgtcaacacgatacttcgagaacatttcaaagatggttcaaagccggatcggattcacgtcgaaatgattcgatcgatgaagaagacgaccgaaatgcgaaggattgatgcgggagagaagaagacgctcgacaaacaaaacgaggccattcgatccgaaatacgcgcgctcggagcggtcccgacaaacgacgcagtcaagaagtacaagctttggctcgaacagggaatgcgctgcgcctacaccggagacccgattgcccgacatcaactctttcacgaggacgggttggtgcaggtagatcacattcttccgcagtcgcgcactgccgatgacgcaatgtcaaacctcgtcgtctgcttcaccacggcaaaccaagagaaacggaaccgactgccatcagactggcttggggcggaagcacttaaagatcttgaatcacgctgtaaacatctcccgtggcccaagcggcagaagctgaagaagaaggagattgacgacgactttgttgagacgcagttaaccgacaccagctacatcgcgaaggcgacggtcggctacctgcataccatcgtcggacgacacggcaaggtcgttgggctaaaaggacaatacacgtccgagcttgcgcaccagtggggtctgaataccatcctctttcaaatgccggggagtccggcatttaggacgcaaacatcgccagcggatcacaagaaaatgccgaagaaccgagacgaccatcgccaccacgcgatcgatgcaatagtgatcgcgctctcgcggcaggaccgtttaaatgcgttgcttcaggacaaatacgcagtcatccatcgaaacaaggaaggcaagttggtggagacgtacaagtttgaatcggccgtcgatgcgccttgggggatggaacccgatgcgttccgggcgctcgttttcgagaagctcaaggcgatgaacgtatcgcaccgggtgcgccggggggtgagcggcggactgcacgaggaaacaaactacggcgcggtatacgagcggaccaaaggcgaccggcgggagaagaggcgcgacggggaattcgtggtgcgcaaatcggtcgaggcgctttcgatgagcgaagtggggaacattcgcgatgagacgattaagaatatcgtcattcggcggctgggcgagcacaagatcgcgttcgggcgcggggcggacaaggtgccgccgaagaagatgcaggaggcgatgaaggacttgaagatgccctcgggggtgccgatccggaaggtccggattcgcgtaatggactccaccatacaatctatccgagagaaaacgggtgaggttgcctacgtcagtcccggcgcgaaccaccacgtctgcgtctttgagtggacggaaagaggaaaggtgaagcggggcggcgtctacgtccgacggctcgatgcggcgaagcggatactcaatcgcgatccaatcgttcagcggacacacccggaccggcctgatgcgcgattcgttatgagtctatgcactggcgatacgatcctaatcacggacgcacagggcaaagaaacggcccacatcgtgacgaccctcgtatacggcaagacgcagaagcggattcacgcagcctcagcctatgacgctcgcaaggaccgcgtctcgcccagcattactggacagctactgtccatccgcaaagtgaccgtcgacccgctcgggcggatccgctgggcgaatgattaaatcgggggcgggtgattaagtccgggaacttaagcgcgtttcgcgagaaaaatctggtggttggttaactgtgcgatggtctgtgccgattgcttcgaatgacgcggcgaggactgtgggaaggctcacggccgggtaccgcatcgtttgtagcgaaacggaggcatgaccatgcctgattttctaccgagccgcgctgcggacctggtgacatggagcaccaacttcagcaccaagatcaccgcggcaccgacgacgtttgggctgacggcggcgcaggcaactgcgtttgcggcccttcacacggcgttcgcgacggcattccagacggcgcagaaccccgatacgcgttcaccgaccaacatcgtggccaaagaccaggcgatggcgtcattgaaagccaacgcccgacaattggcgggaatcgtgcagaagtttcccgcgaccaccgacgaacagcggtcggaactgggattgacggttccggacgttgatccgtcgccggttccggtgcccggctcggcaccggggctgtcggttcaaacggtatccggacggacggtgcgcatccgcttgaaagacacggccaacccggatcggcgcggcaagcctgcgggcgtgtccggggcggccgtgttcagctatgtcggtgcacagccgccggaagatatcagcgcctggaagtttgaagggaacacgtcgcgcacgatcatcgacgtggtgtttccggtgactgttccaccgtttagccgagtctggctgacggcgttctggttcaacgaccgcaagcaaagcggcccggcaacatcgcccatcgatgccaacattggctcgtgggttgttcaggtagccgcttgacgggcggtgtggtgctaagtggcgggtgcggaaccgacgcacccgcacttagcactgcacgccctgccttgagacgcttcgcttcaggagatttccatgatcgtcaatcccccggccatgtaccgcaggcgcccgagcaggacgcccagagaagcccccgcgccggtggcgctggtgctggttaaggtgagttatgacgaggggaactgggtgcggctggagtttgatcgggcgatcgactccggcgcgatcgtgggtagtgcgattatcgtggatgatgaggaactgagcgggcggcgctacgcagcgaccgcgggaacagtggtgacatcgccggtggcggttcgggcgttcttaaccgacatcggcccggcgaccggcagcggcatcaccctgacggcgagcgcgggcaatggcatcgtggcggcggacgacggcgcggcgtggctgggcgtgagcggtgtggcgataccgtttgggtgacgcggggttaaccactaagagcaccaaggcacgaagagagggttgttaaacaccaagagcgcgaagacacgaagagattttgttcaagacaattctttctgttcttcgtgtgcttcggggtgtgcttcgggtgcttcgtggttcacttttctgatctgcgttcatccgcgttcatcggcggttaaattgagaggtgtggtcatgggcgagctggttattgcgtcatcgtcggtggggttgccgcgggtgcttccgtcgccgcgcgtgccgattcgcattcgtccggggacgatggatgatattccgtttatcgattcgctgcagaagctgcacacgcggcaggtgggttggatgccgacggcgacgtttgcggggaagattaagctggggcatgttctcgtcgcatgggcgtcgcgcccatgttcggcggaagacatgggcgagacggccattccacctcaggagcgcgtcggctatctgatcggcaacgatcagtatttcaagcgggacgatgtggggatcatttatcagttgaacgtgtcgccgggtgtgcagcgcgggttgattggggcggcgttgctcaaggcgcagtttgcgcgaagcgcgtacgggtgcaggctgtattgctgctggtgcgcgcaggatattgcagccaatcacttctgggaagcgatgggctttgtgccactggcgttccgcgccggcagccgtacgaagggcaaggacgcgtcggggaaaagcgcgccgcgcgtgcatatcttctggcagaagcggatttgctccggcgataccggcgatgtgaagcgtggcgggacgccgtggtggtttccgagcaagacgaccggcggagcgattcgtgaagatcggatcgtactacccattccgccgggcacacactggagcgatgccaagcccctgctgcttccaggcatgccgcaactgaccgaggccgcaacgccgaaccgccgcgcattgccgggaccgcggccgaaaaggttgatcattccggccgagcgattgcgactggcaagcaacggcgggttgcggtttgcggtcgagggggatgctccgaccaaagaagccggcgcgccgcgatcggcagcagccaaagtgaagcacgacccgcaatatgaagcagcggcacgggaactgcgcgatcgctggctggagcgggtaaattccacgccgatggtgggcggcggtaagtatgacctgtcgcgggagatcgaagcgcagccgatgcgcgccacggcgggattgctcgaagcggcgtgagtgggtggttgagtggtcgttgatagctgatagcggtgagccgggagtgggatcggggtttcccatctgccgggatcagcgttaacctgcactcgagtgatgaccgagcccaccccagatcagccgctcgttccgatcgattcacctgaggatcaggatgaatccgagacggttcgtttcaagtggaaggtgacgaaggatctcacccgtcgaattgaccagtacctggtcgatcgcgttggttacatgtcgcgcaatgcggtgcagcaggtgattaaagagggatttgtctgggtcaacggaaagacgaccaaatcatcctacaagccgtgcaatggtgacgtgatcgagatggcggccccgccggaacctgtgaatgagctgattcccgaaccaattccgctcgatatcgtttacgaagatgagtatttcctggcgttgaacaagcaaaccaacctgattgtgcatccggcgcgcgggcgttggtcggggacgctggtgaacggactggtgcactacggaaagaattggagcacagtgaatggcaactggcggccgggaatattgcatcggctcgaccgtaacacaacgggcatcatgctggtggccaaggcagacgaggctcattggcggctggcgaggcagttcgagaatcggacaatccaaaaaacttacatggccatcattcacggcgtgccggcactccgcgcagatgagatcaacctgccgatcggccaggaccggcgggtgcgcgagaagcaggccattcgaaagatcgagcacggcgggaagcccgcgatcactcgatatgagattcaacaggtgtttgacgcgcccgcagggctggcattcgacctcggcgagcatgccagcgaccagaatgccggcccggtgccggtcgggaggttttcattggtcaagctgtggccaaaaacaggccgaacgcatcagctgagggtgcatatggcggcactcggccacccgatggtgggagatacgatgtacggcgggcgcattctaacctcggagaacggctttcgatttgaccgacaagcgttacacgcatttgagatcgcgttcgtacacccggtcagcctggagaacatgagcctctcagcacccctgccccccgattttgtctcgttacaggcaatattgtcgcctcagtagaaaccttttgctgataagacgatataatggattagtcttggctgtgattgtatgtgagttgaaaggtggccctgatgacgttcccgctcgcgtttctccagaattttggcatgtttgagatgatcctcctcggtgggcttggacttctgctattcggcaagcggttgccggaagtcggccgaagtctgggcaggagcatcgtggagtttaagaaaggccttaaaggcgtggaagatgaagtcgaggaggcgtcaacccctcgcaagctagagggctcagccaccgaagcaaaggcagggcctcaatagatcggtcccctgccgccgattgagcggcatttgacgaggcggtcggcgaggtacgtggtccccgccgcagaaaattgaagttgcccgctaaccgtgcagcgtccgaattgtctgcaccgctaaagtaaaggagcttgagcatgataatccggatcgcctgttcgctgttgttggtgggagccatgaccgccgcggttgcgcagccagttgccagcccaaggattgcgctggcgagaaagttacccgatctcaatctaagcaacgtcgcgctgagcgacgcgatagaattcctgcgcgactcgtcatcagcgaacatccacgtcaactgggcggcgttggaaggtgccggcatcagtaaagacacgccagtgaacctccggctgcgcggtgcatcgctgcggaaagtgctgagcctgattttgacggaagcggcgggtggtgcggacacgctctcattcttcgcggccgatggtgtgctcgagatcacaacgcgagagattgccgatcaggaaatggtgaccgtagtttaccctgtgcaagaccttcttttggaagtgcccgatttcgacaacgcacccgatttcaacctgcaggcccaacagtctgccggacgcggcggcggtggaggcggcgggcttttcggcggcggtggaggaggagaggacgatcaaccgcgaacccgcgacgagcgagcggcggaactcatcgatcttatcgtcgagactatccaacctgacgtgtggcaggacaacggcggcagtgcctccattcgatttttccagggcaatctcatcgtgcgtgctccgcgcagtgtacatgaggctctggggcgcagtgtcgaatagcgcacgctgcccctcagccttgcgtcctctgaagcacctctcgattcatcggtcgggcgtctcgcttgtttctattcgaaccgtgagaactgtatcatctcgggaatgtctcagatcgcgtttattggcgcgggcaacatggccgaagccattgcccgaggagtgatttctgcggggcttttccacgcgacggacctgatcgctgccgacccttcgtcagaacggctcgccctcttccagcagttgggaatcttcacctctgcaagcaatgtcgaggcagcgtcggccgccaagatcgtgatgctttgcacgaagccgcaaatgatgggcggcgcggtgacgagtttgaaggccgtcctccaaacttcgcagttgatcgtcagcatcgctgcggggttgagcacaggatttatcgcgcgggaattgagcgaagcaagagcgtggcgcattgtgcgggtcatgccaaacaccccaatgctctatggcacgggcgcaactgcgatttgcaaagggcagcacgcttcggatgacgacttagctcgcgtgcggggaatttttcagtcggcgtcgaaggtgatcgaagtagaagaaccgcttatggatgctgtgacagcggtgagcgggagcgggccggcgtactttttttaccttgtggaaaacatgatcgctgccgcggtggaactgggactctcgcctgagcaggccaaggcactggtcgtccaaacggccacgggggccgccaaaatgctctctgcttcgaccgactctgcggccgagctgcgagcaaaggtcaccagccccggcggcaccactcaggcggcgctggaagtctttcataaggccgaacttggcacaatcgttcagagggccattgcggcggctgaacagcgaggcagggaactcggtagatagccactcccgcggccaccgacccaccatacaatggaatctccagcccgactgcatttgcatcgacttcttctgctctgcggattcacgttcatattgtgcggttgccgtctcgggggaatcgtcacgcccccggcgcacgtcgaatcgcccgccaccgttttcttgaagctcgatgcgcggcactccggcatcgctttcccggtcggcgcggggcgttttcgtgaatattcgtttggtgcctggcgatggtttgcggtgcccgacacgcgatggcctgtggcactcggctcactcggcggggttatgcaatcgaccctgcagacgaacgagtacccgtccaacaacggcgtcccgctcacccgctacgacgctgagtttatccccatcgccgttgacgctcgccgggctgacgcgctgcggatggaacttgacgcacgattcgcacggcaattcgcgacctatcgttacaatgaattatacgacatgcatttcgtacaagaccacgagcactattggatgttcaacaactgcaatcaggtgacgggcagatggcttcgccggttgggttgccgggtcgatggactaacccttacaaacgactttcgcctcgacaagcaatgatcttacaaaaactcgcggctgtaggcactaacttgctggagggggctatctccggcgtcgaatcaggctggccgcgcccattagtgacacaaagcctgaagccgttggctcgggcacggcggtcacgctggccacgtcaccggcagcttggaatccaaagttggccgcaagcagcgtgaaatcgtccaggtttacgacaagatcattgttgaagttcccggtggcccacccgccggtgttgccgaaacgcgacgccagcgccgtgaaatcgttgagattgacggccccgtcaagcgttgcgtcgccgtattcagtgccgatgagggttcggatgagatgatcgctatcactcgatggagtattgatcgtggggttgattgtgccgtcggcattcacatcaagcaggctaggcgaggcgggtgtgccgcttattgcgcgaagaacggcattaacgtcggcaccgctaacgacttgatcacggttgacatctcctggcttgagcgcgaaaaacacgttcccgtgcgcttgcaggctcgtcagccccgtgttcagggcaatgatgtcggacagtcgaatcgtgttgagatcaattatcgacgcgattgatggcagaagcgcgccgttattgtaaagcccggcggcgttgctgagataaaacagccgatcgccgtcgcgcaacctctcgaactgactggcaatgatgtttgtaaagagcggcccgaggctgccgccggggacatgattctcagctaggcccgccacgtacgcatcgacgttgttaatgttgccgtaaagcgcttgcaaggcagcgcggagctcgggcgttgttgggatctggttaaagccgttgatggccggaagattgtacgccggacggagttgtcggtagtcagtgaggccatgatcgcgcccgcgttgggtattgagcgcgaagaggtctgccccgccggcaccggacgggccgaagagtgtgttgcggatgtcatcaatgaacttcagatcgacttcctgagcaacttgcgtcgcacctccacgcagcagatcttcagctagcgtggggttgttggtcagcagattggggttaaaaaacgcccctgccaacgagacgggcagttctgtggtcccgtcgttcttaacccggggcatttcgcttgagagcgtggtgtggccaaatcgaaacgcggcaacggcaaacgactgtgtgatctgcgcattgacctgcccgctgtaagcaaagtcagacgccgcgggcgcgttggccgagcccagcagtgcgggaagaaactcgttgtaggtcaccgcctgcatctcggcaccgacgatctttcgtgcgagctggtacttttgttcgttgctcaaggagggttgctgggccgaaatgacgtcaacgagccgattgtgctcgcggacaaagacggtgtgcatgctcgtgagcgttacgttttcgttcgcgcgcacgtcgccggcaagaaacagctggctcgccggtgtcgggccgctgttgtcgtttgcgagtccgaccgtgttaaagccgggaaggttattggcgctggtgacgagcttcgcgccggtgccgccgttggtgcgtagggcggctgcgcgcgtggcatcgctaccataaacattggacgcatcgatgtacgcggtgatcccgttgacttgctcgcggatgccgccttgagtgacaaagttggaacgggtcatcgcaattgggttaggcccgaggatatccccggcacccacggcaatgttggcggcgccgttgacgccagatccattgcttgtggatgccagatcaagatcgtgggtgagaaactgaccccacatccagatgtaggaactcagattacggttgtttggtacgctggtggattgaacgccgagcgtattgctgatcgtacgcgcgttggcgcgggcagcatcggagatgattgtgccgcccgttccatcgggatagtcctctgacctgcccccaattcctgtaccacttgttatgagagtagaaccttacgctgcttcgcgggacggggcgcagggaggggcgaagccccgaccgtagccccggcccgcgaagcggcaaaaaccgccg

SEQ ID NO: 2734 - DNA, 24608 bp, synthetic construct
  source 1..24608: mol_type = other DNA
  misc_feature 1..24608: note = Synthetic
actcaattgttcaaaacccccattactatcaagctgaatatttgaaacctgcgcctttacatatcccaacaaatctatataatgcccatgctcaacaagatattctttttccccatcattataactctgaattacacgtgtagtttcaccatataaatttaataccctgcaatgcccagttgatggcattctaaatagagcaagtccacccatgccagttattttaactttctcgggctcctcacaatcataatgaaattttacaggaacttcacttatttggttgcaattatttttcttctcaagcaacttctttctaatttcttcttgttctttacgctttctttcttcctgctcccttctcttttcttcctcacattcagaacaaaaatcatttgcctgctcctcctgcagttttttaaccacatcactttttactggtatttttcccttctgtttttctgattgcatcatatcatcaactttttgactaaatgctttttcatttctcactgcagaaccgccttttgcaaaaaccttatcaaactttggtttttctactttgggcaaactcacaggttccttgaatttatttgtatccagtggcaacaaggaattatctcctgtgcttactttctcctttatactcgtctttttggtcaatctaaataatagatagattattaaaaagatgaataaccaaaacttaatttttcttttttctcgctgtgtcataacctatttttttaaataagaattaaaaacattttcaaacttttgagcataagaggctatatcttttgctctatctgtagaattaacaacccttcttgcattgtaataatctgttttattttcattacaataaagctttaaagaaacacccgttaaattattaggtttatcagccatcatcatttttatggtcattaaagcatttaaacgcttatcatttactattaaatctggatttgacaaaacatctacaccagaaaactctttaaacttagtatataaatgcctaccagtccactggcaatatccacgaccaaaaaaacgagctccatcacctttatatttattacttaaattctttcttctactagctggattataacaccaagattgtacgccatacttccactccatgtacacagccttttcagcactaacaccaaatgtatctgcaatcttcaaaaactcgttaaactcccttaatttatcccctttaagcgttttcttcaaaacagaaattttatcattataacgctcacgcaataaactaaattgacccatttcatgatatgctgtagccattatataagatgcttgatttatcaacaaatcaccacttttaatttgatttattaatatatcaaacaaagtataaccccaatcagcatatgaattatatcctttggcaaatctcaatccattaggtactaaaagcatagataaaacacttttagtctcactctctgtatttggaatatcaacgcccactagttccaattctccaaactcaactttagactttggttttgatattttataagcccaccaacttccagctagcagggcaattgcttttaaatatgtcattttttatctcttcttttatttcttctcttattgcccatataacgatttattaaatttatccaaaaccttttgccactctgggtgaagctttggttttggtgcgggtatcttaggttgattatttaactttggacttggtgcggagctcttaggttgattgtttaactttggttttgtcttaattggaacaatacttttccccaactctatcccatattccaatggagttttaaacgttcttacaccatgtgtaacataataagggtcaaaggatccaaccgaaaaaaacattttaaacatttcagaccaaaatctaaaatttgtcttcacaaactgttctgtagttttttcctttaaaaccaaaggctttgcatcctccattttttgtttaacaacagttacaactctattaaatctacgaactaacaaaaatattataaaagctatcagcgataacgccaatagcttactattcttcatcaaatcacttaaaaacttcatcctttaaaactatctttaatgtggtccttcaacacatctgataacataatcattccaatgtaaaccactgcaattaaaacacttgtaattaatttacttgtcatctctcaatattttaccacatatgttccttatccgtaggaacacccgcaagttcttcttcattcaagtactctggctcgttaccctccacatcatcaaagagtgtatctatctctttttttgcctcgtgcgcatgatgcaaacatatttttgcacattgtacatacttcaataacaacggcaatgatttaaataatcctttcaattgtttaaacataacttatctagttttaatttgtccgaaatatccaccattaggtgctttagttgaaattaccattcccagcttttgcaaatacacttttccagtattcacattgaaacttgctatttctaaaacctttgcgccagtctttttatagaaagcctcaaacatcatagttataaatctatttccagtgtttggagactctgaacgcacactcttagagttttcaaatgctttaacagttatcatacctctttgctttgaataattccaagccgtaacataaaaccttccattcttggattgtccagctttagccccagaatgttttttaggttgtctctgattattataacctcggtcataacctcggttaaaattagggttgggatttccaccccaaccattactatatccattattatacgccatttctatacttttttagttaataattaccagcctcttctttttcctttgattttaatccagcccatgtacacggataaaatcactgctcccaatcctaaaaccaaaaaggtcgcaatacttgtccctgcaccattaccacttaatggctttagtaaaaactatcaacttttgttattaattctttcatctttattttgtttttaaatgttattttttctttgttaataaataaatcaatgcccctcctagtaataaatacaaaatgttattgtcatttcgcccaacatgtccagtagcttttccatatacctccccgtctgttaccgcaggatacgcaccttctgtaggcattcctgttttaagtgtttgatccttactaggtctgtaatccgatgaacctgcttggctatctgcttgtctttcagcatctgttttttctctaaagaatggcacgcgcaaaacttccttactcacggcatcccctcttgaagtgtcacggaatgggaaatttaagtttacatcagttccttttggatattctttatcaccaacataggcaaacttagtctgatactccttaagcaatctcccgtaagcctcagttatcatagccgccaatgcttcagttccttttctcgtacaatcctttccccatggaaaaccagaagcgcagacttttaaataaagtaacgccttattaaaattgtcagcactggctaccttagtaaacccagattgttcaataatccattcaacgattgtggttccttctttcatcgctctactaggcgaccagctcgagccccaacaatgcaaatcaaagccgtttgccaaaacgctatctaaccccccagttatcttacttaatacaccgcctactatctttcctccaaattgaccaagagaggagccggaggcgttaccgccccccacacttccaattaaactacttaccgctgttactgctccaatcatttcaatattattttgcgtctaacaaatagaatgtaaattcttctcctacatttttatacactgctaaggtgtataagcctgttaaatccaatgcaggtaatttcgataactcatcaatccttgcattttttgcataatcaagttgtagttgcgaaatccttgttttgccctgtgcattgataacttgcaattcatttggtgtcttttcagctaccaaataatcaaatgctaatacatcaacatcctttacagatatattttggtcaagcttcacttgttgcacataaataggctctgcacttccaatagcctcaaatgtttctgcagttacattctgtgcttgtccacccgatacatggaactcaatgtaagttttgtcacctaatggcaaacttccagatttagaaaaaggaattaccgctactttgtcgctaccaattgttgtttgcaatttaacaaaatgaacgcccaacaattctgtaaatagcttaacgctcatctttggcaccaaaacctttttagtaaaggtttcatctactaggtaagactcaatttgcacctgtccgaaatcggtacttgaattaccttttaaaatcaaacccgctgcactttccttaacttccagcacctcggttgcttttgctaatgttactctcatttttatatcttattttaaatttctgaaacaaagatattaagcatgcaaaagcactttttaaaatctagcgatttttaccacttttaagcgatttataccaatttttgacactaatcatcaaaatatttttttacgagctttagcgttagatatttctttttatagtggcttaaaatatctttttttatcatgcgtgcagtggaatagcttacgcctaaataattagctagctccttagcactaattatttgcaagttctgtgtattgtttttcataaattaattggattaactggtctaaatttatactcaaatcggtatctaataactgtcttatggctttattataaatttttaaatgctcgtttaattttttatatcccttgcggatcatctgatatactttacctttatacaactctacaaattgaatagcagtaggcacatactccaattttccccgcaagtggtttaactcctctaaataactgctaacttcaaaatttaaataattgagtttttttaccttatttgatgcgccccacaccgcaccaattactgggcgtttattttcttcttgctttaatagatatttcaccacatacgcaactatatttcgtttactctttggcgtttcaattttagtacttgggggattgctccaacccatttttttattacgctggtaagctagtatgcagtctttttctgatttataattttttgaatacttagccatatattctttagccgttaagcggttcatcttttcagaatatctatcaacataaccatatttatttatatactggttccatatgcgctgaatatcctcacgagggatttgcgtatcaatcaaaacatgaaaatgaatatttccattcttctgcgtctccgctttccagagataattttttaaaccatagaccttttttaaatggtcaagatacttagcaagtattttacgcaacactctatcatggtgcttttgggcactgggcaaggtcaaggttacaaaagataaatatttgtccttgtttgatttagttgcgtcagcaaataaaatagcatacttttttatattccttacttgagtatccgagagcgttcctaaatcctttaaaacatgccctttctcattatacacttcttgttgtttctccttatacaactcaacacacttttcagcatatttaacaattgaaccaaactctgaaatatcatctagtgcgtttaactcatctaattctgttttttccttgtttagattttggcgtaaagtaggagcatagcctacttcgtaatttcgtaaatccatcacataactataatgcaataggctagtaggtctaagctgaaccttttcacacaaataataattattaacctcttgatattgtcgcatttacagggatttttgccgttagattttaccgatacttgagacgagcccactcaaaagcctatcggctttctataaaaaaatcggtttcttcttttttcacagccacacgatgatataaaatatccttaggtttaaaagttatccacgaacgaccagaaaataatacctcaatattattttcttgtttcaacacctgtactacaataccatattcatatatgtactgcttaggttctaaatgatttacgggaatgggtacaaacttctgtactaccaaaaaaggtctgatttcttctctttgcatacgcttttagttttaaattatttaagcgttgcatttgtgttttgaatgtaggatttaaaagttttaagctaaaaaaagcataaaatccctattttttattacctttatggattcaaccattaaatccaaactatgatacattttaaaataggtgataaagtaaaagtaatcgatgataatctcagcggcactgtaaccaaagtgaacgaaaacgaaatcaccattgagaccgattttggttttgagatgctctacgaacctaaagagcttctgcccgatgtaggaatggaagaagaaattgaattttcttcaccaaaaactactccccaaaaagaaactaaaaaattagcctctaaaaagaaaaaggtagaaaaagtttttgatcctcgtgcaaaaatgccagaaatcaaaactgaaaaggaaaaggttgctaaaaagccaaaaaaaatcagaaagccacctttggaaattgatttgcattatgcccaattagaaaactacgaccgattattggcaaaaaacttgattttagcccgccaaatgaactctttaaagaaaagagtggaaagagcaagagagcatggctacgatcgtgtcgtgatcatccacggaaaaggagaaggaatcctagaaactgaagtaaaaaaatggctaaacgaaatgggatatcatttttacgatgccgatttccaacgatacaaattaggggcaacagaagtggaattgcctaaattctaattttcataaaaaaaatcaaagcataaaaaaaacggatggttcccataaaaaaccatccgtttttaagttatgtattaaataaaattattctggtacaatgtcgaaagaaatttcagtttgtacacttctgtgaggtttcacgatagctgtgtaagaacctaatctcttgatgtttctacctaagatagatacatgtttacgttcaacattcacacctttttggttcaacaaatcagttaaatctgcgttgtttacagaaccgaaaagtttatcaccctctcccactttagcagcaattactaattcaagacctttaacagcctcaataattttattagcctctgcgataagtgcttcttcgtgtgcttttctatcttctaaaactttgtttaattcctcaatatttttaggagtagctaatttagccaaaccttgagggattaaaaagtttcttccgtaacccggttttactgaaactacttcaaactcaaaacctaagttttctacgtcttttgttaaaattacttgcattttagtttcttattttgggttattttaataaatctgtttcaaatggtaataaagctaaatggcgagctcttttaatagcttgagccacttttctttggtatttcaaagaagtaccagtatatcttcttggtaaaattttaccttgctcgttcacaaattgtagtaagaaatctggatctttataatctacatatttgattccgaattttttaaatctacagaacatttcagtagattgagtttcaatatcgattggagttaaataacggatttctgattcaccgccttgctctacttgttttgctaattcatcaattgccatagttgtattttttatttgttagacgatgctttttgttttcttctgtcttctgcccactcaattccgtgtttgtctaatttcacggttaagtaacgcaatacacgctcgtcgcgtttaaacatcaactctaggtctgctaccacatttccttctcctttccattcgattaggtggtagaatccgtttcttttcaattgaattgggtaagctaatttgcgtagtccccagttttcttggtgtacaatctctgtacctctttcctttaggaagttttcaacttttttaactgcttcctccacctgagaatcagacagaacgggagttaaaatgaaaacagtttcgtaatgattcattttaatatgatttttaaattgggtggcaaatatagaaattatttttggttttgccttattttaaacaaaaaattttacatttaaacgcttgaaaatcatttttcggtataattttccgcatcgcttaataccaaaaatacaaaaaaacaatttcattcagcaaaaatatctacctttgttctttcttaaaaaatctaactttaaaaatgggcattattgcacggcaaagtattaaatattcccttgtaggctacctaggttttgctctgggaacacttgccgtaatctttatatttcccaatgatttagacttttacgggaaattacgctatgtgctctctacggcagaaatgtttttgccctgcgtggtgcttggcgtgtcgttttctaatgtgaaattcttttatgacgcacaaaaagtgggcaaacaccagaattttttatgggtgagccttctgagcatgatttttagtttttcgctatttacgattttattttttgtagcgaattggctttttcctagcatcaaagaatcggcggtgtgggaaatgaaatctctgattttgcctttgattttgattttagcattaaatgctattttcaataaatatatatctaattttaagcgaattgcaattcctaatatttttgaaaatttatttcctaaaattgcgaatatcggtgctttttcgttgtttttctattttggtttaaaagaaaaaatagcgtattcgttttttattggaatgtttgctttttcgcttttatgctatgtttggtatgcgcaccgattagaaaaactccagcctgactttagtcttaattatttaaaaatcaatcaactctggaaaaaagttataaattatagtttatacggatttctgggcaacattgggcattatgtagcgttgcgcgtagataattttatgattggtgaactcatcgggtttgaatccaacggggtgtatagcattattttagcgattttatcgtttatgatgattccacaaatggggatcaacagcatttctgcaccaatcatcaatcaacatttagaagaaaaaaattattctgaacttaaccaattttatagagacagttcgtttcaattattctttcaaggtttagtgattttttcctgtattctagttggatttccctacctcacagaactgatcaaaaatggcgacaaactgctcgcagcctctcctattctgtgggttttgggcggtgccatgctctttgatctagcgacgggctttaatgggcacattatttcgctttccaaatactaccgaatcaatattgtgattatgttgcttttggcaatgctcacgattagtttgaatttaatttttattaaagtttttaatttagggcttctaggcgttgcgatggcaacagcggtatcgctcacggtgtttaatttaatcaaaatcactttcaattgggtgaagtttggcgtattccctttgagtcgaaaaatgctgagttcacttcttttaataggttcggctttttctattgcctacctcctacccgagagccattatttctggatcaatttaatttataaacctctggttttaatcatcttgacaattatcggaaatcaaattttcggtatttttcctttggttgaatatctcaacaaatttcgcaataagaaactttaggataaaaaaaattgccccgaagatagtcgaggcactaaatgttttcacaacggaataatccttattgtgatttgcttttaagttcttggtgcaaaggtaaaaactttttttaaaaccacaaaaatattttttttgataaaattaaaattattttcataaatttatcacctcaaccattatagattataaatatcatgaacactattctaggattagaccttggaaccaacagtattggatgggctttaatcaaagttctaaatgacaaaactagattacctttagaaattatagatctcggtgttgttgtgatacctacagatcaaagaactttagacaaattttcaaaaggcgaatctatctctaaaacagctgaaagaacaaaacaaaaaggtgtaagaaagttatatgaaagaaaaaagctaagaagagaaagattgcatagggtattaaatattttaggttttttgcctgaacattattctaaaaaaattgatttcaaaaaacatttaggacaattttttggtaattctcaaccaaaaatttcatatgtagaaaatgaccacggaaaacatgaatttattttcatggatagttacagagaaatgttaaaagaattttcaaaacacaatattaaaaatgtaccatatgattggacgatttactacttacgaaagaaagccttatctcaaaaaatctcaaaagaagaacttgcttgggttattttaaatttcaataaaaaaagaggttattatcaatttagagatgataatgctgatgaaaacaaggaaaataaaattgagaaatactatgctctaaaggtcactaatgtaaaaaaagaagatgctcaaaattatactattactctagaaaatggatggatttataaaaataaaagcaaaatatctttattagattgggttggcagcacaaaagaatttatttcaacagaaaaatttgataataaaggaaatataattaagaagaaaaatggtgaagatgatagaactttaaaattagttgattcagaaaaagattggattgctattaaaaaaagtacggaagatagaattgaaaattacggaaagacagttggaacatatctttatgaacatttattaaaggatcctaaccaaaaattaaatggagaacttataaacattatagatagaaagttttacaaaaatgaactaaaacaaattttagagaaacaaaaggaattccaccctgagctactaaatgaagatttattccaaaaatccatcattgaattatatccaaaaaatagtacaagacaaaaagaacttaaaaataaagatttatgttatttactcattgatgatgtaatttactatcaaagagatcttaaaaagaaaaactccacaataaacaaatgtagctttgaaagtcgagaatattatttgaacggagaaaaacaaattcaaaaaataaattgcattgcaaagagcaaacctctatatcaagaattcagaacattacaatttatcaagaatttaaaagtttatgaaattattgatgggcttgagaaagatatcacaagtaagttattacctgattttgaaacaaaagaacatttttttgaatggttaaacgataaagagaaaatagatcaacttcaattattatcctacaaatgttttgacttgcatgacaatgttaaaaatgatctaatagcaaaaggtatcaaaaggcctacagaaaaagcaattagaactgaacttcttgaaaaatacagatggaattattcaaaagacaacgatagaaatttcttattaaatgagactcgttttaaaattttaaaatatctaaaaaaagttgacaaaaaactcacattaacgaatgaacaaattgaaagtctatggcttttgctctattctgcaaaagatgaaagagaattaaaaaatggtcttcaaaaattctcagaaaaaaataaattacctaaaaaattctcagatatctttatctcatttcctcctttcaaaaaggaatatggtgcgtattctgaaaaggcattgaaaaaattacttagtttagttcgatttgggaaatattggtcttttaacaaaattgacaataatattcaaaataagattatgaacatacttaacggagaagtggacgatagcatctctgacagagtacgagaaaaaacaatcttattacaagataaaaatgatttccaagatttaccattatggctagcttcatatgttgcttataatagattttctgaggtttcggaaattaaatattgggactctcccgataaaatagaatttttaaaacagcactctattggaaatccaatcgtagaaaaaataatcaacgaaacattgaagttaattaaagatatatgggtcatacacggaaaaagttgtaaaaatttcttctctgaaatacatattgaacttagtagggaaataaaatctagttcaaaaaaaagagctcaaataactaacaacaatacaaagaatcaaaaattaaacaatttaattaaatcactacttatagagatggccagcgatactaagtatgagaatgtaactccttattctccatctcaacaagaaattttaaaaatctatgacgaaggtatttactcaaaagaggaaaactctgaaaaaattaaggaaataaataaaattagaaacaacaataaaatatctaagtctgatattacaaaatacaaactctggctagaacaaggctatatatcaccttacacgggtaaaattattcccttaactaaacttttcactgcaaagtaccaaaaagaacacataatacctcaaactaaattctttgatgatagttttaataataaagtaatatgtgaagctgaagtaaacaaactaaaagacaactcactagctatgaatttcataaaagctaagggaggaaaagccgttaaactatctgatggagaaacggttacgatcctcaatcaagaggaatataaacaactcgtgaggacatctttcaaaaagaattctataaaattgagaaacttacttttggaagaaattccagacacattcactaaaagacaacttaatgacactaaatatatatcaaaacttgtattatcattgttatctaacattgttagagaaaaaggagagcttgaaagtaccgctaaaagaatagtaagtacaaatggccaaataacatctatacttagaaacgattgggggctaaacaatatctggaacaaattgataactccaagatttgaaaggttaaacaatattaataaaaataaaatttatggtaattgggaaaacaaaaaaggaaaaaatgtatttcaaataaattacttaaacgacaatttatcaactctaaacaccaaaagaattgatcatagacatcatgccttggatgcacttattgtagcatgtaccacgagaaatcatataaactttttaaataatcaatatgcaaaaagtagaaatcaacgacatgatttacgcgctaaattaaaaagaagagaaactattacaactgagggaagtaaaaaacaggtttttaaagattttataaaaccatgggaatcatttacccaagatgcacttaaaaagcttgaaacgacaattgtaaactttaaagtaaataaacgaattataaataaaacaattaattggtacaaaaaatgggaaaaacaaaaagatggtacttacaaaaagattcaaaaaaagcaaacaaagggagatgcatgggctattagaaagccattacatatcgatacaatctatggcattgtatgcaaaaaattgcctttaaaatctgctttagaaaattacaaaaatattattgacgaaaatttaaaacataaaattaaagaacttaaagaagtaaataaattcgacaataaccaaattataaattttttcaaagagtgtaattttatttttgaggacaataacattcaaaaagttgaagtttacgattttaaagataatagagacaaaactattttatcatcatctagacaattgatcgacgaaagctttacacctaaaaaaataggaaaagttttagatccaactatcaggaatattttattaaaacatttaaatagcaccaaatacaataataaatttgattcagatggcaacccaatcaaaccagaaaaacttgctttttcacctgaaggcttaaaagatttaaacaaaaacattaaacacttaaataataacaaagaacaccaaccaatcaaaagagtaaaattatttgaaacattgggaaataaaattaaggttggctacactcaacaaaaaaacaaaaaatttgcagagaccgcaacaggaacaaatctttttttaggaatttattctgacaacaacaaaagagattttaaaacaatacctttaattctagctatacaaagagaaaaagaaggattaaatccatgtccagatacagatgaaaagggaaatcaacttttattttcattatctccaaacgaacttgtttttgttccaaataatgaagaaagaaaaaatccgaatttagttgattttgaaaatctgagtaaggatcagattgatcgaatatacaaatttgtaagctgtactggtagtgaagcttattttgttccttcaagaactgcaaaaccaattattgaaaacgaaaatggaacaaataataaatcccaaagaattatagaatttaacgaaaagacatctataaaaaatgaaaaaaacgagccagttttaatcaaaactatttgttggaaaatagaagtaaatcgtttaggaaaaattattaaagttattaaataatgctcaaaagaacactttttttcggtaatccagcttatctttccacacggaatgagcagctcgtcgttcggtttccagaaaaagaaaaacctgaacgcactttgcctattgaagatctcggcgtcattgttcttgagcatcctcaaatcaccattacatgtggattattgagcaaacttagtttaaacaaagtcctcgtcgttcaatgtgatgcccagcatatgcccgctagcgtatttcaaccgcttagcgggcatacgcttttttctgagcgactgaaaaatcagcttgacatgagcctaccgcttaagaaaaatttatggcaacagacggtgcaagccaaaatcaccaaccaagcaatgcatttagagaaaaataatattgatgctcgaaaattacgaagatggatccaagaagtgaaaagtggtgatggagaaaatcacgaagcttatgcagcggcctattattttcaaaacattttcccgattgaggatttttctcgcaaccaaaaaggcattccgcccaatcattggctaaattatggatacgccatattaagagccgtcacagcacgagccattacggcaagcgggcttctccccgctttgggcatttttcataaaaataaatacaacgcattttgccttgcagatgatcttatggaaccttatcgcccttttgtcgatcaattaatcaaccaaatgcttgctaactttgagttaaccgaagaactgacaacaactcacaaagcggaattactaaaaattcctagcctagatgttgttatagatggcaaaaaaagccctctcatggttgccatgagccacacaacaagtagtttctatgaatgtatagaaggctctagaagaaaaatcgcttatcctgaattttgctaaacctatggaagaacttttcactcgcttaaaccaatatcgctctatgtggattcttgtatcatttgacctgcctacggaaaccaagctcgaccgtaaaagagctagcaaatttagaaaacaattgctagaagatggattctctatgtttcaattttcaatttatatgcgattctgttcaagccgagaaaacacagaagtgcacataaagcgagtaaaagacattttacccaaacatgggcgtgtagccatttttagaatcaccgacaaacagttcggtatgacagaaatattccatagtaccaaagaggtggaaaaaccacccatgtaccagcaattggaacttttctagaattaaaaaaattatcaaaaatttacttcaaataaaaaaaggttgcagatttctataatcctagcaaccttttcaactttttgatttacaagcaaaaacaagaagtatcttgtgattactcacacaaaaataagaacttgaaagcaaatcacaacccttgctaccacgatataattaaatatcgtcttgtgattactcacacaaaaataagaacttgaaagcaaatcacaacttgttcttttaatttagcttgtgctttctccttgtgattactcacacaaaaataagaacttgaaagcaaatcacaacgtatgaggttattaattaatcgagaagatcttgtgattactcacacaaaaataagaacttgaaagcaaatcacaacaactctctcttgcagtaatatccccctatacttgtgattactcacacaaaaataagaacttgaaagcaaatcacaaccagtcttccatcactttgctcttttagattcttgtgattactcacacaaaaataagaacttgaaagcaaatcacaactaaatagtctaaacgaatcttttcaagtttcttgtgattactcacacaaaaataagaacttgaaagcaaatcacaactaggaccagatttaaacacttcatctgtttcttgtgattactcacacaaaaataagaacttgaaagcaaatcacaaccctgcgctgtggctaaatcttttgcgtgttcttgtgattactcacacaaaaataagaacttgaaagcaaatcacaactgttgtaagtccactcgcagggaatgccacttgtgattactcacacaaaaataagaacttgaaagcaaatcacaacacataaacatccgtcacattctgaccatttcttgtgattactcacacaaaaataagaacttgaaagcaaatcacaacggtgttggttatcaccaattaagaaattgcttgtgattactcacacaaaaataagaacttgaaagcaaatcacaactatgtgcgttaacttagcttctgaaatttcttgtgattactcacacaaaaataagaacttgaaagcaaatcacaacgaaattcctcgtcagcttcaaattctataacttgtgattactcacacaaaaataagaacttgaaagcaaatcacaacccatttttaatctattttaatttacataaacttgtgattactcacacaaaaataagaacttgaaagcaaatcacaactaacctaagtttaatcctgtgatcccttcgcttgtgattactcacacaaaaataagaacttgaaagcaaatcacaactagatattgtttagccgttaagcggttcatcttgtgattactcacacaaaaataataatttgagacctaattacaacaccctaccccatctccttgccttgcatcgacttgtgattactcacacaaaaaaacccgtagtgcattataaaaaaggttgcccatgagcctaaagaaaagtaaattgcattggttaccaatcaaatacaattatgagcaatctagaggcaagttacaattttattttgaataaactaatagaattttcaggaactgaaaatttctattttaaaccagtgaaaccaaaattatctgatatagagctgataagcttaattattttagcagaatttaaatctatcgattctgagtaccagctttttagagagataaaaggttgggctattgaatctaaaattgaaaggagtgtttacaacagaagaaaacgaaaactcttcccttttcttgaagaaattaggtgcaaaatggtgaaaaagttcaatgattttgaaaactatttcttggtggacagcatgcctttagaagtgtgtaaattatcccgctcttccagaagcaaaatctgtaaagaaaatagcttttcaatgccaaataaaggtttttgtgcttctcaaaatctacacttttatggttacaagctacatgcgatctgttctattgctggtgtgttccaaagttttgacttatctcccgcctccgttcacgacattcattatttgaaagacataaaacttcaaatttctgattgcgtgttacttggagacaggggctatctttctcaaacggttcagcttgacttgttcaatgaggtaaaaatccagttagaaacccctaaaagaaaaaatcaaaaagattacaaacctcagttctatccattcagaaagtgtagaaaacgtatagaaactttattctcgcagttgtgtgaccaatttatgatacggcgtaattatgccaaatcttttgaaggattcaaaacaagaatattggcaaaaattacctccttgactactattcaatatctcaataaatttgtctttcatagtaacattaacaatttaaaaattaacctcattcgataatgcactacgggttattaaaaaattaagattgcaatttaggaccaaaacacaaatctcccgcatcgcccaatccaggaacgatatagcctttttcgtctaatttatcatccacagtggcacaccacaaatgcgcttggggcaattcttcgttgattttctgaatcccttgtgtcgccgcaatggcacataaaatatgcaattcagaaggctgagccaattccagcacggcatgaatcgcttcgcacaaagacgctcccgttgccaacataggatctaccacaatcaaagggcgatttgtgatatctgggcaagttacataatcttgtttaatttcaaacccctcggcgttgtgtttgcgataagccgccacaaaaccactatcggcatggtcaaaataattcaaaacaccttgatacagaggcaaacctgcacgcaaaatggtcattaccacgggctgagtttcaagctccaccgaaggtttcacgccaagtggcgttttgatttcgcaagctttgtacttaaaagttttgctgatttctaatgcacctacttcaccgatgcgctctaaatttctgcggaaacgcatgcgatcgttttgaacttccacatttctgagctcatttacccaagaatttaaaatagattgattttcagataagtcggtgtattttaacgaagtcataagcaagtatatttgagcaaaaatacaaaatttcaagttttttgggtaaaaaaatggaattttatgtatttttttgggtttcaatttagttagaaaattttgattctccttagtttaaaaatattaattcaaccaaaatttaatcattgataaaaaacattgaaaatcgcatttttcaaaccgaaaagttttcgtagttttaacattttcatacctttgcatttatgtttaaaaacgatattctacccgaagatttgtgccaatatattaccgctttttcgtctgatgagccccaaatgctaaaggaaattcgcgaaaaaacggaacaagaaatgcaccagccacacatgatttctggtgtgttgcaagggcgattgcttagttttttggctaaaatgattcagccaaaaagaattttggaaattggcacctacacgggctacgccacactttgcttggcagaaggcttagctcccgacgggaaaatcgtaaccctagaccgagatgagcgtgcggcagcattctatcgtccgttttttgcccaatcggcttttagtcatcaaatcgaagcccatttggtagacgctatggattttcttgaccaaaaagtggatgagccttgggatttggtatttctagatgccaacaaaaaaaaataccgcgaatatatagaaaagctcttaccacaaatgcgacaaggcggcattatccttgccgataatgtgctttggaaaaataaagtgctacacgagatagattctaaagataaaatgacgcaatctttgcatgattttaatatatttgtaaaaaatgatgaaagattggaagctgtgatgttgccgataagagatggtttaaccttgattagaaaaatatgaatttcgggatttgcaaagtaagtatttcgcctgtgcgtgccgaagcgagcgaccgtgccgaaatggtaacgcaattgctttttggcgaaaaggttgaaattttaaaaacaaagaaaaattggattagaattaaagccgattttgatgcttacgaaggctgggtagatgagaaacatcttcagccaattgaagaagccgcattcttcgataccgaaactccttgctactacaccaccgagccttttaatcttgttgtggcaaacaatgagcctaccacgctcccattgggtgccgaaatcagaaatattagcaacaatacttttcaattgggcgaagacacctacgaattgtattgcgaaaccaaacaagtggaaggcttgataagccgagacgaattggtgattttggctaaaaactacatcaatgtcccctatttatggggcggaaaatccaactttggcgttgattgctctgggcttgtgcaacaggtgtataaatttaccaaaattcatttacctagagacgccaaagaccaagccgaaaaaggcgaaatgttgggctttgtagaagaagctctgcctggagatttagccttttttgacaatgatgaaggaaacattatccatgtagggattatcatcgataatcagcgaattttacacgcgcatggcaaagtgcgtatcgacccaattgactccacaggtatatttaataccgatacgcaaaaatactcgcacaaattgcgatttgtaaaaagaattttgcccgaataatttaaattacccgggcaaaattttaatcttcgcaagtgttgattccatttacataatctttgatgattcgcaccgaatctgcggtttcgcttcctaagaaccctttaaaatctttggtcgtgatttgtttgttataatcttttaaaagctgtttggcaagcggcatatagctccagtgccatttttccatttcgtagcccgttctgccgcctttcttatcggtaaaaacttggcaaaacccgtattttcctgcattttcttgcatccattggtagagttgctttccttttccgctttcaaaataagaattattcagcgaatttaaatccacatctgtcccccaatggtgtcgcgaactcataggcattgagctaaaaagcaaaatctttttggcgcgttctttcggtgttaaattagcattggctttccattttctttcccaaatatttttctggtgctgaaaatttctcgcccccgaaactatgagcaaattaaatcccgctttttgtgctgcttggtgcattttcaaaaaagcttcgtaggtttcttttcttaaataagtttgcttattacaatatttagacggtaccagaacaaaagcagaatctttagcaaaattagttctcccgaccaaataatctttataattggtttgtggtttgacaaaagtaagcgtatcttttgctttttgaacttctacaaaattctgaatttcgatgttttttgcagcattgtttgtatcgtttttttgttggcatcccacttgagcactcaatccaaaaacgagcaatagtggtagtatattatttttcatttcttgacatcacttaggtagcttaatacatctgcaaagttacttttttcacaatacaaaatccatatttcgtacatttttcatacatttatagagttttttaatttttagataatatgaagttaagatatttcttgatgtttctgtttacgggctccttgatttgggctcagaacaaatacccaaacgattgcgtaaactacatccaagtgtgtggaaataaaaacatttcgctagatgttggaggtgtgggtattcgtcaagaaattgacgatcgaaatttctgtaactcccacgaacataattcactttgggtaaaagtcactatcaaaaaaagcggaaatctgggatttattctccgtcctgcgtcaagggatatagaggaagattacgatttttgggtgtttggtcccaatcctacttgttataatttaggcggaatcctccgttgctccacaaccaatcccatgggagcaggcttatacaacaactttacaggattaaaaccaagtgaaaaagatacttacgagggaccagctaatagaggcaattcgtttgtaaaagacattcaagtaaaaacgggagaaagctactttattgttatagatcgcccacacgggaatagtgcttttacacttgagtggacgggcgatgctgagatagaaaatccaatggaagaagttactctaaatctaaatttagaaaacatcagcctttgtgatcctgaaaacgatggcgtagaaacttttgattttgaatctttaaaccaaaaagtaactaccgacaccacaggactgaaattttcttattatgccagcgaatccgatgccacgattaaaaataatccattgaataagcattccaaaattagaagtggcaaatattggtgccgtgtggagaatatcgcaacgggctgttttgaattagtgaattttttaattgatttggagggcgtaaaactttcgcccgcgacctccacctattgcttaaatgggaaagaatctgtgaatgtagatttaacgagcttttcgctcagcaatcaagagggactaaaatatacctattacacaaggcaagatgatttagataaccaaagaaactctatccaaaatcctgaaaaattcgttttaaagaaaaataccaaaatctatgtacacgcccaaaaaagtagttgcgagaacaatagttttattgaattaaatgtccccgaaaacccatcggtgaaaatgcttgaagagcaagtttgcctcaatacactagaagatggcaaaattgatttaactctatatgaatcaaaaattaacaacagaaaagtctctttttctttctttagttccaaagaaaatttagagcaaaataaaaaaattaacaacccaaatcagacacctataaatttaggtaaaaatgtattttttgtaaaagtggaaaacgaacattgttccaccactactactctcacgattcttgccaatgatgcccctaaaatttcaaccgttgaacaatcttttgaatattgcccagaagaatttccaattcaaatttcggcacaagatggttttgctcgctatgtttgggacaataaaaaagaaaaacaaacgctagaagtgagcaaagcgggaaaatatagtgtaaaaatctacaatgaaaagggctgttttacagaacaattctttacaattaaacaaaagaaagcacctgaaatttctaatatcatttacgaaaattatcaaattaaaatcctttcaaacaacacagaggaattgctctatcgcataaataatggcaaatggcaagaagaaaattcgttcaaggatttagcccctggcgtttatcagttttatattaaattcaaaaatgggtgcatgtctgcaccaaaagaatttgagtttattaaattaaacaatgttatcacaacaataaaagatggcaaaaacgactatttttatgtgccaaaaatcaataagggaaagtataaaaatttaaaaatctataaccgatacggcaaagtgatttatgaaaaccctctgaaacaagctgtaaaatgggaaggtaaaaatcttccgcaaggagattattggtacattttgcaaatcgacgatgcgatctataagggaaacatctctatcatcaattataaaaaataaaaatatgaaaaaaatcattatattagcacttagttttttcatgcttacagcgtgcaacaactcttctaaaaatccaactatgaacactgtggaatcaaagtttccgtttgagcaaacgcttgaaactttaaaaaatgaaataaaagctaaagatatgggcattatgcaagtaattcgccatgatgaattagctcaaaaaaatggtttagaaataaacccaactgccgtaattattttcgggaatcccaaagtgggcaccgctctcatgcaagaatctccagccatagcctatgaattgcctttgcgctttctggtttatgaaaaagacggaaaaacttttgttttatataaatcgcctaaggaatacgaaagtttaggcatcaaagaaaataaaccagtgctagacaaaatgcaaaatgctttgcaatctatcgctgaaaaagtacaataaacatctcaacaaactatgaaatctatcaatccatttacacaagaaactatttacgaacacgctgaactttctgaggctgaaatcattgaaaaaatcgaatcagccaatgtcgctcagcctgcttggaacaacatttcgctcaaaaaacgcaaaaaaatctttaaaaaacttgccgaagttttagaagaaaatgcctacgaatggggaagaaccatcagcgaagaaatgggaaaacccatcacacaatccatagccgaaatcaataaatgtgcgtgggtttgccgctactacgcaagcaatgcacaaaaacttttaaaatcaaaacataccaaaaccgaagctcaaaaatcgtatgtgcgctacgacccgcttggagtaattttaggcgtaatgccttggaatttcccattttggcaagttatccgttttgctgtgcctacgctcatggcaggaaacactgttttgcttaaacatgcaagcaatgtgatgcaaagtgccaaaaatgtggaaaaagcatttgaattggcaggcttgccagaaaactgctttatcaatctgccgattagtagcaaggcggtagaaggcatcattcgccacccaatggtaaaaggcg

SEQ ID NO: 2735 - DNA, 23660 bp, synthetic construct
  source 1..23660: mol_type = other DNA
  misc_feature 1..23660: note = Synthetic
cggcccatgacgaaaaagatttccacaaggccgaaggggtccgcagcgaatacgtgctgcaggtcaaaggcctggtgcgggaacggagtgcagaaaccgtgaacccccacctgcccaccggggatgtggaagtggtggtgaaggacctgaacgtactgaatccttccaagaccccgcccttctatatccaggatggcatcgatgtagatgaaaacgtccgtctccgctaccggtatctggatctgcggcggccggaaatgcagcagaacctgatcctgcgccaccgggtgaccaaggcggtccgggacttcctggataaacaggatttcctggaaatcgaaaccccggatctgatccggagcactccggaaggggctcgggactacctggtgcccagccgtgtgaaccccggcaagttctatgcactgcctcagtctccccagctgttcaaacagctgctgatgattgcggggatggaacggtacttccagatcgcccggtgcttccgggatgaagacctgcgggccgaccgtcagccggaattcacccagctggatatggaaatgtcctttgtggatcaggatgacatcatggccctcaccgaaaagctgatcgcctatgtgttcaaggaaactctgggcgtggatgtgcccgtgcccatggcccggatgacctgggatgaagccatggacaaatacggcagcgacaaaccggacctgcggttcggtatgcagctgatcaacatgaatgaagccctccaggggacccagttcaaggtgttcaaggacatcatcgaaaagggcggcctggtgaaagccatcaacgtgaaaggctacaacaagatcccccggagagaactggacggcctggtggaattcgtaggcatctacggcgccaaaggcctggcctggatcatcgtcaacgatgacggcaccatcaagtctcctatcgccaaattcttctccgacgaagaaatgcagcggatcctggctgccggcaaggcggaaaaaggcgatgtgctgctgttcgtggctgaccggaaacctttggtggtagctgcggctctgggcgccctgcgtctggaaatgggcaagcgcctgggcctcatcgacaaggacaaactgtgcttcacctgggtggtgaagttccccatgttcgaatacagtgaagaagaacaccgctatgtggccatgcaccatcccttcaccgctccctgcgatgaagatgtggacaagctcctcaccgatcccggccatgtgtatgccaaagcctatgacatggtgctgaacggggtggaaatcggcggcggttccgaacgtatccatcgggaagatatccagaagaaggtcttcgaagccatcggcctgactgacgaacaggcccaggagaaattcggcttcctgctgaaagcctttgaattcggagcacctccccatggaggtctggcctttggcctggaccgtctggtgatgctcatggccaaacggccttccatccgtgacgtgattgctttcccgaaatcccagagtgccatcgacctgatgtgccaggcacccaatatggtggacgaaaagcagctgcgtgaactccatatccggagcaccgtggtgaagaaagaaaaagaagaaaagaaataaatccggtctgcatgtgggatgagggggagcgccctgatcctgctttgcggaaggacgcaacagggaccgggatgcgagggagcccgtgggccgggctgagagggtacccaagtaccgaccgccggagggagggatccctctgccgcatcctgggaaccgtacaaaaaaccggctgtcgccaagaaagcggcagccggtttttgtgtgcatgaaaggagaacgtaccgtgaaaaattggaagaagatgttgggggtgctgctggccggggccctggtgctgggcggctgcggcggtacggaaaagaagcaggcggttgggagcaagaccatcccggaactgaagatcgccatttctccttatcaagatgcggataccctgcggaccaagaccgagcccctggggaagatgctccaggccaaactgaaggaaaagggctatgaggtgcagaaaatcaccctgaatgtgggcacttcctacaatgccgtgggggaggcactcagtgcaggcagcgctgatgtgggtttcatttccggggccacctatgtgctctgcgaccgggatgtggatgtgctgctgacggcgctccgggaaggcatcgataaggacaccacggatctttccgtatggaacaacggccagccagacaaattcaccaaaaacctggtgaagtattatcgctccgccctggtggtggggcccagtcccaagggacaggctctcctggccaaagtgaagcggggagaaaagcccacttgggaggaactggacagcctgaactgggcggtgatgagccctgcctctgcttccgggtacctgtatccttccctatggctgaaggaaaactacgggaagaccttgaaagacctgtcccatgtggtccagtccgattcctataccacttcaacggctcggctggcttccggccaggtggatgtgatggtggcctattcccatatccgggccaaaatggaaaaagattggcaggtcaaactgggggggaccgggtccatctgggatcagaccgggatcatcggggtcacggggaagatcttcaatgatacggtgagtgtgagcaagaccagcaaagtgatgcaggatccggccttccgcaaggcactgggagaagccctgatcgaaatcgggaagacagaagaagggctgaaggtgctgaagaccatcggccacaagggctatgactgggcccaggcctccgattacgatggagaacggaaaatccggaaggaactccaatgaacccgacggtactggaattgaaagccgtttcccaagcctatgaaaaaggacatcccattctccagggggtgtccctttccgtaccccagggttcctttgtttccttgatcggccccagcggtgccgggaagaccaccctgctccggttgttcaatggcatggtacggccgctctccggtgaagtatgggtggaaggccgccggttcgacaccttgaaagggaaatggcgcaggcaggtccagcagcaggtggggatgatcttccaggatttctgcttggtggaagagagcagctgcctggaaaacgtactttgcggggccctgggacggatcagcctgtggcgggccctgtggggaaacttcccagaacgggaagtgcagaaagcctggcaggctctggatctggttgggctgggcggacgggaagataccttggccggcagccttagcgggggtcagaaacagcgggtagccattgctaggactttggtccaggaagcgtccgtcatcctggcagatgaaccggtggcttccttggatccagggacgggaaaagccatcctggaactgctccggcagctgcaggaaacccaggggcttaccgtggtgatgaacagccacaatgtggagcaggccatggcattttcccagcaggtggtggggctccggcagggccggatcctgttccaagggccggcggatgtctgggatgaggagaagctccggggattgtacaggagggaatcatgacccaaagataccaaccgcggatgggatggatcctgctgctggggttgacggccggatccctggcagaaatcggctgtgatccggcattgctgggagaacggggcggccggttctttgatattgcccgggccatgctgcccccggattggggatttttccgggaggcagctgggcctcttctcagtactgtgcgcatgtccctggcaggttctttcctgggcagttccctgggccttttgggagctgtgctgggcagccgttggaccaatccccatggctggatccggatccctttcctgtgtgccatccagctgctgcggacagtgccggccttgatcctggctcttttgtgcaccttcctggtgggactggggagcctggccggtaccttagccctgaccctcagtacctttggggtgatgacccggctgggatatgaagatatggaaaccttggactggaaaacagcccgagccctggaagcctctggctgcggccggggaaaagccttctgccgggctctcctgccccggctgctgcccgggtatctgaccaacgccctgtacctgtgggaatccaatgtgcgccaagcagccatcctgggctatgtgggagccgggggcatcggactgctgctgaaccagcagctggcctggcgggcctatggccgggtggggaccttgctggtactgctctacggtgcagtgctggtgtcggaaagtctcagtgaagccctgcggaaagtcctgagaggccagtggaggctccggtcttggatgaaaaaaggcctgggtgtcttgggactgctgctgctcttgggttctctgggaaccttggaaccagcaggaaatggcggcatgggtgcggcccgggccatgctggagggacttttggaaccggatccttccctgctgttttctctggaaaaagatgctgtgccctggctgttgggagaaaccttctgtatggctttcctggggaccttgggagggggcttggcggctgggttcttagctttggcatccagcttccggttcctgccagtgggggctgctttggtgcctcggctggtcctcctgggcatccgtacggtgccggtctttgtctacggcctcatgtggctccgggtcactgggcccggaccttttgccggtacccttactttgctggtgtgcagcatcggccttttggccaaacggttccagatcgggctggatagtacggacccacgaccttttgctgccagccgggccatgggtaccgggtgggctgccgccttccggtggacagtcctgccccagctgaaaaaaagcggagcggctgccctgctgtacagactggacgtgaaccttcgggaggcttccatcttaggcctggtaggagctggaggcatcggcaccccgctgattctggctctccagcagtacaaatggcaggaagccggcgcctttctttggggcatggctgccttggtgctggcggtggaatggggaagtgaaagatgcaggagatgaaaagcggcttactgcttttcatctcctgcatctttttacgccttcccgccaacgcgctcccgctttggtaaaatgccttgccttgtatttttatagatatagctccttagcaagtttgatgaaattttttgctgcaacggaaggataagtgttttttttccaaatcaattctacaggtttagagaaaaggccttcacaggcaaatccttttatgtcaggatttttttctatacaatttgctggtaaaaaaccacaagctgcatttttttcaatgaaacattctacagtataaatttgttctgtctgatgaacgatatagggatgcagatttcttatttcgaattccctcatgatttgagcagtctgattgaacttaggtgttaaaagaacgagtttttctctggaaatttcttcccaagttactgttgtattgttcgctaaaggatgcttgattgatacacaaaaaagaagaggagaagagttgctcagttttatgtgattgtaatcattagaatcgatattttccggaaatatggtgagaataagatcaaattcatttttatccagtttttcaaattgctgggagattgatgtttcttgagggagaagctgagaatcaggatatttttgtgtaaacgcagtggatagaattggaaacagatcattgctcaacagactggatactcccattcggatataggcctggcctgtggcgatgtttttcagggcaaccatcatcttatgataatcggttaggaagccattgatttctgcaaagattaatgtacctttctgtgttaggatggcccctcgtttatcgttttcaaataagaggacttgtaactctgcctccatctttttgatggacagggatagtgcaggctgtgttaaaaataatttttttgctgcttgtgagaagcttttatattgacagattgtttggaattggatcatttggctgagtgtaatcataaaaatcaccatataaattaaaataataatatattagtattttaaaatatacttatatataagtcaatgatataattcaattaaagaaacgggaccgttaaagatgaaagaggaggaaataatatggatgccgcagttttaacgcttatcatattaggcgtgtcattgatactttttgtatctgaagtgttgcccatgggcattaccgcatttcttgtatcattgactttgtatttgagccatatcattgacgctaagactttattcggctctttggcaaataccaatgttgtaattgttgtagccatgtgtgtgattggaaaagcatttttcaatacggggatggcctataaaacaggcagactaatcacccgctttactaagtctgaacgctggttaactattgcgatcatgatggtaagcggtattatgtcaggatttttaagtaataccggcaccgtggcagtgttgatgcccgtagtcattggaatagcaagagtcaggaatatacaacccataaagttgctcataccattaactacagctgctactatcggggctgatttatctatagctggatcacctggaaacttgattgcgaagtctaccattgaacagatgagcaacggtacgttgaccgtatcattttttgaatattccaagattggagtcccacttttggtcatagtgacattatttatgggattggttggttataaattgattccagatcgggaagctgacagcagcatcgttgtagaatctacaaattatgataatgttccggtatggaaggctaatttgtctctggcagttttggctgtaacaatcatcggaatggtattgagtgattctatcaaatggcttccgcctctgcacattattgcttctatgggggctgcttttcttgttgtcacaggagtattgagtcagaaagaagcttttgattctattgaaatgcaggttgtttttttagtcgcatttatgctgcctttgggaacagcgttatcaacaactggggcagggaaaatgttggcaaatatggtaattcagattacaggtaaaaattcacctttactgcttttgactgttctatatacgctgacatggataatgactcaatttatgagtaataccgcgacttgtacgctcttatgtcccgtaggttggcagattgcagaagcgatgggggctgatcccagagcggttgtcattgctatcttgattgccagtagtgcagcggtatgtaccccacttgcaattcctgctaatgccatgattatgggacctagtaatattcgatttaaagattttattgtgcctgggctggcaacatcgttggtttgtgcagtgatttccattatcttattgccgattttttatccattttattaataaaaaaggggagttaaaaatgaaaattgtaaaaattgtagagaaaacagttaaatctgggtcaaatattgcaaactcatatatcaacttcaaagatatgactgatagtatcgtcgccattgtaactgatgtcatccgggatggaaaacctgtcattggatatgggttcccttccattggccgttacgctcctaccagcatactgcgtgatcggatgattcctaagttgatgaatgcagctccagaagatgtttatacggaagatggttccaatcttgatccgtttaaaatcaacacgttgttgaaaaagaacgaaaaacctggtgggcatggggacagagcacatgcaatcggcgctatagatatggcggtttgggatacagttgccaaaattgagaataaacctttatatcagctgttgggagataggtacaataacgggaagtacgataaaaaaatctatacatatgctgccggcggttattattatgagaatggtaatatagaaaaattgaaggatgaactgaaatcatatcttgatttggggtttcgtgatgtaaaaatgaaaattgctggagcagatttgaaaactgatttaaagcgaattgaagctgctctaaccgttttagatggtgatggatcgcgtttaatggtcgatgccaatggaaaatatgatttacggaaggctgtcgaagctgcagttgccttgcggccttatggtttgaaatggttcgaggagccggttgatcctcttgattatgctggattgaatgcagtagcagattattatgatggatccattgctactggtgaaaatttattttcttatcaagatatttcaaatttgctgaagtttggtggtttgagagcggatcgggattatatccaaatggattgtcctctaagttatggactcacagaatatatgagagttttaaaattaatgaaagataaaggatggagcagcagaagatgtatccctcatgggggacatcaattttgttccaatattgcttcaggccttttccttggcggaaatgaatgctatccagggatatttcagccgtttggcggctttgctgataacattcctgtagaaaatggatatgttagattgccagatatccctggtgtaggatttgaagcaaaaaagaatctgtgggaggtgatgaaaacagttgttgagtgaagcgtttgcctggatataaaggatgtccatatcaatggctgtaaattgcttgggagatactataattataatttttgaaaaaatggtaggaattgagcgattatgcggctcaacagctaagggatgttgtataataacgtacagcatccctttttccttgtcctaaaattttcccatttcttttgttatactggaagaaaagaaatcccattataggaggtacgggccatgaagagcaatatggaacaaagagggatgcaggcaggggaaaaaggaatagggagggaagagacaggggaactggaccggctgttcctggaccttccgccccgggaggcttatcctctgatcctggcgaaagcctgggaaggcagcggccgggctctgctactcctggctctgtatctggacgggggatatgggaccttcttcttggatcagggtcaggcccgggtttatgcttccgctgcttcccaggtcggagatccggtggcccctgccttttgcgcactgaaagacttgcccaatgtgggagaatccgtccgggtgtttgtccggcagagagaaaagatccgggccctggcagcagaaggagacttcctggcccagtactatctggggatcatgtacgcctacggggaaggagaggacccttcctatgaagacgctctggcctggttcgagcaatccgctgcccagggctttgcggccgcccagctggccatgggttcctttctccggttggtggatgggggaaaaaatggcatctggcgggagaagaggctgggatggtatcaaaaagccgccgaaaaaggctatgcagaagcccagctccgcctggcccaggaataccggctgcgctgccatgccctggaccaggccaggatctggtacgaaagagccgcccgccagggccatcccgctgcctgtgagatcatggggaccttctgggaaaatggatacgtaggccgggcagaccctgcccaagcactggcctggtaccgcagagcttaccatagaggcagccgtaccgcctgcttcgccatcgccagcctgtacgaagaaggccgaggcgtcccccaatcctggcagcaggcggccctgtggtataaaaaattttgggaaagataggaattgtactgaattttggataggaaagagtgtaagatgggagtagaaagaaatcaaagcaatttgtaaaataaagatatgatataatattcttatatttctttactttccatggtaggtgcgctataatgaacttggttgtaccaaaccaatgatcagtgggttactatgataaggtaacacaccgaggagctctaacgccttgccatttggcaaggcgttatctcttttatggggataaaatacaaagaagggtgggcaagattatggcatatggtatcgggttggatataggaattggatcagtaggctgggctgtcctggcattggaccatgaagaaaatccctggggaatcattgatttgggcagccggatctttgatgcagcagaacagcctaaaacaggggcttcgctagcgctgcccagaagggaagccagaagtatgcggcgccgtctgcgtcggcgcagacaccgtctggaacggatacggaacctttttatcaaatgcggactgttgacaacagaacagctggatcatttgtatgacgggaaactagaagatatatatactctccgtgtcagagccctggatgagagactgacagatgaagaattggcacgagtcttgctgcatctggcccatcgccggggatttaaaagcaatcggaaagcagaatcccaaagtacagaagcaggggaactgaaaaaagccatcagcctgaaccagaaaaccatggtagaaaaccactatcggacggtgggggaaatgttctgcaaggatcctcgttatttagaatacaagagaaaccggggtggaaattatcttaacacggtggaccgggccatggtggaagatgaagctcgcaaaatcctggaaatccaggaaaagctaggaaacagaaaactgaacggggattttcaagaatcttttctttccatcctgctgagccagaggcagtttgatgaagggcctggaggaaacagccactacggaggaaatcagatcctgaacaaggtaggaatctgtacttttgaagatggaagcaatggggaacctgcggagaagagagctcccaaagtctgttattcttttgaatatttcaaccttcttcagaaagtgaaccatttgcgtctgacctcttctaaagacaacagaggattggatggagcagaacggaaaagggtcattgcgcgggcaaaggacaaagcagatctgcgtttaggagaaatcaggaaagttttacagattccttcggaataccggttccagggtgtttcctacaacacaaaggaactccctgaggaaactgagaaaaaaacgaaattcaattatttaccgttctatcatcagatgcggaaactgctggaatcaaaagcccagtttgatatcaggaattattctttggatgtgttggataaaatcggacagatccttgccttttataagggagatgatgccagacggaaggaactggagaaactgcaacttgctccgaaagctgtcgaagctctgttggagatgaatggaaccaccaagttctcccatttgtcactgaaggccatccgaaagattacacctttcctagaacagggcatgacctatgataaagcctgcgaggcagctggatacgattttcgggcccatcaggcgaataagtcttgtttgcttccggccaatgcaccggaactggaagatatcaccaatccagtggtccgccgtgccatcggccagaccatcaaagtggtcaatgccattatccggaagcagggaagcagtcccttgtatgtcaatgtggaactggcacgggaaatggccaaagattttcaggaacggaagaaaatcgaaaaaatcaacaaagaaaatcaagaaaataatgacagcctgatggataaaatcaggaaagaaaacaacaaacttaatccgtccggtatggatctgatgaaattgaaattgtggaatgaacaggatggaatcagtccttattcacagaaacatattgagagagaacgactgtttgaaacaggctacgtggatatcgatcatatagttccctacagcattagctttgatgacagctataaaaacaaggtactggtgttttcttcagaaaaccgggataagggaaaccgtttgccctatcaatatcttctgaagaaatatgggcaggatgcggcagatcggttcaaagtatgggttggtaacaatgtccgggattatcagaaacggcaaaggctgttgaaagaaaaaatgacggaagaagaaatttccggctttaaggaacggaacctgagcgataccaaatatatttcccggttcatgtataacttcattcgggaccatctggaattcgccccttctgaaacagggaaaaagaagagggcattggccgtcaatggaatgattacttcctatctgcggaaacggtggggcatccgtaaaatccgggccaatggggataaacaccatgctgtggacgcggtggtcattgcctgcaccactgataagatgatccgtgacctgactctttattcggaagaaagagaaaacaagtatgatgtggatgaacggggaagccgtttggtaaatgaatctactggagaagtactgaaagaatttccgtttccttgggaggggttccgccaggagttggaggcccgctgttctgatcatccggaacggggattggctggcttacctttctatatgaacaaagatttgaatgacatcaaaccgatttttgtttctcgaatgccccggagaaaagtgaccggggctgctcacaaagataccatccgcagtgccagacatattgctgaaggaattacagtttcaaaagtgccgctgaccagtttgaaactggataaaacaaaagaaatagatgggtattataatcctgatagtgatcgtattctgtatgaagctttgaaagaacggctgaatcagtttaatggcaatgcaaaggaggcttttaatgaaccgttttgcaagccaaaagcagatggatcacaaggtccactagtaaaaaaagtaaaaatccaatctaaggcgacattagcagaagagattacagtttcaaaagtaccgctgaccagtttgaaactgaataaaacaaaagaaatagatgggtattataatcctgatagtgatcgtattctgtatgaagctttgaaagaacggctgaatcagtttaatggcaatgcaaaggaggcttttaatgaaccgttttgcaagccaaaagcagatggatcacaaggtccactagtaaaaaaagtaaaaatccaatctaaggcgacattagcggtccttgttgagggaaaaacaggggttgcagataacgacagcatggtccgtgtagatgtatttaaggttgagggagaagggtattacctggtaccggtttatatagcggatacggtaaagaaggatttgccacaaaaggcaattgttgcgcataaatcatataaagactggaaggtgatggatgataaaaattaccttttttctttatatcctaacgacttgatttatgtggaaagtaggagcaagattaattttaaattgacccaagataaggaaaaagagagtactttggaaccagaattttcttgtagcaagatactgggatattatcaaggatgtgatgtggcaaatggtgcaattaatattattacgccagatggaacttatttgaagcataatcaaggagtaaaaaggttaaaaagattcgaaaaataccaggtggatattttaggaaaatcgtatcctgtcaaaagtgaagtcagaagaaaaattatcataaaacagaaagctcgataagggacgaggcaggctttgccatgggatatcgaaatattgtaatagcatcggctgccagcgtgtattgcagggacgaccagctgatcattctcaatgaggaaaacaacaaggttcccatagaggatatcagtgccattgttttggaaaaccggcagagcaaaatcagtctggcggcgttggaacagctggtttccagtaatgtgacggtatacctgtgtgatcaacaacatttgcccagcgccgtggtactttctttttatcagcattctaccaatgcggcggtcattgagaggcaggaacatctttctgttcctcaaacgaaacagatctggaaacagattgttgtggccaaaatccagaatcaggggcgttgcctaaaggaaagaggggataaggaaggaacctattatttaacggaattggccaaaacggtgaccagtggggatatccataatgtggaagctactgcagcccgctattatttccgaagggcatttggagagcaattttccaggacgggagatgatgggagaaacagtgcgttgaattacgggtatgccattatgcgggggctgattgcaaggctgcttacggcctatggattcatggtcattcggggaatccatcatggcaataagtacaacagctttaacctggcagatgattttatggagcccctgcgtccaatcgttgatttgtttgtattgaataatatgtcaaaagaggatatgctgacgccggatttgaaacatgccttagtcaatctcttgggggtggatgtagtgtctggaggacaaatgcacagcttgaattatggcgcggaacggatgatccagagttttatgcggatctgccagcaggacgagaaagatttagtgattcctgaactggtccagctgagacagcatcaatatgaataaatttatgcgtatacttgtacttttcgatattccggtaaaaacaaaataccaacggcatgtagccacgaaattccgccatttccttttgaaagacggatactatatgctgcagtattccgtctatgcccgtatctgcaatggtcctgatgccgtggaaaaacatcggcagcgcctgatgagggccttgccggataatgggtccgtgaggatggtggtcctgacggaaaggcagtatgaagcgattgatgtattggtgggaaaatatctgcctgaagaaaaggcctatgatgcggaacatgtttccattttttaaaaacaatcgagtaaggtttcaaaaattcctcactggagggatttttgaaaaaagtgaaaagcccttgtgccagatgacacaagggcttttgctgatctcgattgtaccaaaccaatgatcagcagggaactacaacgaagaatccaaggctaaaggagaatattttattgtaccaaaccaatgatcagcagggaactacaacagacgtatgaatcaacaatcgacaacaatgattgtaccaaaccaatgatcagcagggaactacaactttggacatatcatattttacatatttccaattgtaccaaaccaatgatcagcagggaactacaacctccgaaaaggtcataataggtgatagcaaattgtaccaaaccaatgatcagcagggaactacaaccagaggaccacgaactgctccaccgtccggattgtaccaaaccaatgatcagcagggaactacaaccgtccttccggaatgggtaaaacgcaaattattgtaccaaaccaatgatcagcagggaactacaacatatacacaaataaagcattacaaacagtaattgtaccaaaccaatgatcagcagggaactacaacaagagcattacacacggtaatgtccccataattgtaccaaaccaatgatcagcagggaactacaacacttacacgttgaaagaatggtaaataagaattgtaccaaaccaatgatcagcagggaactacaactaaattcgtaccatctgaatatgacagtaaattgtaccaaaccaatgaccagcagggaactacaactccattgagtttcacaatcgaatcttttaaattgtaccaaaccaataataagcagggaactacaatatcgtaccagcttttcgtttatgccagaagagggatatacaacagaatctacttgtctgcaactagacgaaaaggttgttgtacgtgtgtattttcacacgtgcaacagcccctttcctcaattattcaacaaaacccctttcagcgcctcacacagctccatccccagggtattggggctcaggggataccaggaggaatcccctgttttcccgtggctgatttcttttccgaggccgttgtaggtgtgttggtacagatcggcacagacccgcagccgtacatcgtatcggctcaacaggagggtagtccgggtaccggtcaggaccgtgccttttttcacccatttgttccacagggtcaggatcccggtcttttcgtcgtactggatgctccgggtatcgtaatagacttcataattgctgttggcgccggccagggtccaggcggccgtttcgtcggtgggcggcactgggggctgttctgctggagctgctggggctgctgtggagtcggctgccgaggctgttccagagtctttccctgtacccttcgccggtgcagccgttccgtccggggctttggcctcttttgctccattcgttacagaaacggccgttggagaaacggctttttccttttcctgggcaaaaagcagggaagggaacaggaaaagagaaacaaacaatataggaagaaaaagattttttttcatgaatgacatcctttctgtgaatccatggcattattgtaccacatcgtgttatactataggtgaattaactgaaagattaaattaaatcttttcaaaaggaggcagaatctatgaaaatcaccttcttgggagcggataaaatcgtcacaggctcctgccacctgctggaagtcaacgggaagaagatcctcctggactgcggcatgttccagggtcccaagctgatccgggacctgaaccggcgggaatttgccttcaacccaggtgaaatcgatgccgtgatcctcagccatgcccacatcgaccacagcggccttttgcccaagctgatccgggaagggttcaaaggattcattcactgcacccatgtgacggaagaactctgcgagatcctgctgccggactgcggccacatccaggaatccgatgcagagatcgccacccggaaagggctccgtgccgggaagcaggcggtggagcctctctataccgctgatgacgcctacctggccctgaagcacttcattccccacgattacgatgaagatatcgagctgtacccagggatcaccttccggttccgggtggccggccacatcctgggcagcgccctggtgaacctgatgatcgaagagaacggcaagaagaccaaattgatcttcaccggggatatcggccagcccaacgtgcccatcctggatgatccccaccagatttccggggcggatttcatcatcaccgaatccacttacgggaaccggctccatgaacaggtggaccgggaaaaggaattgtgcgacgtgatgaaggaagccttgagccggggcggcaacgtgatcatccccgccttcgccgtaggccgtacccaggtgatgctctactatttccagaagctcatgtccagcgggcagctgccggtggtccccatcatggtggacagccccatggccatcaaggccacccaggtgatgctgttcaacccggaggaatacgatgaagaagcccggaccatcttcaagaaacagggagggcggctcatcgatatgcccaatgtgaaatacacggaaacggcggcagaatccaaggccatcaacgacatgcccagccccatgatcatcatttccgccagcggcatggccgatgccggccgggtgctccaccatctgaaacacaacctgtggcggaaggattcttccgtgatctttgccggctaccaggcagaagggagcctgggacggcggctcatcgacggcgccaagaaggtgaagatcatgggcgaagacatcgccgtgggagccaagatctacaacctcaccggcttttccgcccatgcggaccgggaccagatgctggccttctataaagggatggaacggaagcccaaagccttcttcgtggtacacggggaatacgatgcggccagctcttttgcccatctgctgaacacggaactgggcactgccacctacatccccaatttcggagatgcagccattatcgacggcaccgactggcggatcgaagagaccaaggtcatcaccagcgcaccggccatccaggccatgcgggattacctgcggaacttcgaaaaggattacctggtttacaagggacggatggaacagctcatcacccacgatccccgtcggatccccgatatccgggccaagatggacaagatccgcaagtatatcgacgatgtgatgaagaccctgtaaatgaatttgacatacggatgggaaaagcatataataggaaagtcgaaatgatgtagtttactttgaggatgcttctttgacgggcatcctcttgatttatctggaaataagaggggattgggcttttatgattagaaatgatttgcgtaacattgccatcatcgctcacgtcgaccacggcaagaccactttggtggatgccatgctgaagcagagcggtgtattccgtgccaaccagcaggtgcaggaacgggtcatggactccaacgatcaggaaagagaacgtggcatcaccatcctggccaagaatacctccgtcatgcatgatggctgcaagatcaacatcctggacactccgggccatgctgatttcggcggcgaagtggaacgggtgctgaacatggtggatggcgtgctgctgctggtagacgcctatgaaggccccatgccccagaccaaatacgtgctgcgcaaagccctggaacatcatctgaaaccggtggtggtcatcaacaagatcgaccgtcccgatcagcgggtggaagaagtggtggacgaagtgctggatctgttcatcgaactgaacgccaacgatgaccagctggatttcccggtggtctatgcttccgccaagaagggcgttgccaagctgtccatggatgacgatagcgacaacttggaacctctgttccgcaccatcatcgacagcatccctgcccccgatgtggatgtggatgcaccgctccagatgctggtgaacaccctggaccacgatgattatgtgggccggatcgtggtaggccgtgtggtccgcgggaccatccggaacggccagaatgtatgcctgatgcacgatgaccagcgctccaaccagaaaatcggccgtctgtacacctatgaagggctgaaacgggtggaagtgccggaagccaaggccggggacatcatcgccctgatcggcctgaacacggcagaaatcggcgacaccatcgctgacgtggacaacccggaacagctccaggggatcaaagtggatgaacccaccctgtccatgactttctccgtcaacgacagcccctttgccggccaggaaggggatttcatcaccagccgtcaccttcgtgaccgtctgtacaaggaagtggagaccaacgtttccatgcgggtagaagatacggacagcgccgataccttcaaggtatccggccgtggggaactgcacctgtccgtgctcatcgaagccatgcgtcgggaagggttcgaactccaggtcgggaaacccaccgtcatcatgcgccgggatgaaaacggcaagctgctggaacctatggaagctctgaccatcgaagtgccccaagatttcatgggtgctgtgatggaaggcctggggatccggaaagcagaactccagaacatgaccgaaatggccggctatctgcggatggacttcatcatcccggcccggggcctgatcggcttccggaatcaattcctcaccgataccaagggcaacggcatcatgaaccatgtgttcgctggctggggtgcctataagggcgaaatcccgggccgtacccggggcagcctggtggctttcgaagccggcaccaccacggcttacggcatcgacaaatgccaggccagaggcaccatgtacgtgaaccctggtgaagaagtgtatgaaggggaaatcgtcggcgaaaacagccgggaagacgatatggacgtaaacccctgcaagaagaaacacgtttccaacatgcgtgctgctgggagcgatgatgcggtccgtctggttccgccccagaccttctctctggaaggggccctggaacacatcaacgacgatgaaaccgtggaagtcacccccaagagcatccgtatgagaaagaaagtcctgtcccgcctggaacgggcccgcaccagagcacggaacgctcgggcgtaagaaaaaagctgccgcattgcggcggcttttttgctttctcctccaaattggtgtaaaataaaaagatacaaagaagggagggatgtcacccatgtttgccagtttcaaatccgggaaagctcaccaggaggaacgggaaaatcccggcttgactcttttggatacgcccaatctggatttgtgtctccggacaccgggcagcctggaagacatcgtctcctacggcgacctgatcatggcggggaaggggctgctcgtatgcctcaacgacctgccggaaccggataagatccgggcccaggactacctggccggcatcgcctacaccatcggcgccaccgaaaccgaaatttccccggaagtgaccatgtacctgccgggagaagtggatacgatacgaggataagagaaagctgttgcttggcaacagcttctcagtcgggagtcggaagtctgaagccttaggacaggacctgtcttaacaggcaggtccttttgattgtgtagaaccaggaacgaaatcatttttagaaatcatttcgtacaagattttgcttattcaaaaatttgcctgcaaatttatcatccggctccagacttcagacttctgacttgagccgctatgcggcgctacagctaagggtgttgctacgcaacacccttttttaaaggagcacccatgaaccaattcgtccatttacatacccatacccaatacagcctcctggatgggtcctgccgtatcccggaactggtccagtatgccaaggaactggggatgccggctttggccattacggaccacggggtcatgtacggagtcatcgagttctaccaggaatgcaggaaagccgggatcaagcccatcatcggctgtgaagtgtacatcacctccgggtcccacctggacaaaagcctggaaacccggaacaagctctaccacttgatcctcctggcggaaaacaaggccggctaccagaacctgatgaaactggtatccatcggcgaagtggaaggcttctattataaaccccggatcgacaaagaagtcctccgccagcacagcgaagggctcatctgcctgtccgcctgcatcgccggggaagtgccccgccacctgctccggggcgaactggaaaccgccgagaagaccatgctggaatacctggatatcttcgatagggatcactactacctggagatccagaaccatggcctgccggaagaagccaccgtccgccgggaactccaccggctggcccagaaacacaatatcaaactggtggccaccaacgacctccactacatccataaagaagatgcttccggccaggatatcctcctgtgcatccagaccaacgcccggtacctggatccccagcggatgcgcttcaacaacgattcctactacctgaagagccgggaggaaatggaagccattttcccggaagaccaggaagccttggacaataccctggaaatcgcccagcggtgcagcctggaactggaattcggccatctgctcctgccggaattccccctgcctcccggagagaccatggacggtttcctgcggaagctctgtgaagaaggcttcccttcccggtacccccaggatgacggcaccgctcggaaacggatggaatacgaactggggatcatcaaacagatgggctattccggctatttcctcatcgtctgggatttcatcaactacagccggacccacgatatcccggtggggccggggagaggcagtgctgccggcagcatcgtggcctatctgacgggcatcaccaacatcgatccgctgaagtacaacctgatctttgaacggttcctgaacccggaacgggtgagcatgcccgatatcgatacggatatctgttacgtgaagcgccacctggtagtggattacctggctcggaaatacggggagagccatgtggcccagatcatcactttcgggacccttgctgccaaagcggccatcaaggacgtgggccgggccatggatatccccctgaacgtggtgaatcaggtgaacaagctgatccccaacaccccgggcaccaccctgaaaggggccctggaaggcagccgggaactccgggaactccgggaccaggatcccaacatcgcccagctcctggatttcgcccagaaagtggaagggatgccccggcatacctccacccatgcagccggcgtggtgatcaccccgggggaactgaccaattacgtccccctccagatcacttccagcagcgacgacgaacatgaatacatctgcacccaatacgacaaggaccggtcggaaagcctgggccttttgaaaatggatctcctgggtctccggaccttgaccgtcatcgacgatgccctgaagatgatcaaaaagaaccggggcacggaagtggatatccagcatatcgatctccacgatcccaagacctgcaaaatgctctgccaaggagatacggcagcggtgttccagatggaaagcgacggcatgacccggctcatgaagcagctggctccggaaggtttcgaagatttgatccctctggtggccctgtaccggcccggccccctgggcagcggcatggcggaagacttcatcgccggccgccacggcaaacggaccgcccaggtgctccatcccctgatggaacccattgtggccgatacctacggagtgatcctctaccaggagcaggtgatgcagatcgtttctgccctggggggctttaccctgggggaagcagacatcctgcgccgggccatggggaagaaaaaggccaaactgctggattccatgaaagagaagttcctggatggggcccaaaagctccacggcatcagccgggaactgggggacaagatctttgctctcctgcagcatttcgcaggctacggcttcaacaaatcccattctgccgcctatgccttagtggcttatgagaccgcctggctgaaggccaactatccggtagaatacatggcggctttcctgaacagcatcatcaccgtggcggataaggtgagctggtacatcggtgtctgccgggatatggatatcaaagtgctgcccccggacatcaataccagcgaagctggcttttccgtggatgggcacaccatccggttcggcctgggagccatcaagagcgtgggggatgcggcggtttccgtgatcctggaagaacgggagaaacggggccccttcaaagatttctttgatttcacccgccgggtggatctttccaaagtgaacaagcgggtggtggaagccctgatcaaaagcggtgctctcaatggcttcggcctgcgccggagccagatgctggccatcatggacccggccctggaagcggcggccagtgaacagcgggaccggatcaccgggcagctgggattgttcggagaagaagaaatcgcttcggccagcaccattcccgtcccggatctgccggaaatccccaaggaagagatcctccggctggaacgggaactgatcggct

SEQ ID NO: 2736 - DNA, 23534 bp, synthetic construct
  misc_feature 1..23534: note = Synthetic
  source 1..23534: mol_type = other DNA
  variation 11720..11736: note = n is a, c, g, or t
  variation 4759..4827: note = n is a, c, g, or t
gttgggcacgaagacatagggcgtgacggtgaaggagtagcgggtggacacatagttggccttggtggcctcgatggtcacgacctcggcctcctcgtcgggcatctggtagagatactcgaagttgccgccctcatacatgctggacacaggctgaccgttgacggtcaccgtgacggtgtggtcgtccaccttacccttgagggcgatggtgttgccctcgccggccatgatgccctcctcggggatggaggcctgggcaggctcggtgagctccagatggagggtggggaaggtgagctcaaaggaatccacctgcagcgactcctgggtgccgtccgcatgggacaccaggatctggggggtcaccacatagatggagtcgtccagcggcgtgttggggaagaagcaggacttggggatggtcagcagatagggcacgtcgctgctctcgttgttctgcaccacgtagtcgtcctggttgggcagcacgatggtcaccgtgtcgccgggccgggcggtcatgctgatgctgatgcagggcttgccgtccgcgtccaccagctcctccagcttggtcacagagtaatccacctgctccccggtgaccggcgcgtcggtgggggcgatgggctcgttgtccacgggcgcatcggtggtttcggccggctgctggggctggaccgccgtcttttcgggagtgctcttgccggcgcagttgaactgcaggatgccggggagcttggccttggtggcgccgcccttgatgttgcagaaggcgacgatgcccacgatgatcagcagaatggccaacaggcacacgatcagcaccgtgacgatgctgaacccgctaccgcccttgttctggctccgcgtggacttcttccggcggggcggcgtgggctcgtactcctcgtactcgtcctcgtcgtcgtaatcgtcgtcatcatcgtcatcgtcttcgtcgtcatcctcgtcgtcttcgtcctcgtcgtcatcgtcttccacgacgcggcgcttccgggcggcgggggcaaagcgggtggtcttgggctcggattccagcttttcggcttcctcctcctcgtccaattcctcctcatcctccggcgcggcagggcgggcaaagccggacgccttgggggcgggctggctctcctcctcttccgtctgatcctcttgtgcctgatcctcgtcttcgtcaggctcctcgtccttctgggcagccgtaaaggtaccggcgcggcgggcagcggcgaaatcaggcgctttcacatggccccgcttcggacggagttcttcctcgacggtctcttcctcttcgacgaccttttcctcctcaacgtcgggctgctccttcagattggcagcgcagaccttgcagaaggtggcgtggtcggggttgtaggctccgcattttttgcaaatcataaaatagcctccttggacatatttacatagaaacagtttaaattataggggagttttgtgttggttttgttgccgatacatgacgaatgtgtaaacaattggaggcggggcctttttttctcgttgtacctctgtgcatcttatggtataaataggcagtatgacggatcgtaactctatggacctcttttgaatagcatagagtatatcgcgacaggatggaacagtacatgatttatttggataacagcgccacgacacgaacgctgccggaggcggcccaggctgccctgcaggccatgacggaggacttttacaacccggcggccgcctatgccttcggggctcggacggagaagcgggtcaacgaggcccggcaggtcctggcccagcccctgcgggccaagcgggaggagatcatcttcacctccggcggcacggaaagcaacaacgccgccatcttcgggagcctgcgcggctggcacggccccaagcgggtcatcaccacgtcggtggagcacccctccgtattcgaggcgatccagtctttgaagcaggcgggggacgtggatatcgtcattttgccggtgaacgagcagggatatcccgatcttgcggccctgcgggacgcgctgacggagaacacggccctggtgtccatgatgcacgtgaacaacgagctgggtacggtgacggacctgggggcagcggcccgcctgatccgccgtctggcgccccgggccgtcttccatgcagacggggtgcaggcgtatctcaaggtggacacggacagattgggggtggacctgtactccctttccgcccacaagttccacgcgccgaagggagtgggcgccctctacaagcgcaccggcgtccgcttcgccggcggtcagatcggcgggggacaggagaacaacctgcgctccggcaccctgaacgtccccggcatattgggcatggagaaggccgtgctgctgtatgaacagaacctcgcggcctggcggcagaacatgcgcgcctgcaagcggcggctctatgaggacttgatgaccattcccgacgtggtgctcaacggccccgctcttgacgaggccgccccccacatcctgaatctgtcctttatgggggtcaggggagaggtgctcctgcacgccctggagcagttcgacgtgtgcgtgtccacgggctcggcctgtgcggcccgaaaggcggggaagaaccggatcctgacggcggcgggcatcatcggcccccggcaggagggggccatccgcttcagtctttgtcccttcaacaccctggaggagatggacacggctgcccaggtggtgtccgagcaggtcgcatttttgagaaaatacagaagaagataaaaaggaatgcaatcaacatgaacaatagcgcactggtcgtcaaatatgcggagatacacctgaaggggctcaatcgccccttcttcgagcgcaagctggtggagaagatacaggaggccctttcggatgcccagccccatgtggtccgggagcagggccggatattcgtctatgatctgcccgaggagcacctggaggagtacgcccaacggctccaaaaggtcttcggcatccattccgtgtccatcgccgcctgcggcgaaaagacctgggaggaggtccgcgcccagggcatccggctcatggccgcctacagggacgaggagaggaccttcaaggtcttcgcccgccgggcggacaagcggttccccatgacgtccgagatgatctgccgggagctgggcggggaactgcttgaggcgtaccccaatctgaaggtggacgtgcaccatcctcagatacccctgaccgtggagatccggcaggacaaggcctttttgtacaccggggagataccctgcgccggcggcatgcccgtgggcaccaacggcaaggccatgctgctcatctccggcggcatcgacagccccgtggcgggctacatgatcgccaagcggggcgtggccctctccgccatccacttttacagctatccctacaccagcgagcgggcccgggacaaggtggtggagcttgctcagatcgtatcggcgtacgccggggatttcgatctctacctggtccccttcaccgagattcaaaccaccatctacgacaagtgtccctcctccgagaccaccgtcctcatgcggcggctcatgatgaagatcgcggagcgcacggccagaagctgcggcgcattggccctggtcacgggggaatccatcggccaggtggccagccagaccatcgagagcctggccgtcaccaacgacgccgtggacatgcccgtgtttcggcccctcatcggcttcgacaaggaggagatcatcgaacgggcgaagaagatcggcaccttcgaaacctccatcctgccctatgaggattgctgcacggtcttcgtgccccagcatcccgtcacccggccccaggtccaaaagctcagggaaagcgaagccctggtggatttcgagcccatgatcgaggaggccatccgcaatacggaggtcatacggatttcacacaatgtttccgtttgatggcaaaggtttatggtatactaccgtatattcctggaaaggaggctatgcacgatgaaatcactgacgcgctttataggcaccctggtggtggttttggtcctggccgggttcgtattgtttaagctgaatgaaaaaggattcctttccgggaacctgtctcattggatcacggtcatgacgcagcatgtcaccggcatcgtcaacgacacggaggacttcctccatgaggaggggtacctgctgcccaccgccaccatcgatcccaaccagacgcagaccgcgaccccgacctactaaaaaccaataaaaggcccggccatcaaacgatgaccgggcttttttgcgttcaggaattattaaagtcccaaatcttccttcacaatcagcacatgaaaggccttcaccggccgggtgggggcttccaggatgaaggtcacgttgcacatccgggctgtggtgcggcagtcgtagcacttgtccgttttcgcacagggggtgtccagccccagccgcctggcgttggtggggcaggtggcccgcttgatgcgctcgatggcttcgtcgagaccggacacgatcttgttcttgcccaggatcacgacgacctcgtggggaccgtagatgaggcccgccgcccggttgccggtgccgtcgatgttgaccaggcggccgtccgtggtcagggcattggtggaacacatatacacgtccgccgtcagggccttgtcccgggcggcctgcttcgcctcnnnnnnnnnnnnnnnnnnnnnnnnnnnnnnnnnnnnnnnnnnnnnnnnnnnnnnnnnnnnnnnnnnnnnggtgtcgaacacctggggcaggaaccggcgggaggagagggagtgaacgagcgcgtcgtagtcgatttctgccataggtatagcctccttacttcgtgtaggggaagaagccctggccggacttcacgcccagcaggccgccccggaccatcttccgcagcaggggatggggccgatacttggggtccccggtctcgttttgcagcacctccatgatggccagcaccacgtccagaccgatcatgtcccccagggccaggggcccgatgggatggttggcgcccagcttcatggcggtgtcgatgtcctccgcactggccacgccgtcggcatagacccccacggcctcgttgatcatggggatcaggatacggttcaccacgaacccggcggcctcgttcacctccacgggggtcttgcccaggctcaccgcgatggccttcacccgctccaccagctcccggggggtgttgatgcccgcgatgacctccaccagcttcatgacgggagcggggttgaagaagtgcataccgatgaggggccgatccagctgcgccccgatctccgtgatggacagggatgaggtgttggaggcgaagatgcaatccggcttcgcgatgcgcataagctccgtaaaggtcgctttcttcacatccatgttttcaaaggcggcttccacaatgaggtcgcagtccgtgcagatgtcgttcgttccgatggtgatccgatccaaaatggcctgggcatccgcctcatccatcttgcccttcaggacccgtttcttaagctgattctcgatccgtcccttgccccgggcggcgatgtccccggtgatgtcgcacaaacgcacctcaaacccctcgcactgggcgaaggcgtgggcgatgccggaccccatggtccccgcgccgatgatgccaacgatcatttctattccccttccttgatgttatttgttttcaaatcctatgttcttttgcttgttcaaaaagccctgcatgccccgtttctggtcctccgtttcgaagcagccggagaattccctgacctccgcggccatcgcctcgtccatgcctaaatccgttccctcgttcatggcggccttgcaggcccgcacggcgatgggcgcgttccgggcgatccgggcggccagctgcttcgccgcgggaagcagctcctccggggcgaagacggcgttgaccaggcccatttccaaggcctccggggccttcacgttccgggcggagaagatcagctccttggccttgcccatgcctacgaggcgcatgagccgctgggtgccgccgaagcccggcgtgatgcccagcgtgacctccggctgaccaaagacggcgttctcactgcacagacggatgtcgcaggccatggccagctcgcagccgccccccaaagcgtagccgttgacggcggcgatggtggggagggggaaggtctccaaccggcgaaacacctcgttcccccggcgggagaaggccgccgcctcgtcctcggtcatgttcgccatggcggcgatgtccgccccggcggcaaaggccctgtccccggcgccggtgagaatgagacagcggacggtgtttcggtccaccccgttcaaagcatcgtccaggtcctccagaacctgcccgttcagcgcgttcagggcctggggccgatccagggtcagggtcaggatgctgccctcctgatgggaagtcacaaaggacatatatgcctccttagtcccgttccacgatggtggcgcagcccatgccgcccccgatgcacagggtggccaggccccgcttggcgccctgccgctgcatctcgtggagcagcgtcaccagaatgcggcagccggaggcgcccacaggatggcccagggcgatggcgccgccgttcacgttgagcttttcggggtcgaaatgaagctccctggccacggccacggattgggcggcgaaggcctcgttggcttcgatcagatcaaaatcctccacggtgagccccgccttggccatggccttttggctggcggccaccgggcccacgcccatgatggccgggtctacgccggcgagggcgccgcacacgaaccgagccatgggcataacgcccagctcccgggccttctcttccgacagcaggaccagggccgcagccccgtcattgatgccggagctgttgccggcggtgaccacgccgtcgggtttgaaagcgggcttgagcttcgacagcacttccacggtggtggtgggccggggcccctcgtccgcgtccacgacgacggtctgcttcttttgtttcaccgtcacgggcacgatctcgtccctgaacttgccctcagccacggctttggcgcacttttgctgggatagggcggagaactcgtccagctcctgccgggtgatgccccatctttccgccacgttctcggcggtgatgcccatgtggtagtcgttgaaggcgtcccacagggcgtcgttcaccatggtgtccaccaacgtcccgttgttcattcgatagccgaaccgggccttgggcagggcgaagggggcgttgctcatgctctctgtgccgccggccaccacgatatccgcgtcgccgctggcgatgagggccgcgcccatgttcaccgccgccaggccggacccgcacaccacgttcaccgtcagagccggagtttgtgccttcagccccgccttcaaggcgcactgccgggccacgttctgcccgagagccgcctggatgacgcagcccatatagaccatgtccacctgctcgacggggaccttcgcccgcttcagagcttccgaaatgaccagagagcccaactccacggcggaaacggagctaagagccccgcccatggtgccgatgggggtccggcaggcgccggccagaatgacatttctcatatgcacaggattcctttccatgattctttttatcatcatacactatttttgtgcacaataaaagggggaagcgcaaagagtttggctcacaaataaacagccgccgatccaaggggtcggcggctgcgtcctgtggggatgatatcagtatatcacaggaatatcgatgaattccgtggtcgattcggtataggctgcatcgtgtatctggatggtcagctgcagggagacggcgtccacccgctggatgttctgggcccccagcacgtcgccgtcaatgtacagggcgctgatggcgttggattggggggacaaaaactcgtttccgaacaggtccacgtcgatcccgttgatcctgacaccctccgtggcgagataggcatagctgtccgtcttgttctcgatcaacaggaccagctgggcggaggtgtcataccagggctccagacaacgggcgacgacggtgacgccgtgatcgtcgtagaggcgaacgcccgattcgttcaggggctggacgaaatctgcgggagcatcggtccgaagcttcaccaaaggcgtattcatcaggagggaataatccgccgaactgacggagaagttcacccaaagatcggcgatcagggggacttcggcccgccgcagcacgtcccggtcgatgctgagcgaactttccacggtggcgcctggctccacctcctgatacatggtgcccatgatatcgaatccgttcacaaggagcagttcgttggtgacggtgagcttctgggcggttttgttttcgatggacagattcagctccgcgaaatcgtattgatacgccggatcataggagagggactttccgacgatccgaatgttctcgtcgtccgccagcacggtctcctggatctgcgtgttttcgatccgatagccctcgtccgctttcacaaagggaatggcggcggaggggtccacatcgttgccgccgacgacggggaggggctccggctgcggggtgaggcttgcccgggcggcctccgggatctcgatgggagacacagcgttgaaatcctttagatagcattccattttcgccgtgtggatcaccacattcatctcatatccctcctggatctgcgtgcctgcgagggattgaagggccgtgcccatgaggtttttcatgagctcggacatatccatggtgtacctgaggggcaggcgggtcttcgtatcgatatacatagccacgtcgatatcccccagactgttgagattctccgccgtcatgtcctcgcccacgagatcggacacggcgccggagccgatgatgttcgtggcctgctgaataaaggagccgtccagcttgcccacatacaccagcgtctcatttccgtccaccagctccttgcccgtggcatgaaaatcccgggagtggtccacaatgacggacaccatctgtacgggatcgagggtgggcgcatcggtctgattggccgtccagctcacaccgtcgtccgcggaggcataggcggtgatgaccccgtccacctgctccgcatacagaagggcgttctgctgctgggcgttgcccatggtgttcgcgtccatgcgcatttggccccggacgcgtatgggattcttctgctcatccgcttccaggcgcatgaggatgctcacaggcacgctcatcttctggccggaataggaaacgtccatgttcatctctatggtcacgtccatgtccatgtgcatgctgtccaaagcatagagggccgtgtaggtttcggtcagcacctcgtcggacagaggctcggagggactggtggccgccgaaagccggctggcggccgcggcgctgctgctgagcggggcgaaggtcaccaaccccagcgccagcgccaatgtcaagaatagagcgattccttttttcatttgtccttttctccccacatatccccgcttttgcacagggtttttcatggttgtaagtatgtcatacctgacgacaggatgtcaagaaggtaaaaaaaggagaagtccttcgacttctcctgctttgccttgtgcagctttcagctcaatacttgcgcttgcgggcggcttcggccttcttcttgcgcttcacactgggcttctcgtagtgctcacgacgacggacctcggcgaggacgccactgcgggcgcacttgcgcttccaacgcttgagagcgctttccagggattcgttttctccgactctgacttccatttttctccctcccctcctgagccaacaataggtgcaaaaatcaccagcacaccgacagattatacccgaaggccgtccgttcgtcaaccccttttttgagataaaatcttttccctttcaagtgaaaatatcctttacatataagggaaagattgttataatactattagttcttataccataccaagaactgttgggttactacaataaggtagtaaaccgaaaagctctgacgtcttgtttgcgcaggacgtcatctttatatcagacggatggggagggcaccatggcatacgggatcgggttggatatcggcatcgcttctgtaggttttgcgaccgtggctttgaacgagcaggatgaaccctgcggcatcctgcgcatgggcagccgcatctttgacgcggcggagcatccgaaaaacggggcctctctggctgcgccccgccgggaggccaggagtgcccgccgtcgtctgcgccgacatcggcatcgtctggagcgcattcgcaatttgcttgtagagagcggcttgatttcacaggatggccttgggtctctgtttgaaggacgattggaggacatctatgccctgcggacccgcgccctggacgaacggctgaccgatgcggagctgtgtcgcgttctcatccacctggcccagcggcggggttttcgttccaatcgcaaggccgacgccgccgacaaggaagccggaaagctcctgaaagccgtgtccgagaacgaccgccgcatggaggaaaacggctaccgtaccgtgggcgagatgctgtacaaggacccgttgtttgcggaacatcgtcggaacaaaggggaagcatatctgtccaccgtcacccgcaccgccgtggagcaggaagcgcggctcgttctgtccacccagcgagagaaggggaatgccgccatcacagaagattttgtcgaaaaatatctggatatcctgctgagccaacgtcccttcgacgttggccccggtggaaacagcccttacggcggaaacatgatcgaaaagatgatcggccgctgcacctttgaaccggacgaacttcgtgcgcccaaggccagctattcctttgaatatttccaactgctccaaaaggtgaaccatatccgcctgcttagggacgggcgttccgaacccctctccgaggaacagcggcgggccatcattgacctggctcttgcctccgccgacgtgacctttgctaagatacgcaaggccctatccctgccggacagcgttcggttcaacgacgtgtattaccgtgagagcgccgaggaagccgaaaaaaagaaaaagctgggctgcatgggcgcctatcacgagatgcgcaaggctctggacaaggtggcaaagggccggataagcgccattcctgtggaacagaggaacgccatcgcctatgtactgacggtccataagacagacgagcgcattttgaccgagctgcaaaacatcaatttggagcggtcagacatcgaccagctcatgcagatgaagggcttctccaagttcggacacctgagcatcaaggcctgcgacaggatcatcccctacctggagcagggcatgacctacagcgacgcctgcaccgccgccgggtatgccttccggggccatgagggcggtgagcgcagcctgtatttgcccgcccagacccccgagatggacgagatcaccagtcccgtggtccgtcgcgccgtgtcccagaccatcaaggtcgtcaacnnnnnnnnnnnnnnnnncgtcaccgccctcatccgggagcagggggaaagccccaccttcgtcaacatcgagttggcccgggagatgtccaaggatcttgcagagcgcaacgatatccggcgggagaacgagaaaaacgccaaggccaacgaggctgtcatggatgagctgcgccggaccttcggccttgttaacccctccggtcaggatctggtgaaatacaagctctttttggaacagggcggcgtctgcccctatacccagcggcccatggagcccggacgcctatttgaagctggatatgcggacgtggaccacatcgtgccctacagcatcagtttcgacgaccgctactgcaacaaagtcctcaccttcgcctccgtcaatcgcaaggagaagggcaaccgtctgcccctgcagtttttgaagggcgagcggcgggacgcctttatcgtctttgtcaaggccaacgtgcgggactatcgcaagcagcgcctcctgctcaaggagaccgtcaccgaggaggatcgcaagggcttccgggaccggaaccttcaggacaccaagcacatggccgccttcctccacagctatatcaacgaccacctgcagttcgcccccttccaaacggaccgcaagcgccacgtgactgccgtgaacggagccgtcaccgcctatctgcgcaagcgctggggcatccgcaaggtccgggcggagggtgacctgcatcatgcgtcggatgctctggtcatcgcatgcaccacccccggcatgatccagcggctctcccgctatgcggagctgcgggaggcagagtatatgcagacagaggacggcgcggtccgcttcgatcctctcacaggcgaggtgttggaaaagttcccctatccctggccctgcttccgtcaggagtggaccgcccgcatttcggacgatccgcaagctatgctgcgggatctgaagcttacggactaccgcggtctgcctctcgatcaggtgaaacccattttcgtttcccgtatgcccaagcataaggtcaccggggcggcccacaaggacacggtcaagagtgcaaaggtgctggacgagggcatagtgctggtgaaacggtccttgacagacctgaagctgaaagatggggagattgagaactactacgatccgtccagcgaccgtctgctctatgaagctctgaaagagcgcctgctcgctttcggcggagatgctcaaaaagcttttgcagagccattccataagccaaaaagcaacggcacaccaggtccgctggtgaaaaaagtgaaattgatggagaagtcctctttgaatgttgccgtccacgaaggcaaggcagttgccgacaatgacagcatggtccgcgctgatgtcttctacgtggagggcgacggctattactttgttcccatctatgtggcagacacagtaaagccgaatttgccaaacaaggctgtggttgccaacaaaccatatgcggaatggaaagaaatgaaagagactgattttctgttctccatttatccttccgatttagtacgagtaacccatcggaaaggaatcaagctaacccaaataaataaggacagcacgctgaaaaaagataaaactgtcccaactgagttaatgtactatgtgaagtcgagcataagcacaggatcgctgaccttagaaacccatgatcggacctatgacatcaagtcgttgggtatcaagacactggagaagctggaaaagtatcaagtggatgtattgggtaatctttctcccgctggtaaagaaaagcgacagaggtttcaataaagcagcatataccataccaagaactactagggaactacaacgtcgctgtcgtagtccatggctacatactgattataccataccaagaactactagggaactataaccgagggatcatagttgacaattcaggataaattataccataccaagaactactagggaactacaactatcaggtgacgttcaatggcaacattgcgattataccataccaagaactactagggaactacaacagttggagcagccaaacgctttgcctgttaattatatcataccaagaactactagggaactacaacctgctgtttggcatagtcgactcgtcaaacattataccataccaagaactactagggaactacaacatattccgatccttcccgttgtgtaccgggattataccataccaagaactactagggaactacaaccgtatcctggcccataatataacccaagttattataccataccaagaactactagggaactacaactttttctcgggaccgtaccgcgcacaggacattataccataccaagaactactagggaactacaacatatccacggtcccataataacacaagtttattataccataccaagaactactagggaactacaacactttcgccacgctttccatgttcacgccgattataccataccaagaactactagggaactacaacctggctgatatggcagagtaatcaataaaactataccataccaggacccatcatggaactgcttttcacaaatcgcaaagggatgtttcaaaaaagcccccttccattttgacaatccctccgcaatgggctatacttatacccatcaacaggagaggaaccgctattcatggcaaagctgtatttccggtatggggccatgggctccagcaagagcgccaacgccctcatggtccggtataactatctggagcggggcaaaaacgtgctgctcatgaagccctccacggacacccgggacggggtccatcgcatcctttcccgctgcgggctggaagcggagtgcacgctggtggaggatatggacgtgcgcgagatcgcttcggggaaatacgactgcatcatcgtggacgaggcccagttcctcaccaaggaccaggtggagctgctggcctatatctgcgatatgtacgacgtgcccgtgatctgctacggtcttaagaccgactttcaggggaacttcttcgagggcagccactggcttctggcccgggcggacgccatcgaggaggtcaagaccatctgctggtgcggcaaaaaggccacgcagaacgcccggctggacggcaagggcggcatcaccaaggtgggcgaccaggtggttctgggcgccaacgacacctatatcggcctgtgccgcaagcactggcggctgggcgacccgggaccgggccttcgggcggaggacctgaaacgaaaagaaaagggagaaaactgaaccggcggggcggcttgccccgatcctttggcacggcggctttcgtgacggtgggcgtgtgcctgtgcaccctgtttttgctgatctatccggagggggagctgtgccgtctgtttcagtatgccctggtgctgctgtgcgtccttttcgcctggggctacagaagcgagaccctggacgggctgctgtccctgctggccctggcctttacggcgggggcggacctctttttggtggccctccgggaggcccaatggcttccgggcatggccattttctgcatcgcccagctcttctgggccctgcggctgctgcggatggaggcggggcgacggcgactgacccacggccttgtctgggccctcacctgcggcacgctgctcgtcgtggccgtgatcctttcccgcggcgaggatgtgctgctgccgctgtgcggtgtgtacgcctcgttcctgctgaccacggtgctctttggctggctcacgccccaaaacctgcgcttcaccctgggcatgaccctttttctgggctgtgatatcttcgtggcggtgaacaacgccgccctgtatttggacctgcaaccctatccgctgctccaaaagctccacgacatccccttcaacatgatgtgggccttctatgggcccagccagatgctgcttgccttgtccagcccggaggaggacgggggacgctgattttttggggctgccgtcttgcgttttgatccttcgaaaggtatactgtatacaaaatattaataaataaaggaagagatcgatccatggaaaacaaacgacctgtcggtcacggaaaaaaagtcggctccggctccgcccgggcggagaagggggaacaggtatcctcccgccccgtgggcacgggcagcggacgcacgggcagctttgatcagcgtcccgaaaatgaccgggcggggggcgaacggtccaacgccggaaagctgggtctgctggccctgctcatgatcctgcccaagaagtatcgccgtctgctgctgctcgtggtggccgtgttggcggtgtttggcctgctgacgggccggtgcaacatcctttccggtgaggacctgtcctactatcccgccaccgatcaaaccgcccaagtcacgacggtgccctattatacccaggctccggcggcgacggccattccgtattatacggaggccccggttttgaccatggcccccgtggtgacccgggccccggaggccacggcggcccccctggtgggggaggcgagagccaagcgcatcacgcccctcggcaacggcagggacaccgtcaccgtcatgatctatatgtgcggcacggacctggaatccaagtacggcatgggcaccagcgatctcggagaaatggtgaaggccaccatctccgacaaggtgaacgtgatcgtggagaccggcggctgcagggcctggaagaacaacatcgtctccagctccgtgaaccagatctatcaggttcagaccgggggcttgaagcggctggaaagcaacttcggcaccgccgccatgacgaaccctgacaacctggccaccttcatccagtattgcaccaaaaactaccccgcgaatcgaaacattctcatcctctgggaccacggtggcggctccctctccggctacggctacgacgagaagcagagcaccggcttcaccagcgccgcctccatgaccctgccccagatcgacgcggccctgaagaagggcggctgcaccttcgactggatcggctttgacgcctgcctcatggccacgctggagaccgccatggtctgcaacccctatgcggactatatgatcgcctccgaagaatccgagcccggcaccggctggtactacaccgactggctcaccgccctgtcccagaacacctccgcctccaccgagagcatcggcaaggtcatcgtggataccttcatttccgccagccagcgggcccaggccaacgcccaggtcaccttgagcgtgctggaccttgccaagatgcagggaacggtgcccggggccctgcggagcttctccaccgccaccaccgccctcatcaaggggaacggatacaaccaggtggccaacgcccgggcgaacgtgcgtcagttcgcccgccagagccggatcaatcaggtggacctgatcgacctgtgcgatagaatcggcaccggggaggcgaagaccctggccgccgccctgaagggctgtgtggcctacaacaagaccagcatctctcgggcctacggcgtgtccatctatttcccctatgagaccctaagcggcgtcaagagcgccatctccacctacaacagcctgggcatcgattcggagtatgccaagtgcatccagagcttcgccagcctggagcagggcggccagttcgcctcctccgcgtcccagcagagctacggctcctactcctccggcggggatctgctgagcaccctgctgggcggctttatggacagctcctcctacggcagctccggcagctcgccctatggctcctcctcgccgctgggctccctgatgcaggagttcaccaccggcgccggctccggcagctattccgccggcaacagcgtggacgtgtccaccatctatgacctgctgtccgccttctccggccggtccatgcccgccgccctcagctgggtggacacggacctggtggccgacaaggccgcggacatcgcccggaatcggctggaccccgcccgcatcacggtgacggacaagggcggtgtgcccacgctggtgctgaccgacggggaatgggcccttgtggagaccgccgccgtcaacgtctttgtggacgacggccaggggttcatcgatctgggctgcgacaactatctggagtatgaccaggacgacgacctgatcctgggatacgacggcacctggctctgtctggatggccacgtggccgccttctatatgacggaggcgggggaggacggcacctacggccgtatccccgcccggatcaccagggaagccgatggagaaacgcaggagctgctgatgaacatcatggtgttcatcgatggccagggcgacgcggcggtgctgggcgccgatcccctctacgcgggggagaccgacacccaggccaagggcagcatccccctggagcagggcgacagcatccagcttctgtgcgactattacgcctacgacggcgcctttgagggcagctatgaactgggcgatgccttcacggtggcggatgatgtgacgcttgaatacctgcggctggaaaacgaaggggatatcagcgtcagctaccgcctcaccgacgtctacggcaacacctactggacccccgcgtacatctactgattccatagatatcctaccccatgcctatagcatggggcctttttgaaaggagcgatcccatgcgatacatcacctttgacaacaacaagaagggccactattcccccggcgtactggtggggaacaccctgtatatctccggccagctgcccatcgacccggccacggggaagctggcggagggcggcattcgggagcagacccgggcggccctggagaacgtggcgcgggtgctggatgcggcagagctgaaaaaggagaatgtggccctgtgccgggtgtatatcccggacgtgagcctttgggaccaggtgaacgaggtgtacgccgccttctttggcgagcatcggcccgcccgagtggtggtgcccaccagagacctgcaccatggcgcattggtagagatcgaagccatagcggaaaaggagatgtgaatatggaattcgtatgcagcaagtgtcgaaagcgggagagcgtgaccacccggaagcccaagtgcgactgcgggggcctgtggaagctggactttgcgccgccccagttcgatttggagaaggtggacaagcaggagtggaccctgttccgctatcgggccttcatggccctggacggggacacctggcgggacatcaccctgggggagggcatgacccccatcgtgcgtctcgatgaaaacgtgctcctgaagatggactatttcatgcccaccctttccttcaaggatcgcggcgcggcggtgctggtggcccacgccaaggccatcggggtggacaaggtggtccaggattccagcggcaacgcgggcaacgccgtggcggcctactgcgccaaggcgggcatcggctgtgaaatcttcgtgcccgagggcaccagccctaagaagatcgacatgatccgtgcccatggggcgatctgcaccgtggtgcccggcagccgggaccactgcgccgacgtgtgccgcgcaaaggtgacggaggagggggtctactacgccaaccacgtctacaaccccttcttctatgagggcaccaagacctatatctatgaggtctatgagcagctgggccgcatcccgaagaacctggtcatccccgtgggcaacgggaccctcttcctgggggccatgaaggccctggaggaactggaagcggccggctgcatcgaagcgttcccccagatcatcgccctgcagagcgaaaaatgcgatccgttgctgcaggcggcggagcaggggctggacacgcctgcccccgtcacgcctacgtccacgctggcggagggcattgccatcggccagcccatgcggggggaggagatattggcctatgcgaagaagcacggcgttcgcttcattcacgccccggaggagaaaatattggaggcccgggcgatgctcgctcagaagggcatctatatcgagcacaccaccgccgccaactatgcggcatacctggcctacacagagcagtacggccccacccccgacaccctcatcaccatgtgcggcgccggtctcaaatcggatcactgacagaccaaataaagacagaagcggctttagggccgcttctgtttttgactgtcatctcttctttttcggggtcagctcgctcttgggctgttcgtccaatgcctctccttccaggtggaccatcttctctgtcaacagtttggagaagccggacacgatggcggaggaatacaccagccgctccacgtcggcgctttgggcgtcggggtcgtggagcacggtgtctccggcggtgcgggccaattggatgaaggccaggcagatgtcgtgatgggtctgcacataggcctcatagatgcgccgcacctccgcctcgggaagccccaggggcagcatcttctgaatgtaggggatgttcacgctctgtttcaatgagcagaccatgatgagataccccatgtggacccgggtatacttcttcttcaccggagggggcatgatcttcagccgcacatagttgttgatgatgctggcggtgatggcggcgttgccgtgctcatcctcgggcaaaaagttgagataccgctgcagcagcatcaccacctggtccatatataggtccatatccggcagttcgtcccattggggcaggcggaaatccttcaaataattttcccatcggcggagcttgctgccgataagcttcacgtcatacgccatattacattctcctcacataatataacagtatactccatctgggcaccggtgacaatagtgaatacgaaatatacgaatgaaacatttttgtgaatcagttgacagaatcactaagacactttaatataatattaaatattagataaaggagcttaaaaaaagatggcctttcatatttggacggatacatcggccaatctgcccgctgccctgtgcaaaaagctgggtataggggtgctgccctttcattttattcacaacggcggggcagaggaatgctgtctggacacggaaaccttcccctacgacgctttctatgctgatctgaaggccggcggcacggccaccacctccatgatcaattccgaagccttccgggagatcttcgagcaggaggcaaaatccgggaacgacgtgctctatatcggcatgtcctccggcatcagcggggcctacggggcctcggtggtggccgcccgggaggtgaaggagaatcatcccgaccgccgcatcgaagccttcgacaccaagggcgcgtccctgggggaggggctgctggtgctggcggcccaaaagctccagaaggcgggagcggatattcaaaaggtccttcgggagctggatcggctgcggacccacatgatgcaggtattcaccgtggacgatctgatgtatctgcgccggggcggccgcatctcccgcatgaaggcggtcatcgcctccgtgctgaacatcaagcccatcctgcggggggacgaggagggtcggatcgtggtcacggacaagaccgtggggcgcaaggcctctatacgggcgctggcggacgatctgatcgaaaacatcgacgaagccgatgcctgcggcgtgggcatcgcccaggccggctgcaccgccgacagcgacgcgctcatccagcgtatccgcgccaagctccccaacatccccatcttgaccgtgccctatgagcccgtcaccggcagccatgtgggcccgggggccctggccctgttttacatcagccgccaggccagaacggtctaagctatccttgctgtaagaacgcgaacacccggggataaaaatccttcgcctcctcataggcggcgtggcccagctccggatagatatacagttggctatggggaatgcgcgccgccaactggcgggaggcctccgcgccgacgatccgatcctccgcgccgcccaggacaagggtggggcaagggatcgttttcagttcctcttcggcgccgaaggagaggatggcctgcccgttcacgaggaatcgctcataggtcctgggcttgcccacaaggcccagcaggggatatagctttcgatatcgctttagataggcaggggagtagctccgctccgccgtgtcgatcatcagccccttgtgatcccctcgccgggccatgtccatccagccggagacacagcttcgaatcaggtcgctggcgcagggggcggtcacggccaggatcagccgatccaccatattaccatgatcgatggccaggtattgggcgaccatgcccccttccgatacccccaggaccgacacccggctcagccccaatgcacggatagcctccgcctggtccgctgccatgtcccggatggtgtggccctggggcagcggctccctacggctgaatatatagatggtgaagtcatccaaataggctcgatagggcccggccagcagcagggccttgccctccaccgtggtaagtccgtcggacaggcccggcagaacgatgagcgcgcggctccctcggccgaaggagacgtaactcatagtccctttatgcagcagcacccggccgtttttcgcgttccaaagcatagccatcccatccttttttctgataactaaagtgtaatcggccccctgtacccttgtcaatagcctgcggacccctccaaattttgccagagtgggtacaaaccgtgacatttttgtgcaccgattgacaagggtccccgggggatttacaatgcatccaacaaaagcaaggaggtacaaagctatgcaagtcattgtttctctgttgatcggcgccctggtgggctggatcgccgggaagatcatgaacagcaagggcggtctggtgaagaacatcctggtcggcctggtgggcggtgccttgggcggttggctgggcagcctcatcggcgtcagtgccaccggctggatctccagcatcctgatcggcatcggcggctcctgcctcctgatctggctcatgcgcaaactcttcaagtaacttcattccgatccccctccttaaaagggactgccgcagacccctgcggcagtccttttttttatgcgacagcattgttttctgccccgggctatggtacaatgccatatcaacaatgatataaaggacggccatatgaacctgctgcatctgaaatacgcggtggagatcgccgagaccaactccatgaccaaggcagccgaaaagctgtataccgcccagcccaacctgagccgggcggtgaaggagttggagagcaccctgggcattcccatcttccgccgcaccagcaaaggcatcttccccacgccccagggggaggagtttttgaactatgcccgcatgatcctaagccaggtggacgagatcgagcatatgtaccagcacggcggccgggagccccggaagttctccgtctgcggtccccacgcctgctatatcgcctgcgccttcacggccttcgtgcagcatttggaatccccggccagccaggagatattctacaacgagaccagtccctcccgggtcatcggcaacgtggccgacgcggactatcgtctggggatactgcgctatcccgccgcccacgacgccagcttcaagggcttgctgaaggaaaaggggctgacgggggagctgctctatgagttcaactatgtgctgctcacctcctccaaaagccctctggcggcccgg

SEQ ID NO: 2737 - DNA, 23408 bp, synthetic construct
  misc_feature 1..23408: note = Synthetic
  source 1..23408: mol_type = other DNA
catgagagcagtggtacagcgggtcagcgcagcttctgtcacggtggagggccggaaagtgggcaccatcgggccgggactgctggtccttctgggcgtggcccggggagatacagaaaaagacggggaatacctggcggagaaattggccgggctccggatctttgaagatgaagaagaaaagatgaaccggtcggtggcccaaatcgggggcagcatccttctggtatcccagttcaccctgtacggggatgtgcgccatggcaggaggccttccttcacccaggcggctccgccggaagaagccaaccggctctatgaagacctggcccagaagctccgggacaaaggactgactgtggagaccggacagttccaggcccatatggaagtgtccctggtgaacgacgggccggttaccatcctgctggacagcgggaaaagtttttaggaggaaatagaaaaccatgaaaatctatcgggtggtcgttggaccgatccaggaaaactgctatatcatcaaaaacgaagccaacaacgaaggcatcatcgtggacccgggggatgaagccgaccggatcatggatgcggtgaagaaggccggcatcgagaaggtgcctgccatcttcctcacccatggccacggggatcatatctccgccctggacgaagtgaaggctgccaccggcgccaaagtctatatgagccgggaagatgctcccatgctccgggtatggaacagcagcctatcctattccaccaaccgggacaagaaattcgatccccccgatgcatttttcaccgatggggaaaaactgacagtggccggcttggatttcaccatcgctgccacaccgggccatacccggggcggggtgtgcatcatcggagacggagtggtgttctgcggggatacggtgttcctggaaagcatcggccggacggacctgcccgggggatcttatgacgccatcctggactccatcaagaccaagctgctggtgctgcccgatgattacaaactgctgcccggccacggaccggccaccacagtgggctgggaacggcgccggaatccgttcctccagtaaggtcgtgagcgcatgatggaagtgcagcaaagacccaggggactggtggccaaactgctggcaggccttttggggttcggtgtgttctatctgctgggccactggttcctgccggtgttcctggccgtagggatgagttttttgctctatcccatcgtagaccggctggaacggctgaagatcaaggggcggccctttcccaataccctggcggtattgatttctttcctcgtattcggactgttcctctatgcggcggccaatgtgctgatcgtccccttggtgacccaggtgaacaccctgctgaaagccatgccaggcctggcggccaaagccaacgaaagcatcagtctgtttttgggcagcgaagcccagaagctgccgcccaacacccgggaagtgctccagcaggcggccagcagcctgagcagctacatcatgggcctgttgaaggacatgttggcttccacggtccaagcggccaagagcctggtgagcctggccttggtccccttcctcagcttctacttcctgaaagactggcggaccctgaagaaaatggtggtggggctctttgcttatgaaaagcagcctctggcggatcgggtgctcacggacatggggcacatgctctgtgcctatgtggacaacatgttcaagctctgcttcgtagcggcggcctgtctcactgccgggaattccatcctgggcgtccagtacaccttggtgctggggttcctagccatgatcagcgagatgatccccctggtgggatcggtggtagggaccctggcggcggtattcatcgccctgctccagaacccgtccctggccttgaaggtgctgatcctctatctggtgtactatcagatcgatgcccaggtgatcatgcccaatctcatgggtcacagcatcaccctgcatccggtgctgatcatcctggccgtgatgatcggaggccagatcggcggcgtggccgggctgatcttcgccgtccccgtccttgccatcatcaaagtactctatgggtatttctggcatgcgggggagaagagtccggttgataaaaaccaataaactgtgttaaaattaataagttcaaacaagtcgtgtggacggaggggatttttatgttaacaggggcaccgcgtggtaccaaagacattctgccgggcaccatcaatggctggcggtatgctgaacaaatcattcgtgaagtttgccgggaattcaattatcaggaaatcaggaccccgatctttgaacataccgaactgttccagagaggcatcggggatgggacggacgtggtggacaaggaaatgtacacctttacggaccggagcggccgcagtctgaccctgcgcccggaaaacaccgcttccgtagtccgttctttcgtggaaaacaagctgtatgcagaacccatgccgctgaaggtgttctatatcggacccatgttccggtatgaccgtccccaggctgggcgcatgagacagttccatcagttcggggtggaagccctgggggcagaatcccctgtagtggatgcagaagtcatcctgctggccctcaccgtgctgaaacggttcggcctgaaggacctgaaactgaagatcaactctgtgggctgccccaactgccggccccagcaccggaagctgctccaagactacttccgtccgcacttggacgaattgtgcgaagactgccagagccggttcgaccggagtccgctgcggatcctggactgcaaagtggatgccgacaagcctttcatggccggtgcaccgaaaatcaccgacagcctgtgcgatgactgccgggcccatttcgaaaccgtgaagaaactgctggacgaagccggcgtggaatatgaagtggacagcaacctggtccgggggctggattactacaccaagaccgctttcgagatccagtattctcccctgggtgcccagagcgcagtaggcggcggcggacggtatgacggcctggtggaagaactgggcggccccagcacccccggcgtaggctttgccatgggtctggaacggatcctcttggctctggaaaaacaggacctgctgccttccgggaaggaagccatcgacatcttcgctgtgatccccgatgaagggggcgtggctgatgccttccgggtgatcactgccctgcggaaccagggacttgtctgcgatatgaacttggtggaacggagcatgaaggcccagatgaagcaggccaaccgggaacaggcccgttttgccctgatcttcggggaagaagaacggtccagaggggctgtcaccgtccggaacatggcggacagcagccaggaagaagtctgcttcggagctttggaagcctatttcaacaaataatgaccagaggtgttgacaagaatgagtatggaacgcagtcatcattgcggtgacttgagaaaagcagatgccggcaagacggttaccttgtgcggctgggtaagcaaacggcgtgaccacggcggcatcatcttcatcgatctccgggaccgtcacggtctggtgcaggtggtcatcgacccggcccatgacgaaaaagatttccacaaggccgaaggggtccgcagcgaatacgtgctgcaggtcaaaggcctggtgcgggaacggagcgcagaaaccgtgaaccctcacctgcccaccggggatgtggaagtggtggtgaaggacctgaacgtactgaatccttccaagactccgcccttctatatccaggatggcatcgatgtagatgaaaacgtccgtctccgctaccggtatctggatctgcggcggccggaaatgcagcagaacctgatcctgcgccaccgggtgaccaaggcggtccgggacttcctggataaacaggatttcctggaaatcgaaaccccggatctgatccggagcaccccggaaggggctcgggactacctggtgcccagccgtgtgaaccccggcaagttctatgcactgcctcagtctccccagctgttcaaacagctgctgatgattgcggggatggaacggtacttccagatcgcccggtgcttccgggatgaagacctgcgggccgaccgtcagccggaattcacccaactggatatggaaatgtcctttgtggatcaggatgacatcatggccctcaccgaaaagctgattgcctatgtgttcaaggaaactctgggcgtggatgtgcccgtgcccatggcccggatgacctgggatgaagccatggacaaatacggcagcgacaaaccggacctgcggttcggcatgcagctgatcaacatgaatgaagccctccaggggacccagttcaaggtgttcaaagacatcatcgaaaagggcggcctggtgaaagccatcaacgtgaaaggctacaacaagatcccccggagagaactggacggcctggtggaattcgtaggcatctacggcgccaaaggcctggcctggatcatcgtcaacgatgacggcaccatcaagtctcctattgccaaattcttctccgacgaagaaatgcagcggatcctggctgccggcaaggcggaaaaaggcgatgtgctgctgttcgtggctgaccggaaacctttggtggtagccgcggctctgggcgccctgcgtctggaaatgggcaagcgcctgggcctcatcgacaaggataaactgtgcttcacctgggtggtgaagttccccatgttcgaatacagtgaagaagaacaccgctatgtggccatgcaccatcccttcaccgctccctgcgatgaagatgtggacaagctcctcaccgatcccggccatgtgtatgccaaagcctatgacatggtgctgaacggggtggaaatcggcggcggttccgaacgtatccatcgggaagatatccagaagaaggtcttcgaagccatcggcctgactgacgaacaggcccaggagaaattcggcttcctgctgaaagcctttgaattcggagcacctccccatggaggtctggcctttggcctggaccgtctggtgatgctcatggccaaacggccttccatccgcgacgtgatcgctttcccgaaatcccagagtgccatcgacctgatgtgccaggcacccaatatggtggacgaaaagcagctgcgtgaactccatatccggagcaccgtggtgaagaaagaaaaagaagaaaagaaataaatccggtctgcatgtgggatgagggggagcgccctgatcctgctttgcggaaggacgcaacagggaccgggatgcgagggagcccgtgggccgggctgagagggtacccaagtaccgaccgccggagggagggatccctctgccgcatcctgggaaccgtacaaataaccggctgtcgccaagaaagcggcagccggtttttgtgtgcatgaaaggagaacgtaccgtgaaaaattggaagaagatgttgggggtgctgctggctggggccctggtgctgggcggctgcggcggcacgaaaaaggaacaggcggttgggagcaagaccatcccggaactgaagatcgccatttctccctatcaagatgcggataccctgcggaccaagaccgagcccctggggaagatgctccaggccaaactgaaggaaaagggctatgaggtgcagaaaatcaccctgaatgtgggcacttcctacaatgctgtgggggaggcactcagtgcaggcagtgctgatgtgggcttcatttccggggccacctatgtgctctgcgaccgggatgtggatgtgctgctgacggcgctccgggaaggcatcgacaaggacaccacggatctttccgtatggaacaacggccagccggacaaattcaccaaaaacctggtgaagtattatcgctccgccctggtggtggggcccagccccaagggacaggctctcctggccaaagtgaagcggggagaaaagcccacttgggaggaactggacagcctgaactgggcggtgatgagccctgcctctgcttccgggtacctgtatccttccctatggctgaaggaaaactacgggaagaccctgaaagacctgtcccatgtggtccagtccgattcctataccacttcaacggctcggctggcttccggccaggtggatgtgatggtggcctattcccatatccgggccaaaatggaaaaagattggcaggtcaaactgggggggaccgggtccatctgggatcagaccgggatcatcggggtcacggggaagatcttcaatgatacggtgagtgtgagtaagaccagcaaagtgatgcaggatccggccttccgcaaggcactgggagaagccctgatcgaaatcgggaagacagaagaagggctgaaggtgctgaagaccatcggccacaagggctatgactgggcccaggcctccgattacgatggagaacggaagatccggaaggaactccaatgaacccgacggtactggaattgaaagccgtttcccaagcctatgaaaaaggacatcccattctccagggggtgtccctttccgtaccccagggttcctttgtttccttgatcggccccagcggtgctgggaagaccaccctgctccggctgttcaatggcatggtacggccgctctccggtgaagtatgggtggaaggccgccggttcgacaccttgaaagggaaatggcgccggcaggtccagcagcaggtggggatgatcttccaggatttctgcttggtggaagagagcagctgcctggaaaacgtactttgcggggccctgggacggatcagcctgtggcgggccctgtggggaaacttcccagaacgggaagtgcagaaagcccggcaggctctggatctggttgggctgggcggacgggaagataccttggccagcagcctcagcgggggtcagaaacagcgggtagccattgctaggactttggtccaggaagcgtccgtcatcttggccgatgaaccggtggcttccttggatccagggacgggaaaagccatcctggaactgctccggcagctgcaggaaacccaggggcttaccgtggtgatgaacagccacaatgtggagcaggccatggcattttcccagcaggtggtggggctccggcagggccggatcctgttccaagggccggcggatgtctgggatgaggagaagctccggggattgtacaggagggaatcatgacccaaagataccaaccgcggatgggatggatcctgctgctggggttgatggccggatccctggcagaaatcggctgggatccggcattgctgggagaacggggcggccggttctttgatattgcccgggccatgctgcccccggattggggatttttccgggaggcagctgggcctcttctcagcactgtgcgcatgtccctggcaggttctttcctgggcagttccctgggccttttgggagctgtgctgggcagccgttggaccaatccccatggctggatccggatccctttcctgtgtaccatccagctgctgcggacggtgccggccttgatcctggctcttttgtgcaccttcctggtgggactggggaacctggccggtaccttggccttgaccctcagtacctttggggtgatgacccggctgggatatgaagatatggaaaccttggactggaaaacagcccgagccctggaagcctctggctgcggccggggaaaagccttctgccgggctctcctgccccggctgctgcccgggtatctgaccaacgctctgtacctgtgggaatccaatgtgcgccaagcggccatcttgggctatgtgggagccgggggcatcgggctgctgctgaaccagcagctggcctggcgggactatggccgggtggggaccttgctggtactgctctacggtgcggtgctggtgtcggaaagtctcagtgaagccctgcggaaagtcctgagaggccagtggaggctccggtcttggatgaaaaaaggcctgggtgtcttgggactgctgctgctcctgggttctctgggaaccttggaaccagcaggaaatggcggcatgggtgcggcccgggccatgctggagggacttttggaaccggatccttccctgctgttttctctggaaaaagatgctgtaccctggctgttgggagaaaccttctgtatggctttcctggggaccttgggagggggcttggcggctgggttcttagctttggcatccagcttccggttcctgccagtgggggccgctttggtgccccggctggtcctcctgggcatccgtacggtgccggtctttgtctacggcctcatgtggctccgggtcactgggcccggaccttttgccggtacccttactttgctggtgtgcagcatcggccttttggccaaacggttccagatcggactggacagtacggaccctcggccttttgctgccagccgggccatgggtaccgggtgggctgccgccttccggtggacggtcctgccccagctgaaaaaaagcggagcggctgccctgctgtacagactggacgtgaaccttcgagaggcttccatcttaggcctggtaggagctggaggcatcggcaccccgctgatcctggctctccagcagtacaaatggcaggaagccggcgcctttctttggggcatggctgccttggtgctggcggtggaatggggaagtgaaagatgcaggagatgaaaagcggcttactgcttttcatctcctgcatctttttaccgtctaccaaccgattcctgtccccaaatttccccagctcttttgttatactggaagaaaagaaatcccattataggaggtacggaccatggagagcaatatggaacaaagagggatgcaggcaggggaaaaaggaatagggagggaagagacgggggaactggaccggctgttcctggaccttccgccccgggaggcttatcctctgatcctggcgaaagcctgggaaggcagcggccgggctcttttcctcctagcgctgtacctggacgggggatatgggaccttcttcttggatcagggccgggcccgggtttatgcttccgccgcttcccaggccggagatccggtggcccctgccttttgcgcactgaaagacttgcccaatgtgggagaatccgtccgggtgtttgtccggcagagagaaaggatccgggccctggcagcagaaggagacttcctggcccagtactatctggggatcatgtacgcctacggggaaggggtggacccttcctataaagacgctctggcttggttcgagcaatccgctgcccagggctttgcggccgcccagctggccatgggttcctttctccggttggtggatggggggaaaaatggcagctggcgggagaagaggctgggatggtatcaaaaagctgcagcaaaaggccatgcagaagcccagctccgcctggcccaggaataccggctgcgctgccatgccctggaccaggccaggatttggtacgaaagagccgcccgccagggccaccctgcagcctgtgagatcatggggaccttctgggaaaatggatacgtaggccgggcagaccctgcccaagcactggcctggtaccgcagagcttaccacagaggcagccgtaccgcctgctttgccatcgccagcctgtacgaagaaggccgaggcgtcccccaatcctggcagcaggcggcactgtggtataaaaaattttgggaaagataggaattgtactgaattttggataggaaagagtgtaagatgtaaataagaaataatcaaagcaatttgcaaaataaaaaatatgatataatattcttatatttctttactttccatggtaagtgcgctataataagtttggttgtaccaaaccaatgatcagtgggttactatgataaggtaacacaccgaggagctctaacgccttgccatttggcaaggcgttatctcttttatggggataaaatacaaagaagggtgggcaagattatggcatatggtatcgggttggatataggaattggatcagtaggctgggctgtcctggcattggaccatgaagaaaatccctggggaatcattgatttgggcagccggatctttgatgcagcagaacagcctaaaacaggagcttcattagcgctgcccagaagggaagccagaagtatgcggcgccgtctgcgtcggcgcagacaccgtctggaacggatacggaacctttttatcaaatgcggactgttgacaacagaacagctggatcatttgtatgacgggaaactagaagatatatatactctccgtgtcagagccctggatgagcgactgacagatgaagaattggcacgagtcttgctgcatctggcccatcgccggggatttaaaagcaatcggaaagcagaatcccaaagtacagaagcaggggaactgaaaaaagccatcagcctgaaccagaaaaccatggtagaaaaccactatcggacggtgggggaaatgttctgcaaagatccccgttatacagaatacaagagaaatcggggtggaaattaccttaacacggtggaccgggccatggtggaagatgaagctcgcaaaatcctggaaatccaggaaaagctaggaaacagaaaactgaacggggattttcaagaatcttttctttccatcctgctgagccagaggcagtttgatgaagggcctggaggaaacagccactacggaggaaatcagatcctgaacaaggtagggacttgtacttttgaagatggaagtaatggagagccagcagaaaagaaatctcccaaagtctgttatacctttgaatatttcaaccttcttcagaaagtgaaccatttgcgtctgacctcttctaaagacaacagaggactggataaagcagaacggaaaagggtcattgcgctggcaaagaacaaagcagatctgcgtttaggagaaatcaggaaagatttacagattccttcggaataccggtttcagggtgtttcctacaacacaaaggaactccccgaggaaactgagaaaaaaacgaaattcaattatttaccgttctatcatcagatgcggaaattgctgaaatcaaaagcccagtatgatatcagcgattattctttggatgtgttggataaaatcggacagatccttgccttttataagggagatgatgccagacggaaggaactggagaaactgcaacttgctccgaaagctatcgaagctctgttggagatgaatggaaccaccaagttctcccatttgtcactgaaggccatccgaaagattacacctttcctagaacagggcatgacctatgataaagcctgcgaggcagctggatacgattttcgggcccatcaggcggataagtcttttttgcttccggccaatgcaccggaactggaagatatcaccaatccagtggtccgccgtgccatcggccagaccatcaaagtggtcaatgccattatccgaaagcaggggagcagccccttatatgtcaatgtggaactggcacgggaaatggccaaagattttcaggaacggaagaaaatcgaaaaaatcaacaaagaaaatcaagaaaataatgacagcctgatggataaaatcaggaaagaaaacaacaaacttaatccgtccggtatggatctgatgaaattgaaattgtggaatgaacaggatggaatcagtccttattcacagaaacatattgagagagaacgactgtttgaaacaggctacgtggatatcgatcatatagttccctacagcatcagctttgatgacagctataaaaataaggtactggtgttttcttcagaaaaccgggataagggaaaccgtttgccctatcaatatcttctgaagaaatatgggcaggatgcggcagatcggttcaaagtatgggttggtaacaatgtccgggattatcagaaacggcagagattgttgaaagaagaaatgacggaagaagaaatttccggctttaaggaacggaacctgagcgataccaaatatatttctcggttcatgtataacttcattcgggaccacctggaatttgccccttcagaaacagggaaaaagaagagggtattggccgtcaatggaatgattacttcctacctgcggaaacgctggggtattcgtaagattcgggctaatggggacaagcaccatgctgtggatgcggtagtcattgcctgcaccaccgacaagatgatccgtgatctgactctttattcggaagaaagagaaaacaagtatgatgtggatgaacggggaagccgtttggtaaatgaatctactggagaagtactgaaagaatttccgtttccttgggaggggttccgccaggagttggatgcccgctgttctgatcatccggaacggggattggctggtttgaccttttatatgaacaaagatctgaatgacatcaagccgatttttgtttcccgtatgccccggagaaaagtgaccggggctgctcacaaagataccatccgcagtgctagacatattgctgaaggaattacagttttaaaagtgccgctgaccagtttgaaactggatggcgatggagaaatcgcagattattacaatccggacagcgatcgtttattgtatgatgctttaaaaaagcgattggaacaggggaatggagacgacaagaatgcttttaaagaaccattttataagcctaaagcagatggatctcagggacctctagtaaaaaaggtaaaaattcaatccaaagcgactttatctgttcctgtggaagggaagaccggagttgcggataacgatagcatggtccgggtggatgtattcaaggtggagaaggaaggatattatctggtccccgtatatgtggcagatatagtaaaagagaaattaccgcagagagcaattgttgctcataaaccttatgaagaatggaaagttatggatgataaggattttctcttttcgctgtatcctaatgatttgattcggattgagggaaagcaggaagtcttattttcactggtaaatgaagacagcaatctgtgtaaagaatttaaaagcaatcaaattcttgtatattatgtaaagacgggtattgctaatggtacaataacagttattaccaatgaccattgttaccagaagttaagcttaggagtaaaaacgctaaaatcaatggagaaatatcaagtagatgtgttgggcgaagtgtatcctgtgaaaaaagaagtccgtcaaaaatttaccattcaacagaaagctcgatgatggataaggcaggtcttaatcaatggggtatcgcaatattgtgattgtttctgctgctactttatcctgcagggaaaatcagctgattatcctcaatgaggaaaacaacaaggttcccatcgaggatatcagtgccattgttttggaaaaccggcagagcaaaatcagtctggcggcgttggaacagctggtttccagtaatgtgacggtatacctgtgtgatcaacaacatttgcccagcgccgtagtacttcctttttatcagcattctaccaatgcggcggtcattgagcggcaggaacatctttctgttcctcaaacgaaacagatttggaaacagattgttgtggccaaaatccagaatcaggggcgttgcctaaaggaaaggggggataaggaaggaatccaatatttaacggaattggccaaaacggtgaccagtggggatatccataatgtggaagctactgcagcccgctattatttccgaagggcatttggagagcaattttccaggacgggagatgatggaagaaacagtgcgttgaattacgggtatgccattatgcgggggctgattgcaaggctgcttacggcctatggattcatggtcattcggggaatccatcatggcaataagtacaacagctttaacctggcagatgattttatggagcccctgcgtccaatcgttgatttgtttgtattgaataatatgtcaaaagaggatatgctgacgccggatttgaaacatgccttagtcaatctcttgggggtggatgtagtgtctggaggacaaatgcacagcttgaattatggcgcggaacggatgatccagagttttatgcggatctgccagcaggacgagaaagatttagtgattcctgaactggttcagctgagacagcatcaatatgaataaatttatgcgtatacttgtacttttcgacattccggtaaaaacaaaataccaacggcatgtagccacgaaattccgccatttccttttgaaagacggatactatatgctgcagtattccgtctatgcccgtatctgcaatggtcctgatgccgtggaaaaacatcggcagcgtctgatgagggcattgccggataatggatccgtcaggatggtggtcctgacggaaaggcagtatgaagcgattgatgtattggtgggaaaatatctgcctgaagaaaaggcctatgatgcggaacatgtttccattttttaaaaacaatcgagtaaggtttcaaaaattcctcactggagggatttttgaaaaaagtgaaaagcccttgtgccagatgacacaagggcttttgctgatctcgattgtaccaaaccaatgatcagcagggaactacaaccagattgatggtctgttgacttctgactgcattgtaccaaaccaatgatcagcagggaactacaactccgggtcttctgccgtttccagcaggaatattgtaccaaaccaatgatcagcagggaactacaacataaatgatggtggcaatgtgttccttttgattgtaccaaaccaatgatcagcagggaactacaaccgggtagtcgaaatctcgattggttccggcattgtaccaaaccaatgatcagcagggaactacaaccataatatgagctattattaaccttaacgcattgtaccaaaccaatgatcagcagggaactacaactggatttcggagggagaatacccagattgcattgtaccaaaccaatgatcagcagggaactacaaccggcttttcgtaatggttacaaaagacgacattgtaccaaaccaatgatcagcagggaactacaactgagtgataggtgttcatttttcttgttatattgtaccaaaccaatgatcagcagggaactacaacttgttcatggctatacccccattcttttaaattgtaccaaaccaatgatcagcagggaactacaacattagggatgaccttaaacaccactggtacattgtaccaaaccaatgatcagcagggaactacaactataccagtttcacctgtgtgtcgattcttattgtaccaaaccaatgatcagcagggaactacaacgcactcatggtgcaatatttgtaaaagctcattgtaccaaaccaatgatcagcagggaactacaacccgtcaaaagatacgttaccccatccggcaattgtaccaaaccaatgatcagcagggaactacaacctcccggtagtcaatgatgactctctcagtattgtaccaaaccaatgatcagcagggaactacaacactagggacgacgtagtcagctacctcaagattgtaccaaaccaatgatcagcagggaactacaacaagcgaagctgcactgttggctcacgaattattgtaccaaaccaatgatcagcagggaactacaactgtccggaacggttgatgatttccaccttcattgtaccaaaccaatgatcagcagggaactacaacatttcctgtgcgccaccatttgtagggagtcattgtaccaaaccaatgatcagcagggaactacaactcgaagagatagcggacgttgagcttgcggattgtaccaaaccaatgatcagcagggaactacaactgtatctgatcatgaggactttccccggctattgtaccaaaccaatgatcagcagggaactacaacaaaccagttgcaatagtatgtatgccccatattgtaccaaaccaatgatcagcagggaactacaacaggccatccgcaaggcccacggcctaaccaattgtaccaaaccaatgatcagcagggaactacaacactgtgctggtggcggaaaactccgtcccaattgtaccaaaccaatgatcagcagggaactacaactgattgccaaatcaaagactagtttttccaattgtaccaaaccaatgatcagcagggaactacaacgggctgtaggcgtgacactgtgctgctgctattgtaccaaaccaatgatcagcagggaactacaaccagttggtcagggaaggcaccaaagtagtcattgtaccaaaccaatgatcagcagggaactacaacgaatccgctcacgatttcggaagaaggaagattgtaccaaaccaatgatcagcagggaactacaaccaggtccggcgggtcccactggaccactacattgtaccaaaccaatgatcagcagggaactacaacaaaaggccccacatagtccatgcccacgctattgtaccaaaccaatgatcagcagggaactacaacttcaaagcgtcaactactatcccttttgtaattgtaccaaaccaatgatcagcagggaactacaacaaaagtttccagctggcctttatagatggtattgtaccaaaccaataatcagcagggaactacaaccacttacgtgaacgccactacctttaccggattgtaccaaaccaataatcagcagggaactacaacgagtaaatcccactcttgccgttgctgagcattgtaccaaaccaataatcagcagggaactacaacctcaaagaagaatttcgcggtattgtaattattgtaccaaaccaataatcagcagggaactacaacttgcagtaatgcctttgatggccgtgatttattgtaccaaaccaatgaccagcagggaactacaactccattgagtttcacaatcgaatcttttaaattgtaccaaaccaataataagcagggaattacaatatcgtaccagcttttcgtttatgccagaagagggatatacaacagcccctttcctcaattattcaacaaaacccctttcagcgcctcacacagctccatccccagggtattggggctcaggggataccaggagggatcccctgttttcccgtggctgatttcttttccgaggccgttataggtgtattggtacagatcggcacagacccgcagccgtacatcgtatcggctcaacaggagggtggtccgggtaccggtcaggaccgtgccttttttcacccatttgttccacagggtcaggatcccggtcttttcgtcgtactggatgctccgggtatcgtaatagacctcataattgctgttggcgccggccagggtccaggcggccgtttcgtcggtgggcggcactgggggctgttctgctggagctgctggggctgctgtggagtccgcttccgaggctgttccaggggctttccctgtacccttcgccggtgcagccgttccgtccggggctttggcctcttttgcttcattcgttacagaaacggccgttggagaaacggctttttccttttcctgggcaaaaagcagggaagggaacaggaaaagagaaacaaacaatataggaagaaaaagattttttttcatgaatgacatcctttctgtgaatccatggcattattgtaccacatcgtgttatactataggtgaattaactgaaagattaaattaaatcttttcaaaaggaggcagaatctatgaaaatcaccttcttgggagcggataaaatcgtcacaggctcctgccacctgctggaagtcaacgggaagaagatcctcctggactgcggcatgttccagggccccaagctgatccgggacctgaaccggcgggaatttgccttcaacccaggtgaaatcgatgccgtgatcctcagccatgcccacatcgaccacagcggccttttgcccaagctgatccgggaagggttcaaaggattcatccactgcacccatgtgacggaagaactctgcgagatcctgctgccggactgcggccacatccaggaatccgatgcagagatcgccacccggaaagggctccgtgccgggaagcaggcagtggagcctctctataccgccgatgacgcctacctggccctgaagcacttcatcccccacgattacgatgaagacatcgagctgtacccggggatcaccttccggttccgggtggccggccacatcctgggcagcgccctggtgaacctgatgatcgaggagaacggcaagaagaccaaattgatcttcaccggggatatcggccagcccaacgtgcccatcctggatgatccccaccagatttccggggcagatttcatcatcaccgaatccacttacgggaaccggctccatgaacaggtggaccgggaaaaggaattgtgcgacgtgatgaaggaagccctgagccggggcggcaacgtgatcatccccgccttcgccgtaggccgtacccaggtgatgctctactatttccagaaactcatgtccagcgggcagctgccggtggtccccatcatggtggacagccccatggccatcaaggccacccaggtgatgctgttcaacccggaggaatacgatgaagaagcccggaccatcttcaagaaacagggagggcggctcatcgatatgcccaatgtgaaatacacggaaacggcggcagaatccaaggccatcaacgacatgcccagccccatgatcatcatttccgccagcggcatggccgatgccggccgggtgctccaccacctgaaacacaacctgtggcggaaggattcttccgtgatctttgccggctaccaggcagaagggagcctgggacggcggctcatcgacggcgccaagaaggtgaagatcatgggcgaagacatcgccgtgggagccaagatctacaacctcaccggcttttccgcccatgcggaccgggaccagatgctggccttctataaagggatggaacggaagcccaaagctttcttcgtggtacacggggaatacgatgcggccagctcctttgcccatctgctgaatacggaactgggcactgccacctacatccccaatttcggagatgcagccattatcgacggcaccgactggcggatcgaagagaccaaggtcatcaccagtgcaccggccatccaggccatgcgggattacctgcggaacttcgaaaaggattacctggtttacaagggacggatggaacagctcatcacccacgatccccgtcggatccccgatatccgggccaagatggacaagatccgcaagtatatcgacgatgtgatgaagaccctgtaaatgaatttgacatacggatgggaaaagcatataataggaaagtcgaaatgatgtagtttactttgaggatgcttctttgacgggcatcctcttgatttatctggaaataagaggggattgggcttttatgattagaaatgatttgcgtaacattgccatcatcgctcacgtcgaccacggcaagaccactttggtggatgccatgctgaagcagagcggtgtattccgtgccaaccagcaggtgcaggaacgggtcatggactccaacgatcaggaaagagaacgtggcatcaccatcctggccaagaatacctccgtcatgcatgatggctgcaagatcaacatcctggacactccgggccatgctgatttcggcggcgaagtggaacgggtgctgaacatggtggatggcgtgctgctgctggtagacgcctatgaaggccccatgccccagaccaaatacgtgctgcgcaaagccctggaacatcatctgaaaccggtggtggtcatcaacaagatcgaccgtcccgatcagcgggtggaagaagtggtggacgaagtgctggatctgttcatcgaactgaacgccaacgatgaccagctggatttcccggtggtctatgcttccgccaagaagggcgttgccaagctgtccatggatgacgacagcgacaacctggaacccctgttccgtaccatcatcgacagcatccctgcccccgatgtggatgtggatgcaccgctccagatgctggtgaacaccctggaccacgatgattatgtgggccggatcgtggtaggccgtgtggtccgcgggaccatccggaacggccagaatgtatgcctgatgcacgatgaccagcgctccaaccagaaaatcggccgtctgtacacctatgaagggctgaaacgggtggaagtgccggaagccaaggccggggacatcatcgccctgatcggcctgaacacggcagaaatcggcgacaccatcgctgacgtggacaacccggaacagctccaggggatcaaagtggatgaacccaccctgtccatgactttctccgtcaacgacagcccctttgccggccaggaaggggatttcatcaccagccgtcaccttcgtgaccgtctgtacaaggaagtggagaccaacgtttccatgcgggtagaagatacggacagcgccgataccttcaaggtatccggtcgtggggaactgcacctgtccgtgctcatcgaagccatgcgccgggaagggttcgaactccaggtcgggaaacccaccgtcatcatgcgccgggatgaaaacggcaagctgctggaacctatggaagctctgaccatcgaagtgccccaagatttcatgggtgctgtgatggaaggcctggggatccggaaagcggaactccagaacatgaccgaaatggccggctatctgcggatggacttcatcatcccggcccggggcctgattggcttccggaatcaattcctcaccgataccaagggcaacggcatcatgaaccatgtgttcgctggctggggtgcctataagggcgaaatcccgggccgtacccggggcagcctggtggctttcgaagccggtaccaccacggcttacggcatcgacaaatgccaggccagaggcaccatgtacgtgaaccctggtgaagaagtgtacgaaggggaaatcgtcggcgaaaacagccgggaagacgatatggacgtaaacccctgcaagaagaaacacgtttccaacatgcgtgctgctgggagcgatgatgcggtccgtttggttccgccccagaccttctctctggaaggggctctggaacacatcaacgacgatgaaaccgtggaagtcacccccaagagcatccgtatgagaaaacgggtcctgtcccgcctggaacgggcccgcaccagagcacggaacgctcgggcgtaagaaaaaagctgccgcattgcggcggcttttttgctttctcctccaaattggtgtaaaataaaaagatacaaagaagggagggatgtcacccatgtttgccagtttcaaatccgggaaagctcaccaggaggaacgggaaaatcccggcttgactcttttggatacgcccaatctggatttgtgtctccggacaccgggcagcctggaagacatcgtctcctacggcgacctgatcatggcggggaaggggctgctcgtatgtctcaacgacctgccggaaccggataagatccgggcccaggactacctggccggcatcgcctacaccatcggcgccaccgaaaccgaaatttccccggaagtgaccatgtacctgccgggagaagtggatacgatcagaggataagtcatctgtcaacggtcaacggccaaaggaagccagcgaagctggctttgaacgacgaaaaaacaagttcagcgcacaacttcttttccaatttcaacttcaatttgtcaaaattgatctccagcggccgctgaccgctgaccgttgactgctgacaaccgggggctttgcacgtttcgtgcaacagcccccttttttaaaggagcacccatgaaccaattcgtccatttacatacccatacccaatacagcctcctggatgggtcctgccgtatcccggaactggtccagtatgccaaggaactggggatgccggctttggccattacggaccacggggtcatgtacggagtcatcgagttctaccaggaatgcaggaaagccgggatcaagcccatcatcggctgtgaagtgtacatcacctccgggtcccacctggacaaaagcctggaaacccggaacaagctctaccacttgatcctcctggcggaaaacaaggctggctatcagaacctgatgaagctggtatccatcggcgaagtggaaggcttctattataaaccccggatcgacaaagaagtcctccgccagcacagcgaagggctcatctgcctgtccgcctgcatcgccggggaagtgccccgccacctgatccggggcgaactggaaactgccgagaagaccatgctggaatacctggatatcttcgatagggatcactactacctggagatccagaaccatggcctgccggaagaagccaccgtccgccgggaactccaccggctggcccagaaacacaatatcaaactggtggccaccaacgacctccactacatccataaagaagatgcttccggccaggatatcctcctgtgcatccagaccaacgcccggtacctggatccccagcggatgcgcttcaacaacgattcctactacctgaagagccgggaggaaatggaagccattttcccggaagaccaggaagccttggacaataccctggaaatcgcccagcggtgcaacctggaactggaattcggccatctgctcctgccggaattccccctgcctcccggagagaccatggacggtttcctgcggaagctctgtgaggaaggcttcccttcccggtacccccaggatgacggcaccgctcggaaacggatggaatacgaactggggatcatcaaacagatgggctattccggctatttcctcatcgtctgggatttcatcaactacagccggacccacgatatcccggtggggccggggagaggcagtgctgccggcagcatcgtggcctatctgacgggcatcaccaatatcgacccgctgaagtacaacctgatctttgaacggttcctgaacccggaacgggtgagcatgcccgatatcgatacggatatctgttacgtgaagcgccacctggtggtggattacctggctcggaaatacggggagagccatgtggcccagatcatcactttcgggaccctggctgccaaagcggccatcaagga

SEQ ID NO: 2738 - DNA, 23405 bp, synthetic construct
  misc_feature 1..23405: note = Synthetic
  source 1..23405: mol_type = other DNA
cgacgagctcgagcgcagcggacagagtcttgaggagctgttcttctccgtgacggagaatatcgaaactgacggcgcggaggagcagccggagacggaggagccgacggcgcagaaaagccgctggagcctgttcggaggcgggcggaaatgagactctttggctactacgctgtccatgcggtgttcaaccagatcaaaaagctctgccgcacctgggtggtcgtgtttattctggtctgcgcgctcggcggcggactgatcggcgtcggcgtggcgatgctcgaagataaggcggaggagaacaacgcggacgagatcgaggaagtgatcgacgacgagccgatcgacccggccgagatggcgcagcgactcgagctgatcgccggcgcggcgatcctggccctgtttatctatgaggcgctgagcgccgaaaaaaacggcagcgcgattttccagccggccgatgtggcgctgctgtttccctcgccgatgaagccgcagagcgtgctgatgttccggctcggcacgcagatcggcgtcgcggtgttcgcagggctctatatgctgctgcagctgccgaatctgacggtcaatatgggcttgaatctcacccaggccctgagcctgatcctgattttcgcactctcggtactgtttggaaagcttatacagctgacgctttatctgctcggctccaaccacgcccgcgtgcgccgcggcatccgcccggcagtctatgggctgctggcgctgctgctcgcggcctatctcgcagcctggaagacgaccggcggcggtgacgtgctcggaacagctgaggcgctctttaacgccccggcgacgcgctttatcccggtctggggctggatcaagggactggtggcctatgcctgcgcgggggatctgccgcactttctgctctcgctcggcctgctgctggccgccgccgtgctgctggtgtggggcatcggccgcatgaaggtcgatttttatgaggacgccatggccaagtccgaggagacggccgagctgcagcgcgaggccagagaaaagggcatgctcgcccggaggggctccaaggccgagcattcagacgctgtgcgccgcgacggactccggcacggctggggcgcgagcgtgttctttcacaagacgctgtacaaccgtttccgctttgcgcgcttcggctttctgaccaaaaccacggtcacctatctgctggccgcggccggggcggcgatcctcgcacggacggtgctggacgatcatacgctgctttatccgtccctggcgctcgcggcgctggcctttttccgcgcgctcggcaatccgctggcgagcgatacgaaaatggagctcttccgcagcatccccgagagcccctggaagaagatcggctggtcgctgctcggcggcagtgtctgctgcctgctggacgccctgcccgcgctgctgctggcctgtctgctgctcgggacaagcccgctgccgatcccggcctggctgctgctgatcttgtcggtggacttctacgccacaatcgtcggcgcgttcatcgatctgtcggtccccggctccaccggtaagaccgtcaaacagctgttacagatcttttttgtctatttcgggctggtgcccgacgtggcgctggtggcctatggcatcgtgacggaaaatgccgttccgttcctgctgatcgccgcggccgtcaatatcgcgctggggcttgtgttcttcggcgtcacgccgctgtttctcacgccgcgcagcgcaccgcgcatcgagcctgccaaccacagcgccgagacgcttcgcgccgccagacgggccttcagccgcgcgtggctggcactgtttgtcgccctcgcgggcggatcactggcgcagatagccgctgtcacggctgtgcagcgctttgctccggcccttttggacaacagcatggccgtctggctgctgacctttgcaccgctctatctgctttcggtcccggcctgcttcctggtattgaagaagctccccacggctcggcccgagcgccgtgcctggccggcctggcggctgctgcgcctggtgccgatcgccgtcttcctgatgtataccggcaatatggtcggcagtgtgatccaggtgctgctgggggcgctcaaccccgttgagagctatgccatggccgattctacggcattaaaaacgctgttccttgtggtgctggccccctgcatcgaggaattcctgttccgccgcgcgctgatcgaccggctcgcggtctacggcgagaagctcgctgtcgttgtcagcgcgctggccttcgggctgttccacggcaacctctcgcagttcttctatgcgttcttactggggctgctgttcggctatgtctatctgcgtaccgggcggctgcgctatacgatcgcgctgcatgtgggcatcaacagtctcggcagtctggtcggcccggcgctgctggagcgggcaaagcttgaaacactcgttgcaggggccatgccggacggctggacgctggtgttcctggcctatgccgcgctgctggtcgccatgtcgattttcgggctggtgcagctgtgcatcgccgtacacgatcgggtgtatgtctcagccccgcttgagctgccgcgagagaagcggatatccgtggccttcggcaacgtcggtatgctgctcttcacgctcgccgcactcggtctgatcgccagcaccatcctgatgtagtcctttaactgttcagtccccttgatggggactgaacagttagagggacactcgcgcttatcgcagcaggctaaggcctactttggtcggcgcgaggcctcgcaaagctcggcttagggtgtatttgaagcggcaaagctgcctcaaatacggatttcaattgatttttcgcctcgcgaggcgaaaaatcagaggcgttccccctctgaactctccctaatcacggtagactgaataataacgtagtccggtttatagtcccgtttgctcttgacagaaatatcttaataagatattattgaacgcagaaatatcttgttaagataacacagagagggtgagcgcgtggatgcaccgggcagaagacagtcggagaggatctatgtcaaggcgaatatcgcctttgacaagacgggctacatgcaccccacggcgatcatctgggaggatggacggatctttccgatcgagaccgtgcgggatttccgtcccggctcggccgagggggacgatgtgggcgactgctataccgtcgtgatcggcgggcaggagaagatattgttcttcgagcgtgccgacccccgcttttccagccgcttcggccgctggtttgtgaaaaaacagtgacgccggaagggaggcgcggacagtgcaggagagaacctatatcgcgatcgacctcaaatccttctacgcctcggtcgagtgtgccgaccggcatctcgacccgctgaacaccaacctggtcgtggccgacctctcccggacggagaagacgatctgcctggcggtctcgccctcgctgaaggcgcacggcatcccggggcggccccggctgttcgaggtcatccaacaggttgacataatcaaccgccgccggctgcaggagtaccggcgccgcgtaggggacaaggacgcggcctttacgggcgcgtccttcgacgcgcgggagcttgcgcgcgacgcgggactcgagctcggctatatcacggcgccgccgcacatgtcccggtatatcgagatttcatcgaaaatctatggcatttatctgaaatacgtcagccgcgaggatgtgatcgtctactcgatcgacgaggtgtttatcgacgccacggcttatctcgcggcctacggcatgacggcgcgcgatctcgcgatggccatgatccgcgaggtcttgtacaccaccggcatcacggccacggcgggcatcggcacgaatctgtatcttgccaagatcgccatggatatcgtggccaagcacgtcgagccggacgccgacggcgtgcgcgtggccgagctggacgagcggagctaccgccatatcctgtgggaccaccgcccgctgacagacttctggcgcgtcggccccggcacggcacgcaagctggaggaaaacggcatgttcacgctgggcgacgtggcgcgcatgtcggtgacgaaggagccggtctatgtccggcttgaaaagcccaagcgaggcgaaagccccgtgcagcgcatggaaaacggcgaggagctgctctacaagctcttcggcgtgaatgccgagctgctgatcgaccacgcctggggctgggagccctgcaccgtggacatcgtgaagcagtaccggcccgagagcaacagtctcggcagcgggcaggtgctgcacgagccctatacctttgaaaaggcgcgcgtcatcgtcaccgaaatggccgacgatctgagtctcgagctggtgcgcaagggtctcgtgaccgaccgcatcgagctctatatcggctatgaccgcgagagcctgcagggcgagcgcggcaaggcctacaccggccccgtgaccacggattattacggcagaaaggtcccaaagcacgccgtgggcggccgccgctttgcgtttccgaccggctccaccaagcgcatcgtcgaggcggcgctgagcatctatgacgagaaggtggacccgcagcttctggtgcggcgcgtgaatgtggctgccgggcatgtcgtgcccgagagcgaggccgaagtgctgacggccgagcccgagggacagctggacctgttcaccgactatgaagcgctggagcgagagcgcaaacggcagcttgaagagctcgcgcgcgagcggcggctgcagcaggctgtgctgtcgatcaaggagcgcttcgggaagaacgcgctgctcaagggcaccaactaccgcgagggcgcccgcggccgcgagcgcaacaacgaggtcggcggccacaaggcgtaaagggagaaagaacgatgggaaaccggccgtatacctggcgaggagccgaagagagccaccagtacgacgatatcatcgatctgccgcactatgtctcaccgacgcgcccgcgcatgggcatgctcgagcgcgcggcgcagttcagcccctttgacgcgctgacgggctatgacgagtcgatcgacgagacggcccgccgcaccgacgagcggctgccgctctccgagcagcagctcgctgcgctggacgaggcgctgacgcgcctggaagcgctctgccgcgaggcggcccgtgcgcgatttaacggcgagggcgagcatctgccgcgcgcgacgctgacctggtttgtccccgacgagctgctgcaccgcggcagcggcaagagcggcgggacctatttcacgcggcaatttgcaatccgccgtgtcgaccgcgccgccggtacgctcagcgtcctggaggcggagcgcgcccagggcgagaagaagatcgcgctggcggatatcgagagcatcgtaatcgaataagacagctgcagccgcctgtgtgcggctgtatttttgttaaatttctttacaaaaacacgaaaacattttatactgataagaaagtaacgtaccccaaccggggtcagttgatttgaacggaggtataaccacatgctgaaaatcaaacgctttgccgtcgaaaacctggcggcgggctgtgttaccgatgaaaaggcgccgcgcttttcctttacgcttgagagtgaccggaaaggcgtcagtctgcagaaggctgtgctgcgcgtcggcgcgtggagcgtcgagacgaccgagcagatcggcatcgcctatgccggagcggccctgaagcctttcaccggctacgacgcttcgctgacagtcaccgacagcgagggcgagcaggccgaggcggctttgcatttcgagaccgggcgcctggatacgccgtggtcggcccagtggatcagcgatccgggctatgtcttttatgaaaaaaagatctcgccgctgccgatggtgttccgcaagaagctgacgctcgcaaagagcgttgcctcggcccggatctattcgacggccattggcatctatgagctcagcctgaacggggcgcgcctcggcgatcgctattttgcccccggctttacctcctacaaatcccagctgcagtaccagacctacgacgtgacggacgccctgcgcgccgataacgagctgctggccaccgtggccggcggctgggcggtgggctcgttcatcttcacgcggcaaaaccgcatcacggccaaacgccaggcattgctgctcgagctgcgcgtgacctataccgacggcacaacggagaccttcggcaccgatgagagctgggaggtcaccgagcaggggaactgctatatggccgatctctacgacggagagtcctgggacgccacggtcgatctcgataaggccgactggcacaaggcggcccgggagaatatcggcatcaccccgcggctgatcgccgagtacggcgctccggtgcgcgcgcacgaggagctcaagccgatctcggtcaaaaaggtcggcacagcgctggtatacgatttcggccagaacttcgccagtgttgtgaaaatgaagctgaaaggccgccgtggccaggtcgtcacggtgcgccatgccgagatcctgaacgccgacggcacgctgaacgtcagcttcctgcgcacggccaaggccacggccacctatacctgcgtcgacggcgagcaggaatacagcccgcgcctgagctatatgggcttccgctatgcgagtgtcgaggggatcgacgagcaggatctcgagctcacggccctggcgctctattccgacgtcgagagcatcggcgccttcgaatgctccgatccgatggtcaaccgcctgcaggagaatatccgctggggcgcgcgctccaactttgtcgatatcccgaccgactgcccccagcgcgacgagcgcatgggctggaccggcgatatcgcggtctttgcgccgacggcctgctataacttcgatatgagccgcttcctggacaaatggctgctggatgtcaaggccgagcagaccagcggcggcggtatcccgaacacggtcccctcgcagggctacggcttcccgaccacgatgccgccgatcgccgtggcctggtggggcgacgcctgtgtgctggtgccctgggctgagtatatggccaggggcgatatcgagctgctgcgtaagatgtacccgaccatgaagaagtacgtcaaggcctgcaaattctggtgctccttcggcttcggcaagaatcgctatatctggaacgtgcccggcatgctcgcctttggcgactgggttgcgcccgatgtgccgcagatgagccagtggcagggccgcgtcaagtggaccggcacggccgcgctctgcaatctcagcggactcgtggcccgcatcgccgagctgctgggtgagaaagaagatgccgcctattataaagagctgcgcgacaagaccgccgatgcctattgctcggtgctgaccgacgggaacggcaagctgttgaatgagttccagacggcctatgtgctgccgatctatctccatatgttcccggacgaggccacacagaaaaaggcagtggacaacctcgctcggctcgtggagaagaacgactattgcatcggtaccggcttccccggcacgccgtatattctcttcgcgctggcggacaacggccgcgcggacgtggccttcaagatgctgatgaacacgaagtgcccctcctggctctacgaggtcagagtcggcgctacgacgatctgggagcgctgggacggcctggacgagaacggcgtctgcccgatcggcgacgacggcaccgacatgatgatctcctataaccactatgccagcggcgctgtgggcgatttcctctaccgccgcgtggcgggcatcgagccgctggaggccgggtataagcgctttgccgtcaagcccctgctgggcggcggtctcagctgggccaagggcagcgtcgagacaccgtatggaactgccgcctccgagtggcacctcgaaaacggtcagtttacgctggaggtcgaggtccccgtcggcaccggctgcacggtcacgctgcccgacggcagcgtcaagacctgcgtcagcggcaagtacagcttcagctgcaaggcgtaagggctacaatcgaagatataagcatctgccggatgaaagcgcaagccttcacccggcagatgcttttcacagaagtaaaaaacacttggcaaacggcggcaattctgctatgctacaaaatcatttcccgataatgaatagaggcgtcccacccatgacagaaagaacaagttcagcccgtcagatcctgctgcccaccactgccgccctggtttggggcatggctttcgtcgtgcaggatatctgtgccgacgcgattgatccctttaccttcaatgccgcgcgctttctggtcgcggctgtggcgctgctggccgtgtgcctgctgctgcggctgaaaaagccggagcggacacccacgccgggcgagcagaaacagtaccggagagcgctgctgctcggcggcctctgctgcgggacggcgctcgcggcggcctcggccttccagcaggctggcttctcggccgggaccgaggccggcaaggcgggctttatcacggcgctctatgtggtgctggtgccggtggccgggctgttcttcggacgccgccccacggcacagatctggctggccgtggcgctcgcggtggctgcgctctacctgctgtgcgtcaagcgcggcctgacgcttgcgcccggggatctgctggtgctcgcctgtgcgctgtgctttaccgtgcagattttgctgatcgaccgtttcagtctcctcgtcgccggcgtggagctctcctgtgtccagttttttacggcggcgattttgtctgcgctgctgatgcttttcttcggcacgacgccgcttacggtgctgccgcagtatacctggccgatcctgtacatgggcgtgatctccggcgcgctcggctacacactgcagatctttgcgcaaaagggcgccaatcccacggtggtctgcatcctgctgagtctcgagagcgtcttctcggtcctcggcggctggctcttcctggggcagcgcctgacgggccgcgaaacgctcggctgtgtgctgatgtttgccgccgtgatcctcgcccaggtgcatattccgatgaaatccaaagactgagacctgattttcgcagtttgcctcttgatttttccggcatttgctgtaatataatataccgtcaaaacaatcaactctcaggaggaattcaacatgttttacgagatagacattgccggccttaagcgtcagctgccgctgtgcagggtcagtgacgacctgtacatcggcgccttcgtcatgttcggcgatgtggagatcaccgttcacgccgccgccgagctgcttaagcgcgcgccggagtatgactatatcatcgctccggaggcaaagtccatcccgctgctgtatgaaatggcccgccagagcggcgccgagcgctacttcctggcccgcaagggccccaaagcctacatgtccggcgtgttcgaggtgaacgtcaagtccatcaccactatggccgtgcagaagctcgtcatcgacaaggccgacgccgatttcatcaagggcaagcgtatgctgatccttgacgacgtcatctccaccggcgagagcctgcatgccaccgaagagctggtccgtcaggctggcggcatcgtggccggcaagatggccgtcctggccgagggcgacgccgccgaccgcgacgatatcatcgtgctgcagaagctccccctgttcaacgccgacggcagcatcaaagcgtaaaaacagtctttatacaccgtgccaaacgccgcccgtccgggcggcgtttggcgttaaaaactgtcagctttttgttgacaacgtatccattatatgctaatttatactcagttcttataccataccaagaactatgcaggttgctataataaggtagtaaaccgcagagctctaacgcctcgcttatgcggggcgttatctctatctgaagataaaacggagggacgaacgatgcttccttacgcgatcggacttgacattggtattacttctgttggttgggcaacagttgccttggatgaggatgactgcccgtttggcatcatcgggatgggctcgcgtatttttgatgccgcagagcagcaaaaaaacggcaaatcgcttgctgcaccgcgaagggaagcaagaagcgcgcggcgacgtctgcggcggcatcggcacagaaatgaacggatacgcgcgctgctgattcgtgagcgtgttgtatccgaagatcagttggcccacctttttgaagggcagttgcccgatatctatgcactgcgggtaaaagcgctggatgaaaccgtaacaggggaggagcttgcccgcatcctgattcatattgcacagcgccggggcttcaaatcaaaccgcaaggccgcagtgtccaaagaggacggagaactgcttacagccgtcagtgccaacaaagcgcgtatggctgagcatgggtatcgtaccgtggcggagttgtatttgaaggacgaggtctacagggaacatcgacgcaacaagggtggtaaatacatatccactgtcagccgtgatatggtagaggatgaagttcgtcagatttttgcagcccagcgaaaacttgggaataccattgcaacagaggcgttggaagtatcctatgtggagatccttttaagccagcgctcttttgacgatggccccgcctgcggaccatatgccggcagtcagatcgagcgcatgatcgggaagtgcccgttcgagagggatgagctgcgcgcagcaaaggcgacatattcctttgaactgttctcactgctggaagcggtcaatcatattcgcattgtcacaggtcgggaaagtgtgctgcttactccggatcagcgtgtaaggcttattagccttgcacataagacggcagacctcaactatgcccaaatacgcaaggaactggcgctttccgacgagcagaccttcaatatggtctcctacggtaaggctggggataaactctcagcagagaagaaaacaaagttttctcatttgaaggcgtatcatcagatgcgcaaagcgtttgagtccgtggtaaagggacactttgcagatataacccgcgaacagcgcaacgccatcggcgaagtgttgtccaagtataagacatctgctaaaattcgacccgcgctggaagctgtcgggctgtctggacaggatatagatatagctgaatcgctcagcttcagcaaattcggccacatttcggtgaaagcctgcgacagaatcattccctatctcgagcagggaatgaactacagtgacgcatgcaccgccgctggctaccagtttaaggcgcacgaaggacaggagaaagcgcatctgctccctccgctggacgaagagacaaagaacacgatcaccagcccggtggcgctgcgtgccatatcgcagaccatcaaggttgtcaatgccatcatccgcgagcgggggtgcagtccgaccttcatcaatgttgagctggcacgggagatgtccaaggacttctacgaacgcagtcagatcaaaaaggagcaggatgaaaaccgcacgaaaaacgagcgcctgatggagcgcattcgcaccgagtatggcaaggtatcgcccacaggcttggatctggtcaagctcaagctgtatgaggaacagggcggtgtctgcgcctattctcaaaagcagatgtccctggagcatctttttgacgccaattacgccgaggtcgatcatatcatcccatacagcatcagctttgacgacggatataaaaacaaggtgttagtgtttgcaaaggaaaaccgcgacaagggcaaccgtcttccgctgcaatacctgaccgggaagcgccgagacgactttattgtctgggtcaatagctccgtgcgggactatagaaagcgccagcggctgctcaaggaatctgtcacggaagaagatgaagcacaattcaaagatcgtaatttgcaggacaccaaaacagcgacgcgctttgtcctgaactatatcacggatcatctggaattcgcaccgttttcgacagaccgtaagaagcacgttacctctgtaaacgggagcgtgacgtcgtatatgcgcaggcgctggggcataacaaaaatccgtgccaacggagacctgcaccatgcggtggatgcgctggtcatcgcgtgtactacagatggaatgattcagaaggccagccaatttgccagattccgcgagacccgctatacgcaggcggaggacacccgctttattattgatgccgataccggcgcggttatcaaggaatttccgtatccgtggccccggttccggcaggagttggaagcgcggctcagcagcgatcccagccgcgcgatacggggtcagggctttccactgtatcttgccgaagagattcccgtccgtccactgttcgtctcccgcacgccgcggcataaagtcacaggcgcggcgcacatggagactgtcaagagcggcaaagcactggcagacggacttttgatcgtcaggaaagctttgaccgaactaaagcttgataaaaatggagaaatcgccaattactataatccgtccagtgaccgtttgctgtatgatgcactgaaagcacgcttacagttgtttgacggtgatggcaaaaaggcctttgccgagccgttctacaagccaaagagcgacggaacaccgggggcggttgtcagcaaggtaaaagtgtgcgagcccagtacgctgaatgtttcggtccacggcgggaaggggattgcagacaacgacagtatggtacgcattgacgtattccatgtggagggagatggatactactttgtcccgatctatgtggcggatacgctgaagcccgaactgccgaacaaggcgtgcatacagaagaaaaactatgagaactggaaagaaatgaagaatgaggacttcatcttttccctctatcccaatgacttggtcaaggtcacgcaaaagaagccttggaaattatcgaaagcacagaaagacagcgacttaccagacagctatgaggttaagagtgaattgctgtactttgtcagcgcgagtattagcacagcctccctcagctgtcggaatcatgataatagttacaaaattgacagccttggcattaaaacgctggaagcttttgagaaatataccgttgatattctcggcgaatatcatccgatttcgcatgagatccggcagacattttcacgaaagaagggctgaccatggcatttcgtagcatcatcatcgaaaaccccgcccatctatctgtgaagagcaatcagctggttattcgcacagatgctgaacacactgttgccattgaggatatctctgcccttttgcttgaaagcaggcaaagcacgatcacaactgccgcattgtcccaactgggacagtgcggctgcgctgtattcacctgcgatgagaagcatttgccttgcgctgtgctgtcaccgtttcatcagtatgtgcgggagctctctgtactgcgcagccagcttgacgccagtgaaccgcgcaaaaaacagatatggaggagcgttgtcagggaaaagatcaggaatcaggcgatctgtctgcagctggccggaaagtcggagaaggcgggtacgcttttcaatatgatcgaggaggtgcgctcgggtgataccggtaacgtagaggctaccgctgcgcagtattatttccctgtactgtttggtgacggttttacccgcagcgatgactgcggctggaatgccgggatgaactacggctatgcgattgtgcggggctgtgttgcccgcacgctggctgtttacggtttcctgccgtctcttggccttcatcaccgcagcacactaaacccctttaatctggcggatgacctgatggagccattccgaccgctgattgatctgatggtgattcgtaacatggaacatgatgacgaactgatgcctttccacaagagaatgctgtttaattgtctgaatatggacatcctttccggcggacagcaccacagtgtcagttatgccatcgagcgggaaatacaaagcttgggcggcgctttgtcggataaagattccgacctgctgctgcctgaacttttggaactgaaacaacatcgctatgagtaagtttatgagaatgcttgtcttttttgatttgccggtcacaacagcaaataaccgccgggaagcaacccgctttcgcaagttccttctgaacgacggttatcatatgctgcaatactctgtttacgcccgtgtatgcaatggcgtggatgcagtggagaagcaccgtgctcgtatccggcagaatcttccggacaacggcgcgatccgcctgctggtgatcacggagaagcagtatgaatctattgatattctgctggggagactgaccgaagcggatgaaccgttccaatgtgagcagctgacaattttttaaaaaatcctgtccgaaattgctttgccggactcattttttcccaaaccaaatccgcccgaagccccgtctccgagcggatttttcgatagtctattataccataccaagaactatcagggaactataactttcgttcatgtctcttcctcctccactttattataccataccaagaactatcagggaactataacttctacctcaactagaaaaagatcatcgtcattataccataccaagaactatcagggaactataactggacggtgcggtttaacccaaccgaccccattataccataccaagaactatcagggaactataaccctgtcggcgcgtagatcatcactttaccgattataccataccaagaactatcagggaactataacggaatacattgtatttcgtgctgtcataacaattataccataccaagaactatcagggaactataacacttggaagatgatattttccgatatatctattataccataccaagaactatcagggaactataaccttcgtccacgctgtttgcaaagccggactattataccataccaagaactatcagggaactataacatttgaggcgcggggtatgctgtttgatatattataccataccaagaactatcagggaactataacattggacgatcaacaacgcaggaggcatgaattataccataccaagaactatcagggaactataactccgaaagtgaatccctcactctctgcctgtattataccataccaagaactatcagggaactataacttccgtcgtcactcagggaacggtctatctattataccataccaagaactatcagggaactataacttagctcctctcttacggcctcgcggaattattataccataccaagaactatcagggaactataaccatgaaatacgccaccaaaaactcgcagacattataccataccaagaactatcagggaactataacctctgagccgctgtatcttttttcttgacgattataccataccaagaactatcagggaactataacccgcatctgcattgatgagattactcagttattataccataccaagaactatcagggaactataacttatcctcctatcatgcagaaagggctttttattataccataccaagaactatcagggaactataaccagtggccggcgagggattcacagacaagaattataccataccaagaactatcagggaactattatttgaaaatatctacgattcacgttattcatcttccgggatttagcagatgaataatcgttataaatggtatgtttctgtctccgggttgtatatgagcagtttgcccattcagatatctatttgaggcagaacacagacgaagcagtcagctttctgttgacaggggaatgataattcgctattctattcgcggggttaacccaaaacaataagcatgaaaagggggcaacgtcatggacggtggaagcagtaccggcacatctgagggccgaagtctgactgcggagagccgcccggcgcgccttcgcaactgtatataatactggatatcggcctgtgtgtcggcttccaactctctggacgaacacgatgaagaggaggaacgaccgatggcagaacatcaagtgacagtcgagaaaaccattcgcaccctcttggaggggaaaaagtaccagacactcaaggacattctggagacgatgaatccgtcggacctggcggcggtttttgacgagctggacgaggagcgcatcccgctgctcttccgtctgctgcccaaggagctcgcggccgaggccttcgccgagcttgagccggaggcacaggagctgctgatccgcggcttttccgacacggagctccgcgagctgatcaacgagctctacgtcgacgacgccgccgacctggtcgaggagatgcccgccaacgtcgtcaagcggattttagcccaggccgacccggagatgcgcagcgagatcaaccagatcctgcgcttcccggaaaactcggccggctcgatcatgacgaccgagtatgtctcgctgcgccccgcaatgaccgtgtcagaggcaatcactcgcatccgccgcaccggcgtggacaaggagaccatttacacctgctacgtcaccgaaaacagacggctgctgggcacggtctcggtcaaggatctgcttttgaccgagaatgacgataccccggtctcgcagatcatggacagccacgtcatttccgtcagcaccctgaccgaccaggaggaagtggcgcagatgctctccaaatacaacttcctggcgctgcctgttgtggacacgggtggattgatggtcggtatcatcaccttcgacgacgcgatggacgtcatggaggaagaggtcaccgaggatatcgaaaagatggccgctatcctcccgtcggagaagccctatctgcgctccaacgcctgggagctctttctgcaccgcatcccctggctgatgctgctgatggtctcggcaaccttcaccggtatgatcatcaccggcttcgagagcgcgctggccgcgcaggtcgtgctcacggcctttatcccgatgctgatggacacaggcggcaactccggctcgcaggcctcggtcacgatcatccgtgccatgagcctcggcgagctcgaattccccgatctgccgcgcgtgatctggaaggagatccagacggctttcctatgcggcgtggcgctctcggcgctctgctttgtgaagatcatgctgatcgaccggctgctgctgggcaacgcggatatcacggcgctcacggcttttgtggtttgctttacgatggcggtcactgtgctgatcgcaaagctcgtcggctgcacgctgccgatggcggccaagaagctcggcttcgatcccgcggtcatggcgagtccgtttatcaccacgatcgtcgacgcgctctcgctgctggtctatttcggcatcgccagcgccctgctgttttcgtgaaaagaaaaatcagatatcaacagcagacagcctgtgattgagcaaatcacgggctgtttgtcttcaggttaatccccatgcgcaaacgcgcgcaccggaataaatgaaagcgtaaggcgcagggggatttatgcgcatgtttttcggttgccccgcaaggggcgagaaaaacgcgctattcaaaatactatggaagcgccagctttcatagtaaatcctgcattgtcatccggactgggttttggtataattctaaaaaatacggcgtatgagcgctgttttatggcgggaatcagaagagggaggggacagaccttgacaaaaatcaacatgaaacaaccgggcgcggatatcctcgcgggcgtcgtcgtgggcctggtctcgataccgatctcgatgggctatgcccagattgccggactgcccgcggtgtacggcctgtatggctcgctgctgccgatcctcgccttcgcactgctgacaagctcgccgcagttcgtcatcggcgtggacgccatgcccgcggtcatggtcggcagtgcgctcggcaccatggggctgacgctgggctctgaggaggcgctgggtctggtgccggtcatcagtctgctggtcggcgtatggtttctggccttctgggcgcttcggctgggacgtgtggtcaagtacatctccggcccggtgatgggcggttttatctcgggcgtcggcgcgacgatcatcctcatgcagataccgaagctcttcggcggcgacccgggcaccggcgagctgccggcgctgctgctgcacctgatcggcgagctgcccaaattccatccgctctcggcctgcctcggtctcggaacggttctcatcattcagctcgggcggaaggcggcaccgaagatcccgctgtccgtgattttgctgctgctctcggtactgctcgcggcgctgctgccgcttgagtcgatgggcgtaaagctgctgcccgcgaccgaggctggactgccgcggctgatcgtaccaaagctctcgctgctcggcgggcggctcggcgcgtgtgtgacctgcagtctcaccgtggcgctggtcgtcatggcgcagacgctgctggccagcaacaactatgcgatgaaataccgggacacgctcgatacgcgccgcgagctcctggcctatgccgcggccgagctctgtgcggcggcggtcggctgctgcccggtcaacggcagcgtctcgcgcgcgggtctggccgatcagtacggctgccgctcgcagctgatgagcatagtggcgagcgccgtgatgctgctggtgctgctcttcggtacgccgctgcttcagttaatgcctgtccctgtactgaccgggatcgtcatctccgcgctgatcggcattctcgaaatcccgatggcaaaaaaactctatgcggcgaataaacaggagttcatgatcttcctcgcagcctttttcggggtgctgctgctcggtacgatgggcggcgtgatcgtcggcgtgctgctgtccttctttgcggtcgtggtgcgggcagtcgtcccgccgcgcgcctttctcggtgtgatcgaagggcacgagggctattatgacctcaagcgcaatccggcggcccggccgatccgccatacggtgctgtaccgcttcagcggcaatctgtttttcgccaacatcgacaccttccgtgatgatatcgagtctgcgatccgtcccgacaccagacaggtgatcgtcgacgggcgcggcatcggaaatatcgacatcacggccgccgagcgcgtcctgctgcttgaggagagtctgcgcgctcgcggcatccgcctctacctgaccggccatgtcggcgcggtcaacgaccagctgagacagtacggcgctgtcgaactgatgcgccgcggctcggtccggcgcaccgccgccggtgcgctgcgcgatgcgggcgtcacagaaccgtttcccctggaagcaagggaggtaagccgcgacacagcgcctgcggcgccgcggcaggagcgcgcggagctcgaatggctcttcggtgatgagaccgaggccgagctcgagcggatcgccgcggcggtctcggcggagctgacaaagcactttgaatccgagcaggagctgttcgacgccgagcggcatatcggctttgcgtggctctcgctcgccgacgaggaggcgctgctcgaccgtatcgaatcccagctcgacgcgctgctgcaggatggaaagctgacgaaggagcggctgcgcgcctatgaagagcggatcgaacgcctccgggcgcggctggaggcgctgcaggagcaggggagctcctgggtgctgccgctgatccgcgcgcggcgcgaggcactgcgtgagacgctgcgccgccgcgatcccgagcggatcgcccggctggaggcgctctggagagaaagacaccaataaaccgggcagacagaaaggctgatcgcacgtgcattttaaagcgttatcggagaaagatagaaaaaccgtccaacaggcgttttacagctcgattcctgttctggccgggtatctcattttgggcatgggcttcggtattctgctgcgcaatgccggatacggcgtctggtgggcggcggccatgagtctgttcatttatgcaggctccatgcaatatgtgggggtcgggctgctcagcggcggcgcctcgctgctgacgaccgttctcaccacggtcatggtgaacgcccgccacctcttttacagcatctcgatgatcgagacctacaaaaataccggaaaagccaagccctatctgatctttgcgctgacggacgagacctattcgctgctgtgcgacaggaagaccccggaaggcaccgacgggaaccggtatcgctttctgctgtctctcttcaaccacagctattgggtcgccggcagcatcctggggagtcttctaggcgcggccctgccgttttcgacagaggggatcgagttttccatgacggcgctgtttattgcttcgtttaccgaacagtggctgaacacaaaggaacatgtaccggcgctcatcggcttactgtgtacgctgttgtgtctgctggtattcgggccggagcgattcctgatccccgcgatgcttggcatcacgctggcactgacgctcctgcgcggacgggaggagagtgcggcatgagagcagcccttttgatcgcgaccatgtcgatcgtgacgatcggcctgcgagccctgcccttcctcgccttcaaaagtcggacgccgccctatgtggcctatctcggccgcgtgctgccgccggccatcatcggcatgctggtgatttattgcctgaaggatgtctcgcttttgtcgccgccgtttgccattcccgagttcctggcggtcgcctgcgtgatcgcggtgcaggtctggaaacgcaattcactcctgagcatcctcaccggcacggttgtctatatgcttttgattcagctgctgcattaatagcacggagcggggcgtgtgtgcttgacacccgcctatgattttcgctataatgtaggtaacgataattgacggttcagacaggatgccttcggccgctttgcgcataagagcatccgcaaagcgctcgggaccgaaacggccgacgccgcctgaacataaaagatcattgggacaggagacgctctcctgtcccgaaaaggagaaacctatgaacatcgttctgctgtccggcggatcgggcaaacgcctgtggccgctttccaacgacatccgctccaagcagtttatcaaaatcttcaagacccccgagggcgagcgtgagtcgatggtgcagcgcgtctaccgccagatcaagaagatcgacggcgacgcaaaggtgacgatcgccacctcaaagacccaggtttcggccatccacaaccagctcggtgagagcgtcggcatcagcgtcgagccctgccgccgcgataccttcccggctattgccctggccacggcctatctgcacgacgtgcagggcgtgggcgaggacgagagcgtggtcgtctgcccggtggatccctacgtcaacgacgactattttaatgccctgcggcggctggacgcgcaggccgcgaagggcgaggccaacctggtcctcatgggcatcgagcctacctacccgagtgagaagtatggctacatcatcccccaaagcaccgacgagaccagctttgtctccaccttcaaggagaagccggacgtggagaccgccaagcgctatatcgcccagggtgcgctctggaacggcggcgttttcgcctaccggctgggttatgtgctgcgcaaggcgcacgagctcatcgattttaccgactacgaggatctcttcgccaaatatgacacgctcacgaaaatcagcttcgactacgcggtggtcgagcgggaggacaagatccaggtccagcgtttctccggcgagtggaaggatatcggcacctggaacacgctgaccgaggccatggacgagccggtactgggcaatgcggtgctggatcgctgcgagaacgtctacgttgtcaacgagctgaacctgccgatcgtctgcatgggattgaaggatgtgatcgtctcggcttcgtccgacggcattctcgtatccgatgccgagagctcgagccgcatcaagccgatcgtggacaagcttgaccagcagatcatgtttgccgaaaaatcctggggcagcttccgtgtgctggacgtacagccggggagcatgacgatcctggccacggtcaaggccggtcagcacatgaattaccacagccacgagcaccgcgacgaggtatggaatatcatgtccggcagcggcagggtcatcgtggatggcatggaacgcccggtcaagcccggggacgtcatcacgatgcaggcgggctgccgccatacgatcttggccgataccgagctcaaggtgctcgagctgcagctcggcagggagatcagcgttcatgacaagcgcaagtttgagctcgagtactgagcgcgcgccctttctgctcgcgccgagcggcaaggactatctctggggcggcgagcgattgaacgacgattttaataaagatttcgactgctctccgctggccgagacctgggagtgctcgacccacccggacggggagagcgtcgtgcgcagcggcccctatgcggggctgacgctgcgcgagttgcttgcgctgcatccggactatctgggcacgaacctgccggacggcgcggagctgccggtgcttgtgaaatttatcgacgcgcggcacgacctttcggtacaggtacacccctccgacgactatgcacgcctccacgagcacggtgcgcgcggcaagagcgaaatgtggtacgtggtcgaggccgcgaaaggggcgcacctgatttacggcttcctgcacgacaccgaccgcgagacggtccgcgcgggcatcgccgacggcacactgctgcgccatctgcagaaggtcccggtgaggaagggcgacgtattctacatccccgcgggccaggtgcacgcgctcggcgcgggctgtcttgtcgccgaggtgcaggagagctccaatatcacctaccgcctgtatgactatgaccgtgttgacaaaaacggcgaaaagcggccgctgcatgtagagcgggcgctggaggtggcaaacctccgcagcagcgccgcaccgcgccagccgatggaagtcgtgcgctttcgccccgggacgatgatcgaactgctgtgtcgctgcccctggttccaggtg

SEQ ID NO: 2739 - DNA, 23369 bp, synthetic construct
  misc_feature 1..23369: note = Synthetic
  source 1..23369: mol_type = other DNA
gtgcagggcttcgtcgcgggcgtgaacgccgcgctgaagctcaagggcgaagagccgcttattctccgccgcagcgacggatatatcggcacgctcatcgacgaccttgtgaccaagggcacgaacgagccttaccgcatgatgacctcgcgcagtgaatacaggctgctgcaccggcaggataacgccgaccagcgccttgcgcatatcggccgccgcatcggcctcgtctccgagcagcgctatcaggcggtgctcgccaaatacgccgcggtggacgccgagcttgcccgccttgagcatactcacatcgccccaagcgcggagctgaacgcaatgctgactgcgcgcggcacagcgcaggcaaacaacggcatatccctcgccgacctcatccgccgtccgcaggtcagctatgcggacaccgcgccgtttgatcccgcgcggccgcagctcagccgcgcgatctgcgcgcaggtcgaaataaggctgaaatacgacggctatataaagcgccagctgcgcgaggtggaggagttcacaaagcttgaggttcgcccgctccctgcggatatagattatgacgacattcccggcctgcgcatcgaggcgcgcgagaagctgaaaaaaatacgccccgcgagcttcgggcaggccgggcgcatatccggcgtgtccccggcggacgtgtcggtgctgatgatatatgtggagagtaagaaccgatgaaaaaggtagttctgggcttttccggcggcgttgattccgccgtgtgttccgtgcttttaaaaagagccggatatgaagtatacggcctttatatggacaattccgatgaaaacgccctgaatgacgccgtgaaaacagcggaatatgtcggcatcccgctggaggtcgcagatgtacgcgcggagcttgagcggaatgtctgctcgccgttcacagaatgctatctccgcggcgagaccccaaacccctgcgtgatctgcaatccctccgttaaattcaggaccctctgcgacgcggcggacaggctcggcgctgaatttgtcgccacaggccactacgcccgcagtgagaacggcatgatattcaagggacgtccgtccaacgatcagacctatatgctctgccgtcttacgcgcgagcaggcagcgcgcgtcatcttcccgctcggcatgtacgaaaaggtgcagacgcgcgctatggcggaggaattcggactgcccgtcgcacacaagggcgacagcatggagatctgctttattcccgacaaggattatatctcatggcttggccgccgcaccgctctgccggggccgggcgattttatattccacggcgaggtcgtgggacagcatgatgggatataccgctacactgtcggccagcgccgccccggcatgatcgacgggcgcaaggtatatatctcccatatagacgtcgcgtcaaacacgatagagcttgcgctgtgggaggagcttttcaaaactgaggtcatcgcacgcaatttcaactggctgtgtgatgttcccgataggccggtacgcgcaagcgtgcgcgttcggcacacgaagtgggaaaacccgccctgcacggcgtatgttgacggcggaatcgtgcacataatatgcgacgagccggtgcgcgccccggcagcggggcagtccgccgttctttatgacggggaccggctgctcggcggcgggtttatcgttcaggaatagcaccgcatgaacgcagaccgctgctgccggccggcggcgcaaaaaacacggaggactcagatgagttctccgtgtttttttatcattataatatatgatgctgctattattatataggaatatgaaatcatgccgcggggcttggcgtgggctccgcctcagcctccgatgcgctgccgctgtagagctcgacgaactcctcaaggcagaggccgttgtcctctatataccttgccgcctcaatgccgacatagcggaaatggaacggctcgtacataacgccggtcacatcctccttgccgctcggaaagcggtggataaagccgtattccgcgcagtgctcaaggagccatttatacgtgtcggtattttcgatctcagagttcttgatctcgcggtaaacgtccgttatatcgcagctaagaccggtctggtgctcactgcatccggcgggcatcgtgatatagtgcccgttggaatccttgccgtcggacacgccgttattctggcacacgcgctggaagttcgcggcctgttcggaatagctgcggtagccggaggacagaaacaccggcagtcccgcatccttgcagccctttgccatgtcgagcagcgcctgtgcgatgcgctcatccaccgggcagcggttcgcgttgtatgcagtctgtatatccgtttcgctcgctgtctggttgagataggcaagctgcgccggttcatactggccgatcgaatgatccccgttcacaaggacatattcccagcttgtaatgtcaatatcaggcggagcgggcaggccgagctcggcagcctttgcctccggagatccgggctccggcgtcggctcgggagtgacctcgggcgtcggctccggcgtagattccgcctgctgttcctcagccgccgcctgcccggccagatgcgcatatctggggtcatccttgaaatattcctccagactcatgcccgaatcgagcaccgcctgcacttcgctgtatacgaaagcatggtcgctgtcaaaatcgcgtgttcttggcgagacgttgaagcgcataacgaaatacgcggcaaagatcaccagaaaaataacaccgaatactattctcaaaccacggctgcatttcatgtggtagcctcctgctgtatataaaacaattataagcccatttttctgcgcacagctgtacacagtatattatataatatcattttatatcagccgggtcaactccaaataatacacatgccaacaaatcccttgaaggcatgcgcgtcttctgatatactgttatccggaaccatcagttgaaaacaacaccggatgaagaaagaaggaatgactatgaagcttacatggtatggccactcgtgcttcatgctcgagtcggcagacggcagcatcgtttttgacccctactcccccggcagcgttcccggactcacactgcccccgctcacggccgacgaagtaatatgcagtcacggccatggcgaccacaactatactgccggcgtgaagcgcagcggcaggacgacttcattcagtgtcctccgtatagactgctttcacgacgaggtgcagggtctgaagcgcggcaaaaaccgcatcaccgctgtagacgccgaaaatatgcgtgtcgtccatctgggcgacctcggccatatgctgtcgccggagcagctcgaaaagctcggctcggtcgacgtgctgctgatcccggtcggcgggtattacacgatagacgccgcacaggctcacgcgctggccggggcgataaagccgcgcatcaccgtgccgatgcattatcgcggtgccggcttcggctatgatgtgatctctacggtcgacgattttgcggctctctctgagaatgtgaagcggcttgacggcagcgtgctggagataaccggcagcgagccggcaggaaccattatactccgctgtccggcagagctctgaatacgatagggcaaagcaccggcggcatgggctgattccatgccgccggtaaatctttttcgccgctctgctgccggacttcggagcatagtttcaaataaatctgacgtccccggctcaaatgagccggggacgctgtgctttattgctttattccggattattcgtagaggctcttgagcttcatcaggtgctcgtagcgtgcctttgcgttctcctcggattccgcaaacagaacgttcgctctctcggggaactcgcgggtcagacggctgtagcgcgcctcgttcatcaggaactcctgatagccgccagcgggctccttgctgtcgagcgtgaactgagactgtgcttccgggttgaagcggaagaggttccagtaaccgcacttgactgccttctccatctctttctggcagttctccatgccgcccttgatgctgtgcatctcgcagggagcgtagccgatgatgagagacgggccgtggtaagcctctgcctcggcgatcgccttgagggtctggaccttgtttgcgcccattgcgacctgcgcaacataaacgtagccataggtcattgcgatctcagcgagggacttggacttgatctccttaccggctgccgcgaactgtgcgacctgaccgatattggaggccttggaagcctgtccgccggtgttggagtaaacctcggtgttgaacacgaagatgttgacgtcttcgccggaggcaaggacgtggtccacgccgccgaagccgatgtcgtatgcccagccgtcgccgccgaagatccacatggacttcttgttgaggtaatccttcttgtcgaggactgccttaccatgctcgcagcaggcgcccttcgcctcaagcagggataccagacgctttgccggctcctggttggcgttgccgtcgttgtaggtgtcgaggtaatcctgagctgccttcttgatgttctcgtcggaggcgttctgtgcgatgtactcaacgtcgcccttcacgtcgtcacggatcttcttctggccgaggtatacgccgagaccgtgctctgcgttatcctcgaagaggctgttggcccatgcgggaccgtggccttccttattgacggtgtacggagaagtggctgccgggccgccccaaatggaggagcatccggtcgcgttggagattatcatgtgatcgccgaacagctgagttacaagacgtgcatagctggtctcggcgcagcctgcgcaggagccggagaactcgaggtacggctgtgcgaactggctgaacttgacgttgtccgcaacgaacatgtccttcttctctgcaacgtttgcgaccatgtagtcgaaaacttcctgctctgccagctggctctccatgggaaccatctctattgcgtgcacgccgcactggctgatgcagacgccgcagcccatgcagtcgagcggggagaccgccattgcgaacttgtactcgcccttgcccttgccgaccttgatgtctgccatcttggtctgtgcgggagcctttgccgcctcgtcagcggtgagcgcgaagggacggatggtggcatgcgggcagacgaatgcgcactggttgcactgtacgcacttctctgcatcccacttcgggacggagactgcgatgccgcgcttctcatatgcggatgcgccgagctcgaaggtgccgtctgcgtgatccacgaaagcggatacgggcagagcgtcgccgtccatcttgtcgacaggatcgaggatggagcggaccatcttgacggtcttgggacggccggtctcttcaacggtctcaacatgatcctcagcggtcttccaggattcaggaacctctaccttgacgtatgcggtggcgccggcgtcaatggcggcatagttcatgtcgacgatgtcctggcccttcttcaggtaggagtggagagctgcatccttcatgtacttgagagcgtcttcctcgggcaggacctttgccagagagaagaatgcggactggaggatggtgttggtgcgcttgcccatgccgatcttcttggcaaggtcgatcgcgtttatcatataaagctggatattgttgtttgctatgtagcgcttggaagccgcgtcgaggtggtgctccagctctgcgaaatcccactggcagttcacaaggaacactccgccgggcttgacgtcgcggacgatcgggaagtgcttggtgatgtaggaaggaacatggcatgcgacaaagtcagccttgttgatgtagtacgggctcttgatgggcttgtcgccgaagcgcaggtggctgatggtcacgccgccggtcttcttggagtcgtactggaagtaagcctgaacgaacttgtcggtgtggtcgccgatgatcttgatggagttcttgtttgcaccgacggtgccgtcgccgccgagaccccagaacttgcactcgatggtgccgggaacggaggtactgggcgcggggccttcctcgagggaaaggttggtgacgtcgtcgacaatgccgatggtgaactggcgcttcatctcgtccttcttcagctcgttgtagacagcgaacacggaagcgggaggcgtatccttggaaccgaggccgtagcggccgccgatgacctgaatgtcgttcctgccggcatttgccagagcggtcatgacatcgaggtagagaggctcgccctgtgcgccgggctccttggtgcggtcgagcaccgcgatcttctttgcagtcgcggggatggcggccagaagcttgtccgggcagaacggacggaacaggcggaccttgacaaggccgaccttctcgccctgagcggtcaggtagtcaatgacttcctctgcgacgtcgcagatggagcccattgcgatgatgacgcggtcagcgtcgggagcgccgtagtagttgaacagctggtagtctgtgccgagcttggcgttgatcttgcccatgtactcctcgactattgcgggaacagcctcatagtacttgttggaagcttcacggttctggaagaagatatctccgttctcgtgagagccgcgcatggtgggatgctcggggttgagggcgcgctcgcggaatgccttgacggcgtccatgtcgaccatgtccttgagatcctcgtaatcccagacctggatcttctgcagctcgtgagaggtgcggaagccgtcgaagaaattgaggaaaggaacgcggcccttgatagccgcaagatgtgcgaccgggctgaggtccattacctcctggacgttggactctgcgagcatggcaaagccggtctggcggcaggccataacgtcgctgtggtcaccgaagatgttcagagtgtggcttgcaactgtacgcgcggacacgtggaacacgccgggcagcagctcgccagcgatcttgtacatgttcgggatcataagaagaagaccctgggacgcggtgtaggtggtggtcagggcgcctgcgttgagagagccgtggacagcaccggctgcgccggattctgcctgcatctcctgcaccttaacggtggtgccgaagatgtttttccttccggcagcggcccactggtcaacatagtcggccatggggctggaaggagtgatcgggtagatagctgcgacttcagtgaatgcgtaggatacatgggcggctgcattgttgccgtccatcgtcttgaagtgtctctgcatgtctatattcatctccattaaaaaattgacttgcgctttgtccatacagacatggttatattaacattaaattgtcagattgtaaaccgtcagtaagtataaatttattgtaaaatatcacgaatttgggaataccggcttttgggtctgtgaaacgggaaaaattgttgaaattgcacgcaaaattcaaccaaatttgccttgagcttttgaaaagactgtattataattgataatcggctttgtatgtgcagttcacgtctttttttgcggcgcataccgggtcaatctgactgaaaggagctgtacagtatggtgaatatcataaacagcagcggaaagataagcataaccgatgaggtctttacaaaccttgccggagacgccgccacgagctgtttcggcgtcaagggtatggtcacgtgcagcaaggagggcggcccatggcagcttctgcgccgcgaatccatgtccaagggcgttgtcgcgcacatgaatgacgacggcaccgtttcccttgagcttcacataggcgtggatcacggagtcaatataagcgcagtgtcacgcagcataatgaatgaagtcaaatacaaactcaccaaatccacgggtgttccggtaaaaagcgtggatgtttatatagatacgattatcggataagctccggaggtaagttgctttgaaagaatatattgacgccgccgcgttcaaagagatgatactgtgcgcggatgcggcgctccatgcgaatatacagcagataaacgagctcaacgtgttccccgtccccgacggcgacaccggcaccaacatgtgcctgacgctcaacaacgcggccaacgagctgcgcaagaagaatttcaccgctatcgacaaggccgcggactgcgtggcctccgccctgctgcgcggcgcgcgcggcaattccggcgttatcctgtcccttctgttccgcggcatatccaagcgcctcaagggcatcgacaccgctggtcccgtggagtttgccggcgcaatggccgacggcgtggactccgcgtacaaggcggtcatgaagcccgcagagggcaccatactgaccgtctcccgtcttgcatccaacgccgccgtcgaagcggccgatgccggcgcaagccttgagaacatgttcgtgtgcgcgatcaaggccggagaggaagcgcttgaggacaccatcaatctcaaccccgtgctgaaaaaggccggagttgtagatgcaggcggcaagggctacatgaccatactcggcgcgatgctcgcatctctgcggggcgaggtagtttcctccgcgaacgccgttgaggtcagcgccccggccgactctccttttgatgttttcgacaccgaagagataacctttgcattcgacacggtgtttatcgtgcgcaagaacgatcccgacgtggatcttgacccgtaccgcgctttcctcaacagcatcggcgacagccttgtgatcggcgaggacgacgaggccttcaaggtgcatgtgcacaccaacactcccggcgatgcgctcaacgaggcgcagaagtacggcacgctggagcttgcgaagatcgagaacatgcgcacgcagcatgacgacatagtggccggccgcaaggcccagaccaccgacgatctcgaagccatcgaggaggagcttgaaaacggcggcagcgctgtcgcggctcccgaaaaggaattcggcatcgtcacagtctgcgcaggagacggcatggccagtctcttccgtgagctcggcgccgacgcgatagtcaccggcgggcagaccatgaatccctctaccgacgacattctccgcgaaataaaccgcaccccggcctcgaccgtgttcgtcttccccaacaacaagaacatcatcatggccgcagagcagtgcatacccatgaccgagaagcatgtcgtcgtcatcccgacaaagaccgtgccgcagggcgtgaccgcgcttctcaacttcaatcccgaggagtccgagcaggccgttatcgacacgatgctcgaggccgtcggcaatgtccacaccgcaatggtcacttacgccgcgcgcgattccgactttgacgggcatacgatccacgcgggcgaatacctcgcgctgctcgacggcgcgctgctcggcagctacaccaatattaagacgctcttcaaggaactgagctgggcgtttgacgagttctcgccggagttcatcaccgtgtattacggcgcagacgtacaggaggccgacgcgcaggatgccgcaggcacgatcaccggctgcttccccgacgctgaggtcagcgttgtcaacggcggtcagcccgtgtactattatatgataagcgtggagtaagaaccgtatatataaatatcatccggcgagatgtgaggcttcatatcccgccggattttatactgcctataattcccgtgctctggagcagtgcagcataaccaacaaatatcgtatgcattgcttgtcaagaacagacaaaaagtgcttcctgctcctctctctattgacttgttccatcatttggattatactttaatcagttcttataccataccaagaactattcaggttactatgataaggtagtaaaccgaagagctctaatgcctcgcctcgtgcggggcattatctctatccgccgaaaaacattatcatcattacattattggcattataagttaaaacagaagtgggaggtcaaagatatgcaccaatatgcaatagggctcgatataggcattacttcggtcggctgggcggctcttgcactggatgccgacgaaaatccatgcggtatactggatttcggctcccggatatttactgccgccgaacagccaaaaaccggcgcttcgcttgccgcgcccagacgcgaggccagaagcgcgcggcggcgtttacgcagacatcgtcaccgtaatgaacggatacgtaatcttatagtctcgtcaggacttctcagcaaggaagaactctcacagctgtttgacggacaattatcagatatatatgctgtgcgcgtaaaagcgctggatacatccgtctcgcgcagcgagcttgctagaataatgctgcatctgtcacaacggcgtggcttccgttccaaccgtaagggtgaatcagatcaggaggacgggaagctgctggcagcggtgaacaaaaacaaagagcgcatgggcaaaaacggctatcgtaccgccggagaaatgttcctaaaagacccgctttttgctgaacacaagcgcaataagggtggaaattatattgccactgttactcgtgtgatggtcgaggacgaaattcgcaaaatattctccgctcaacgcaactatggctctgaatttgcctctgccgagctcgaaaatgcctatctcgaaatacttctcagtcagcgctcttttgacgaaggtcccggcggcaacagtccttacggcggcagccaaatagaacgaatggtaggtctctgtacgcttgagcctgacgaacctcgcgctgcaaaggcttcatattcatttgaatacttcagcctgttggaaaaaatcaatcatatacggttgatccacggcggggagagcacgcctcttactgacggtcagcgcagaaccctgatagagctcgcacacaagtcggacacccttagttacgcaaagatccgcaaagagctcaacattcctgccaatcacacgttcaatatgattcgctataagacggacgtccctccggaggaagtagaaaagaaggaaaaaatcgtctgcatgaaagcctatcatcagatgcgcagggctgtggatcgagtagccaagggccgttttgccatgctgagcaatgaacagcgcaatgagatcgccagagtgttgtccctctataagaccggcgagaaaattgagcgcgctctcaccgaagccggaatagaaccttgtgacattgccgaacttgaaaccctgagtttttcaaagttcgggcacctttccgtaaaagcctgtgacaagctcatcccgttccttgaaaagggcatgaattataacgacgcctgcaccgctgctgggtatgactttcgcgcacatagtaaggatgggcgaacgctgtaccttcctccgcttggagacgactgttatgaggttacaagccccgtcgtgcgccgcgccatatcgcagaccataaagatcgtcaacgctatcattcgccgctacggccatagcccagtgtatgtaaacatcgagcttgcacgcgaaatggcaaaagattttgccgagcgcagcaaactgaaaaagcaaatggacgacaaccagaaacaaaacgagcgcatgatgcagcagatacgtgaatacaagcacggtgcgcccaccggaatcgatcttgtaaaattcaagcttttcagtgagcagggcggcgtatgtgcatattcacagcgtcagatgtcccttgaacggctgtttgaagacaattatgccgaggtagatcacatcatcccatacagcataagcttcgatgacagctacaagaacaaggtactcgtacttaccgaggaaaatcgcaacaagggcaaccgcctgccgatgcagtatcttaccggcaaacgtaaggacagtttcgtcgtttgggtaaatgcctgtgtgcgcgattaccgtaaacgcagactgctgctcaaggaagcctataccgccgaggatgaggcaaacttcaaggaacgcaatttgcaggataccaagacgatggcgcgcttcatgtacaactacataaacgacaacctccaattcgatccgtcgtttaccggccgcaaaaagcgcgtgaccgcagtaaacggagccgtcacggcatacatgcgtaagcgttggggtatcagcaaggtgcgcgaagacggcgacaggcaccacgcagtagatgccgtgataatcggatgcacaacagatggcatgatacaaagggtatctcgctatgcctcgtggcatgagaaacactacatgcgcacagaaaacggaagcatcctcattgaccccaacacaggcgagataaaacaggagtttccatatccgtggccatggttcaggaaagagcttgaagcccggctcagcaatgatccttcacgcgcagtggcggatctgaagctgccattttatatggacgatgatgccccacacgtcaggccgctgttcgtatcacgcatgccaacaagaaaagtcacaggagctgcacacaaggacactgtgaaaagtcccaaagctctggatgaagggtacactatcgtaaaacgtcctctgacctcactgaagctcgacagttccggcgagatttcaggatactacaagcctgaaagcgaccgtttgctttacggggcgcttaagaagcagctggccgagcacggaggtaccggcgcaaaagcatttaccgaacctttccgcaaaccgaaaagtgacggaactcccggccccatagtgaacaaggttaagcttctcgaaacgactacgctgaccgttcccgtgcatgatggctgcggtgctgccgacaacgattcaatggtccgtatagatgtgtttcatattgagggcgacggatattatttcgtcccgatatatgtcgccgatacgctcaggcccgagcttccaagcaaagccgtagttgccgccaagtcttatgaggaatggaaagacgtgaaagatgaggattttattttctcgctttatcctaacgatctggtcaaagtaaaacaccgcaggggaatgaagctctcaaaggtctttcccgaaagcactctgccccccattctggaatgtaaagaatccatgttttactatatcagctcttcaattgcgaatggtacagttcgtttcataacaaacgataacacctatataatacaaagtctcggcctaaagacacttgagagcatcgaaaaatatactgtggatgtgttaggcgaataccacccggtaaggaaggaaaaaaggcagcgttttgatataacgaaaggctgaattatggctttcagaaatattattatcgaaaaccccgcccgcatctctgtcaaaaacgaacagcttgtaataagcaccggcagcgaccattcgctttctcccgaggacatttcctccattctcatagagagccgccaatctacaataacaacagccgcactgtcccttttggggcagcgcggctgcgcggtttttatatgcgacgaaaagcacatgccatgtgccgtgcttaattcatactgccagcacagccgccagctgccgattcttgaaagtcagctgaactccggagaagtactcaagaaacggatgtggcagcgcgttgttactgcaaagataaataatcaatctgaatgtttgagaatatgcggaaaaacagatgaagcaaaagggctttctgcaatggcagacaccgttcgttcgggcgacaccggaaatgttgaggctgccgcggctgcccgatactttcccgctctcttcggtcgcggttttacccgcagtctggtgaccggtataaattccgccctcaattatggttatgccatactccgtggctgtatggcacgctatcttgcagtatacggttttctccccgcctatgggctgcatcataaaagcgaactcaacagctttaatcttgccgatgatatgatggaaccgttccggccggtcattgatctcatggttttttcaatgatcgatgaagctgacgatctcacaccggataaaaagaggcttctttttaactgtctgaatctcgatgtccgttccggcggtcaacggcactccgtcgcctatgcaatggagcgcacagtacacagtctacagcgttcattcacaaccggagaagcaaagctcattcttccggagcttcttgaactgaagcagcacagctatgaataaatttatgagaataatggtgttttttgatctgccggtgcagacaaaacgacagcggcgtgaagccacacgcttccggaattttctcctgacagacggctatcacatgatacagtattcggtatacgcccgtgtctgcaacggagccgatgccgttgaaaagcaccggatgcggataaaggacaatctgccagacaacggatcaatacggatgcttgtgataaccgaaaagcaatatgagtccattgatattctgctcggaaatctcacgcaggctgacgacagttttcaatgtgaacagctctcaattttctgaaatttttaaaaacaaaacctgccctaaccattgtagggacaggttttgtctgatagtctattataccataccaagaactatcagggaactataaccagaagtagctcaactgctttccgagggctattataccataccaagaactatcagggaactataacgcgtgggacgttgaagtctggggcaaaactattataccataccaagaactatcagggaactataacaacgtaaatctgggtgtagtcggcgatgttattataccataccaagaactatcagggaactataacttgataatgccgtttataacgtcgttgcctattataccataccaagaactatcagggaactataacaacaacgtggttttctgtgtggacaaccacattataccataccaagaactatcagggaactataactcctcgccgcgtcatacggctacggcgctgattataccataccaagaactatcagggaactataaccattctttgtgtcgaaaagacgttcctctgattataccataccaagaactatcagggaactataaccatagacttttttgatattgtgtggtaattattataccataccaagaactatcagggaactataacgcgcgcgacggcatcgtcgacgcgagcgagattataccataccaagaactatcagggaactataacagatcggcagctccggcgatgacgcgcagaattataccataccaaagggcagcagaaaatcactattttcattccccgctctttttttccagcgcctctatgcggcggcgcagacagtcgagctcgtcggtcatcgggtcgcggacactgatctgatcgacctcggtcgcataatccaccttctgtccggctatgcgcacgacccttgccgggatgccgaccgccgtgctgtccggcgggacctcgctgagcaccacggaatttgccgcaatgcggctgttgtcgccgaccttgaacggccccagcaccttggctcccgtgccgatgagcacattgtttcctatcgtcgggtggcgcttaccggtgtccttgccggtaccgccgagcgtgacgccgtggtacagcaggcagtcgtcccctatctccgccgtctctccgatgacgatgcccataccgtggtcgatgacaaggcgcttgcctatcttcgcgccggggtggatctctatgcccgtacggtgacggctggcctgagagatcatgcgggcgataaacttcatgttgtgctcgtaaaaccagtgggcgcggcggtgactgcgcgtggccttgaggccgggatagaggaaatagacctccagcggacttcgcgccgcgggatcacgcgccatataggcctgtatcgtttctttcagatccttaaacattatataaaaactcccattttcaaacataaaaaaacgcggcgcatcacgccgccgcagcataacaaggcaagagcgctcacaggctctcactcacaacagcgacagcgacatcgtccgcaacagatacaacaacacgctgcacacttcatcatcactgccacctcatcaattcctatacaaattaaaggtttaccctctacctgcataatacgcggcagagggaattttgtcaatagccgtccggggtattacttctttggaaaatccacgaccttcttctgaagcttgtgctttttgccgtccggggtcacaatataggtgttatccagcagctctatcgtgccgcgccgccactcctcgatatattccctgcgcagcactgcgcgctctgcggtctcctcctcggtcagctcgcgcagctttgcgatagccgccagctcgtttatacggtcaagctttgtcttttccattcttatcgctcctctatcgttccgagttcatccagcgtcagctcaaaagccgggatgaaatgctcaaggaaatatttcacctcaggcaacgggcttgcctcaagctgcctgcgcgtctgcttctccgccgcgctgaactcgtcgttccccgcgcggcgctcctcgatgcattttatatacgccgagagcttgtcggcagcctttactatgtcgtgcacgcgctcctgcgtctcgcctgtcaaaagcggctcaaacgcgccgcgcagctcatccggcagcgtgtccagcagctttgtgcatgcgacgtcctccacctgcttgtatgcgtcgcgtatatgctcgttatggtattttatcggcgtgggcaggtcgcccgtcagtatctccgagcagtcgtgatacagcgcgactgcggcgcactcgttcgggtcacatggaacgccgtatacgtcgcggcggatgaccgccagcgcgtgggcaatgacggcgcacatgtggctgtgctcctgtatgttctccggcatggcgttgcgcatcaggctccagcggccgatatagcgcatacgcgagatataggcaaaaaagttatcgggcatgattctctcttttctttcaataaatatcatatggataataccacgattgcagactcttttcaaccgtggtattattatgccgcatcatatttcaactcaaaggagcggcggccatgtacaacggcataaagatcatcgatgcgcacactcacaatgcgcagcagttcgaccctgaatattttgcagcctttctcgcccgtaccggcacggacgccgcctgtgtaaacacggttgcgcacagccgctgcatatcgctcacgccgcaggcgctggcgcttaaagagctcttccccggccgcttctacgtgttcggcgggcttgatatgagcgaatattacctccaccctgaaacgctcggcgagcatatggccgcatacgggcgcagactgctcgagatgggctgcgacggcatcaagatgctcgaggggaagccgcagatgcggaaaatgtaccccataccggactttgacgcaccctgctgggagccgttctgggcgtgggccgaggaggccggcataccgtttatgtggcacgtaaacgacccggagaatttctgggaccgcgagcatgccccggccttcgccgtcgcacagggctggctgtatgacggcagctatgtcaacaacgaggcgcagtacgcacaggtgctcagcgttctggcccggcatccgcggctgaagctcatcttcgcgcacttctttttcatgtcggcacagctggaccggctcgccgggatacttgagcgcttcagcggcgtctgcgtcgacctcacgcccggcatcgagatgtatgaaaacttctctgccgcccccgatgcgtcccgggcgtttttcgaccgcttccacgaccgcatcctctacggcaccgacatcggcgggcgctgcatcctgatgggcgagcacaaggagttcgacgaggcggagaacctgcgccgtccggagatcgtgcgggaatttctcacgctcgacggcgaaacggagatcgcctccgacgggcattttctcatcggccgtcccacgttcacgatgcgcgggctcgggctgcgcggcgacaggctcgcagagatcctcggcacgaatttcacccgcgccgccggaacagcgccgcggccggtctgcggcggggccgtgctggccgaatgtgcgcggctgcggcggctcatgcccgttctcggtgcaaaattgcccggtttcgtcccggaattctccgttatagagtacgccgagaagatttttgcaaaaaaaatgagataaactgcgtgctttctgttgcaattttggcccgcaggtgctaaaatccagttttgtgttgaaaaataaggacataatctttttggagctgccagacttttgataaacgacgggcagttccgttgataagggagcgaattcaaattggataaactcagaaatgttgccatcatcgcccacgtcgaccacggcaagaccactcttgtcgatgagctgctcaagcagtcgggcgtataccgcgagaatcaggagatcgtcgaccgcgtcatggactccaatgaccttgagcgcgagcgcggtataaccatcatggcaaaaaacaccgccgtatggtacggcgacacgaagatcaatatagtcgatactccgggtcacgccgacttcggcggcgaggtcgagcgtatactcaagatggtcaacggcgtcatcctgcttgtcgacgccgcagaaggccccatgccccagacccgcttcgtgctcagccgcgcgcttgagctcggccaccgcgtcatcgtcgtcgtcaacaagatcgaccgcccggatgcgcgcatccacgaggtcatcgacgagacgctggagcttctgatggatctcaatgccacagacgagcagctcgactcccccatgctcttctgctccggcagaaacggcaccgccagctactctcccgacgtgccgggcaccgatcttgagcctctgttcaagaccattatcgactacatccccgcgcccgagatggacgagagcaagccgttccagatgcttgtgagcagcatagactataatgaatacgtcggccgcatcgccatcggccgtatcgagcgcggccgtataaagcagaatgacgagatcgaggtctgcaactatcaccggcccgacgacgcccccaccaaggccaaggccgtctccctgtacgagttcgacgggctcaaccgcgtacccgtgaccgaggtcggcgccggcaacatcattgcgatgagcggcatcggcgacgtcaccataggcgacaccatatgtgcccgcggctctgcggagccgctgcctttcgtgaagatcggcgcgcccactctggagatgaccttctccgtcaacgacagcccctttgccggccgcgagggcaagttcgtcacttcccgccagatccgtgaacgcctcatgcgcgagacgctgaaggacgtctccctgcgcgtgaccgacgtgcctgacagcaccgacagcttcaatgtcgccggccgcggcgagatgagcctttccattcttatcgagaccatgcgccgcgagggctatgagttccagatctctcccccgcgcgtgctgtatcaggagatcgacggcaagagatgcgagcctatagagcgcgtcgtcgtcgacgttccgagcgagtacatgggcgcagttatggagaagctcggcgcgcgcaagggcgagtttatagagatgacgcccgtcggcaaccgtataaagcttgagtttctcattccctcccgcggtctgttcggctacaggaacgagtttttgaccgacaccaagggcgaaggcatccttgccagcgtttttgagcgctacgaaccctataagggcgacatttcccgccgttctaccggctccctgatcgcatgggaaaccggcgaagccgtggcctacggcatatggaacgcacaggaccgcggcgcgatgttcatcacgccgggcaccaaggtctacggcggcatggtcatcggcgtctgcccgaagagcgacgacgtgcccgtcaatgtctgccgcacaaagcacctcaccaacacccgtgcctccggctccgacgaggcgctgcgccttgtcccgcccaagcagctgagccttgagcagtgccttgagttcctcgccgatgacgagcttcttgaggtcactccgaagagcctgcgcctgcgcaagcgtatcctcgaccatagtctgaggatgaagaatgtgatgaaaaacagataaaatataacggcgtcccggcttatccagccgggacgttttctatcggctgctatgctatgagccggcccgtattgcgcgcgttaaatttggccgttcggcggtttttgatattgccacgcagacacagtgtgtgttattatgccggtagtccgcagcctggactatagtataaattttcttacgaaaaagcatagcgattattaagataaggaggacggataatgataattcaaaagcccgcgatggcgggcacactggaatccagcgacgcgcaggtaacggtcgagcccggcacgaacggcatagagctggtgctcaaaagcagtgtcatgaatcagtatggccgccagataaaggagaccgtgaaggccacgcttgcagatctcggagtggaaaacgctgtcgttaccgtcatagataagggcgcgctcgactgcacgataaaagcccgcgtggagtgcgcggtattccgcagctgcggcgccgcggcggaaaacgtcccgtggggaggtgccgtgaaatgataccacgtcccagaccagaacgcttccgcctgcgccggacaatgatgttcatgaacgcccagaagcccggtcttataaaagacgcctatatatacggctgcgactccatcatactcgaccttgaagacgccgtcgccgaaaaccagaaggacgccgcgcgcttttcgctctaccacgcgctgaaaaccatagactacggcgacacggaggtcatcgtgcgcataaacgggctcgacactccgcactggcgtgaagacatccgcgtttccgttgcaggcggcgcagacggaatacgcatcgcgaagtgtgagagcgcgcaggacataaggaccgttgaagacgcggtcgaggctgccgagcgcgaattcggcgttgagattggcaggacgctgctcatggcggcgctcgagagtcccaagggcatactcaacgcctacgagatatgctctgcgtccgagcgtatgttcggcgtggcgatctccggcggagacttccgcaaatgcatgcagacaaagttccagccggacggcgtggacatgctcgccgcgcgcgggcagatgctgctcgccgcacgcgctgcgggtatacagtgctttgacaccgttttcaccgatcttgacgacgaagagggcttccgtgcagaggtattgcagaacaaggccatgggctttgacggcaaaagcctcataaatcccaagcagatccgccttgtccatgagatattcgcccccacggagaaggaggtcgcgcaggcggaaaagatcgtgcgcgcataccgcgagcagtccgacgcgggagtgggcgtgttcaccgttgacggcaaaatgatagacatcgcatttattcccggtgcggagcgcacgctcaggctcgcacgcgcctgcggtatgtacaaaggagatctggtatgaaaaattttgtcggacgcgatatacccgatgagcttcttgtcgaaggcaaggaggtatatcagggcaagtattatatggacggcaagtatatgcagaaggccgccccgaggacgcgcatttatgaaaagccgcaggagagcaagctcgtcgctaccattgccgaagctctccggcagtgcggtgcaaaaaacgggatgacgttttctttccaccaccatctcaggaacggcgattacgtcaccaacatggtcatgcaggccgcgatcgaagagcttggactggaggacatcaccattgccgcctcctcgctcggcgaagcgcacgacccgatcgccggatacattgagctcggcaaggtcacgggcctgcagacctccggcatacgcggcagaataggcgaagtcgtctccgcgggcaagctgaaaacgcccgcgatcatccgcagccacggcggcaggccccgcgccattgaggcgggcgaggtgcatatagatattgctttcgtcgccgcgccgacgtctgactgcgccggcaactgccgcggcaccggcggcaagagcaactgcggcagtctcggctatgccatgacagacgcgaagtacgccgaccacgtcgtcgtggtgaccgactgtctcgtggattttcccaactatcccgcctccatcgaggcgatagatgtcgacgccgtcgtcgttgtcgactcgataggcgacccaaagaagattgcctccgccgccgcgcgcatcagtcagaacccgcgcgacctgatgatggctgaaaacgtcgcaagagtcatcgccgccacgccgtatttcaaggacggcttctcgttccagaccggtgtcggcggtccgtcgctcgctgcgaacctcttccttgaaaaatacatggatgagcgcggcataaagatgggctgggccataggcggcatatgcagcgtaatggtcgatcttcttaaaaagggcaaggtcggcaaggtcatcgacgtgcaggactttgacctcgaagccgtcaactccatcaaccggactcccggtcattttgagatgagcgcctcgcagtacgcgaaccccgccaacaagggcgcgttcgtcaacaagctcgactttgtcgtgctcgcggcgctcgagattgacacggatttcaacgtcaacgttctcaccgggtccgacggcgtgctgcgcggcgcgcccggcgggcatcccgacaccgccgcgggcagcaaatgctgcatcattgtcacaccgctcacccgcggccgaatggcgaccgtgtgcgagcatgtcgtcaccgtcaccacccccggcgactgcgtggatgtgctcgtcacagactacggcatcgccgtcaaccccgcgcgcggcgatcttataaagtgccttgacgatgcgggcatcgagcacgtcagcatcaaggcgcttcaggaaaaggcatactccctcgtcggcacgccggacgatctggagtgggaggacaaggtcgtcgccgtgctcgaagcgcgtgacggcaccatcctcgacgtcgtcagaaagattaagccatatatttaatacagctctccatctttcaggggagcggcatggagaggcattatcttggaatacagtgtaagcgagatcagaaaatgggaccgggccggaatggcgcagtgggaaaggctgcttcaggccgaagggct

SEQ ID NO: 2740 - DNA, 23309 bp, synthetic construct
  source 1..23309: mol_type = other DNA
  misc_feature 1..23309: note = Synthetic
attctcagaaatcttgacgcggcaaaagagctggatatacccatttgtcaggatacgggaatggctgtggtttttattgaactcggacaggacgttcacgtcttcggcgaggatatcaacactgccgtaaataaaggcgtagccaaaggttatgaaaaggggtatctcagaaagtctatcgtcggggatccgctttgcagagtaaacaccggtgacaacacccccgcggttatccatctttccgttgtgccgggagaacaggtcggtataacagttgctcccaagggcttcggaagcgaaaacatgagtgcgcttcggatgttcactcccgccgcaggtgttgaggagataaaaaaatacatcgtctccgttgttaaaaatgcaggctcaaatccgtgtcctccggttgttttgggtgtcggaataggaggagattttgaatactgtgcgtaccttgcaaaaaaagccctttgcagagatgtttccgtgcgcaatcaaaacgaattttataaaaaacttgaggaagagctccttcggaaaataaacgaactcggaataggtcctcagggattcggaggccataccaccgcattggctgtaaacattgaatatgctcctacgcatatcgcaggacttcccgttgcggtgaatatgggctgtcatgttacaagacatgcatacagggtcatctgatacaaaaatattgataaaaatttgtcacattttacaatgtgaacgatgactcatttatgctaatatatatattgttttttttacggataggtaagattattgatgaacataaattttgttgtcccgtgtcttatgggactggaatcgcttattgcggacgagcttcgtgaaatcggcgcagaaaacgttgaagcgcagaacgcacgcgttcttttttccggtgacgagcatattcttgtacgcgcaaacatctgccttcgtcacgccgaaaggattcagatccttgtgggctcctttaaggctttatcctttgaagagttatttgagggtacaagggcgcttccctttgaggactggataggaaaagatgacgctttccctgtaaagggctactcgctgaattcgaaacttttctccgtcagcgactgtcagtccataatcaaaaaagcggtcgtcgaaagacttaaaacaaagtataaaaccccgtggttttccgagacgggagcgaagtatcagatacagttctccataatgaaggacgttgtgactatcacaatcgatacctcgggtgcggggcttcacaagaggggctacagactcagcgcaaacgaggctcccataaaggaaactcttgcggcaagtctttgctcacttgctcgtgttcgaagctatcacactctttatgaccccatgtgcggctcgggaaccatactcatagaaggtgccatgaaggctctcggtatagcgccgggactgcagaggacttttgccgcggaacagtttgcgtgtattcccgcagaggcctgggccgaagagagaacgcgtgctcaggaccttgtaaactttgattgtgactttagggcgtacggcagtgatatcgacaaaaacagtcttgaaattgccagggaaaacgcaagacgtgccggagttgacaagagaattgagtttgagcttcttgactttcatgactgggagggtaaaaccgaaaagggcacggttatctgtaacccgccgtacggtgaacgccttcttgacataaaaacggcaaatgacatctacaaaaccatgggtgagaagtttgtcagtaaacgcggctgggcttattacgtcataagtccttcggaggactttgaaaggttgttcggaaaacgtgccgacaagagaagaaaactctacaacggtatgataaagtgccaggtttacatgtactttaagtaaaaaaatttttgacataaaaaatcaaacagaggagaataaaaacatgtcattatttacaaaaatcgaaaaagaggtaacaaaaatcgaaaaagaggttgaggaaatcaaagaaccttccctcaagcactactttgttgttaatccgacagccggtaagggtcttaagtcaaacttcgtaaaagaagttattgagcctgcttgcataaagaagggtgtagactttgaggtttattacacaaagggtccgggagatgcaattgattttgtaaatcagacagcatccgacggaaagccggcacgtttctatgcgtgcggcggtgacggaactctttacgaggttgtaaacggtgcatacggacatgaaaatgctcaggttgcagttgttcctctcggttcgggaaatgactggacacgtcttttcggtgaccttgacgtgttccttgatatcgagggtcagattgacggtacgcctataaagatcgactgcataaaagcaggcgatgagattgcaataaaccaggcttccatgggctttgatgcagacgcttgtgctgttcagggtcagatgaagaagcttccgggtgttgccggacatctttcatatctcttcggcggactttactgcatgttcaagcacgtaaagaattattatgaagttacaatcgacggtgaaaagattgggggctcaccgtacatattcgttgttgcctgcaactcacgttggtatggctcgggtgttcaggttgcaccatttgctatgatcgatgaccatttactcgacgttgttataatgaagcgccgtatgccgtggatttgtatgtttaaggttatgcttaccgactggcagaccaatgcaacacacgttcatcacaggaattgtatgtatcttcgcggtaagaaaattgaaatccatgactgcaagatgaagaacaatcataccaacattgacggtgagtgccacagaacaaacgaccttaccatcgagcttatcgaggacggtcttaccttcaacgttcctgcaaagtcaacatactttgaggatattgagagcggaaagataaacggagatatcgttattgacaagagaaagttcttcttccagagaggcgtattttaatccgctcctgaactttatccgcgataaacaacagaatcaataataaaaaaataattcgcctcataatatggttatgaggcgattatttatgaataaaaacgatggtctgacccaaacaaaatcacattttacacctataaaggaaatcatcatttcactttcattggtttttataccgatgcttgttatcctgttttttattaattctttttctgcgtcaaagcttgtgcagagtacgacaaatgggacatcccggactgttataatagatgcgggacacggcggtgaggacggcggagccgtcggaaaaggcggtgtggtcgagaaggatatcaacctcccgatagcgatgaagaccgccgagtcgctcaaaaagagcggatatgacgttgttctgacgagagatggcgactacgccgtgtattcggaggaagcaaggaccttaagagagaaaaaggtctcggatattcacaacagatttgctataatagaagacagcggtgactgtatctttgtgagtatacacatgaatcactttgacagcgcatacgtctgcggtgcgcagaccttttattcgggtaacaatcccgaaagtaaaaagcttgcggattcggtgcagtcagccataaagacattggttcagcctgaaaacgaaagagttacaaaaaaagcgacaagcagcatctatctgctttattatgcacaggtgcctgccatcatggttgagtgcggatttatttcaaatgaaaatgaggccgccaagcttcaaacgaccgagtatcaaaatcaaatggctgccgccatcgccgaggggataaaccattattgcaagggcttaaaataagttgtttaactcaaacggcattgtcttttacttagcttacgcattattctcttaactcaaacgacattgccttttgcttggcttacgcatttttttcagaactttaaaatgcttttctttagtctgaaacaagtgctttaagcaaaagaggtcgaaaaaaataggcgccgcaaaatacaatgccgttttcgttttcaaagataatatttttgcttgacttgaagttttattttaactcaaacgacattgccttttgctggtttttgcatttttttcagagctttgaaacaattatttttattctgaaacgaatgctttaggtaacagtggtcgaaaaaaataggcgccgcgaaatacaatgccgttttcgttttcaaagataaatatttttgcttggcttgtgcattattgttttaactcaaacggcattgtcttttgcttggcttacgcatttttttcagaactttaaaacgcttgtttttgttctgaaacaagtgctttgagtggcagaggtcgaaaaaaatagaaaattttattataaaaggagtataagatgtcatcaaaaatcaaaagcgtttttgtctgtgaaaagtgcggttatgaaaatccgaagtggtatggacgctgtccgcagtgcggtgagtgggactcacttacggagcatgttataaatgacgagccggcagccatttccaagcttattaataattccggtaaaaggggagttgttcaaaaggtttcggagatacaggcggacggtgaacacaggtatatgacaggtctttcggaatttgaccgtgtcctcggaggcggaattgtgaagggctcacttgtgcttttgtcgggtgatcccggtatcggaaaaagtacgattcttttgcaggtatgccagtatctcggaagaaatcttaaaatactttatgtatccggtgaggaaagcgctcatcagataaagcttcgtgcggacaggctgggcgtaaatactccgaatcttttcatcatgagtgaaacggatgttgaggtcatctgtgagcagataaaatcggacaagcctgaccttgttatcattgactccattcaaacggtgcttcttccggaactttcatcttccgctggaagtataacacaggtacgcgagtccacaaactttattatgagaaacgcaaaggaccttaacataccggttatcgttgtgggacacgtaaacaaggacggaaatatcgccggtcctaagattctcgagcatattgttgacgcagtactttatatcgagggggagaggaatttctcctaccgaattctgagggctgttaaaaaccgcttcggctctacaaacgagattggcgtatttgagatgcttgacgacggtcttcatcaggtggaaaacccgagcaagatgatgctggagggcagacctaagaactcctccggctcctgtgttgcgtgtaccatggagggctcaagacctatccttgccgaggtacagggtcttgttaccgcaaccgcatacggaaatccaagacgtatgtcaaacggatttgattataacaggattaatatgatacttgccgtcctcgaaaaacgcggcggatattatttttcaaacaatgatgtttatctgaacgtcgtgggaggcttcaagcttcttgagcctgcggctgacttatctgttgccctggcactcgtttcaagtctcaaagactccgttgtacgcgaagacatactcgcattcggtgaaataggccttgcgggcgaaatacgctctgtaagccactgtgagcagcgtataaaggaagcaaagagacttggctttaaacgtgtgattatcccgaaggacaacctcagaagcgtttcaaaggaaacgatgagggatatcgagattgtcggcgttcagttcataagccaggcatatgaggcagccatatgaagcttcttataggcgatgcacctctttggctctgcaaagctctctcggaaaacggctttgaagtctttaaaacaggactgtgtgattcgcttcccggtcctgtttccgggcatattgaccttgttgccgcaaaaatccttgataaattgtttattgcgcaggaaaaggagaaaactattacggagtatgaccgtatgtattcactcttttccgggtatgatatccgcatttgcaaaacaaagctttcggactcttaccccggcgatgtacccttgaacttcgtcacgctcggagattatgtcatttgcaatccgaggacggttttgcctgatgctttatacatcgcaaaggagtacggaaaaaccgttattccggtctcacagggctatacaaattgctcgacgctcgttattgatgaaaaatcaataattaccgatgatgagggcatatttaaggcgtgctctgaacttcttgacgtgcttttggtagagaagggaagtatttccctgcccggatatgattacggctttataggcggctcagccttcagacaaggggatacggtgtactttttcggcgacctgttttctcaccccgatgctgaaaaaacagacgcctttatccgcggaaaaaaattaaaagtctgttcactgtcttttgagcataaactcgttgatatcggcggtgcagttgttttataatgatacaggttgttttttataaaaacgcatatttttttacagattggatgagcagaagatgtttaagttttcggaactgaaagaggagcatatcaaaacggaagaaatttttgacggaaatattcttcatgttataaaggacacggttaagcttccgaacggaaatgaagcaacacgagaggttatacgtcatatcggcgccgtttgcgtaattcccgtcacggatgacaatgaggttatcatagaaagacagtaccgttatcccatagatgaggttataagcgaaattcctgcgggaaagcttgacacacctgaggaggattggcttcttgcggctcagagagagcttcgtgaggaaaccggtataaccgctgacgactggagggaactcggagttttctacccggctgcggcttattcggacgaaaagataattatgtaccttgcaagaggtcttcattacggaaaacaggaccttgacgacgatgaattcctgaacgtaaagaaaataccggttgccgacctagttaaggatgttatggacggtaaaattgcagactctaaaacacaggtggctatcctgaaggttgcccgtgtacttggaatttgacttttaatccggtttgtagtaccgaattgtatatggtttattacggatttcccggcaggtcaaaataaaatgaaaaagtgagagtacgaataaatgggaagtgaaactgaaaagaagtttataaagatgactaccgagcccgtacccgggctcattttatctttggctgttcctacgataataagcatgcttataacggcggtttataaccttgctgacaccttctttgtaagacaactcggaagtgacagtatggttgccgctatcggaattgccatgcctcttatgaatatcatacaggctttcggattctttttcggtcagggctccggaaactatatctcgcgtgctctcggacgaaaggataaaaaagatgccgaagccatggctgtaaccggatttgtttatgcagtcggttttggcttgcttatcatgattttcggacttcttttcaacagacagcttgctatagtgctcggtgccaaaaccgaagccaccattgcggcgtccgtttcctatatgcgctttattcttcttgctactccgtttatgaccggctcatttttactcaacaaccagctgcgtctgcagggaaacgcctttatcgcaatggtaggcatctcatcgggcgccgtactgaatgttatacttgaccctgtttttatcttcaagctcggtatgggcgtgtccggcgccgccttggcgactgcaatcagtcagataataggattccttattctgtcaatcggacttttgaggagcgataacataaagcttaagctttcaaatttttcaaaggatccggtttacctgaagcgtgttgccgagggcggtcttccgagccttgctcgtcagggtctcgcctcggtggcagtcgcctgcctcaatcatgccataggactgtatatctccggcggagaaatgattgacgcagttcaggccgccatgacgggtacatcgaaaataatgatgttctttatggctataatgataggcttcggacagggctttcagccggtgtgcggctttaactacggcgcaaaaaagtatgacagggtaagagacggtttttggttcagcgtaaagttttccactgttgcgctcatttttcttgcggcgttcggttatctttttgcggaaaaaatctgctccacatttgtaggcacaagcgaaacagcggaaagggttgccgagttttcatacaaggttcagatatgcgtatttccgctcttttcctttacaacggttaccaatatgatgctgcagaacatgggcaagacaatacctgcgacactcgttgcaatgacaagacagggaattgcgttcatacctcttatctttgttcttcctcttatcattgatccgctgacagccattgaaataacacaggcacttgcggattttgccgcatttgcactttcggtgccctttgctattgtaactttaaggaagctggggagagtttctgaaaatgaataaaaggagataatgttatgtcaaagaaaaccaaacacaattatccgaccgtttttatccatggcctcggcggattcggtcagagtgacggtctttacagggtcgtgcctcagtggggacttcttaagccttttgaccttgatgcgtaccttaacaaaaaaggatatgagtcgtactttccgtcactcggacctttttcgggtgcatgggacaggtgctgtgaactttgggcacagctcatgggcggtacggttgactacggaaaggtacatgccgaaaaatacggtcataaccgctacggacgtacatacgaaaagggtctcatagagaactggggtaagaagggtaaccatgagaaaataaacctcataggacacagcttcggaggtcctgtcgtaaagatgtttaccgaccttatcctaaacggctgcgaggaggaaatctccggtacaccggaaggcgagctttccgaccttttcaagcgtaaaaaggctcagagagttcattcggtaacaactctttcgggcgtaaataacggaactcttttggcaagcgcgttcgggaaaaggggtatgaccgtaattacttatgcactcaccgggctttcagccgctatcggggcaacacccataatgaaggtctttgattttcatctcgaccagtgggggcttacggttccgccgtcagagcttcatcccggaaattataagctgagaaatcctcttgagtttgttgacaaaatgagtgtttataattctcatcagtttgattctgtcgcttatgagatgcagattgaggtttgtcaggatcttataaacccgtctcagaaggagggaaaggacgtgtactactttgcacgtcgcggagatgtttcattcaacgctcatccgctttatcttcccaccctcaagtgtgaccccttaagcgccgttacagagcttatcacgggaaacataatctggcctcacttaagacgcagaaagtataaggtaagaaaagactggaagccgaacgacggaatggtcaatgtaatcggtcaaagcgcaccgcttacctccgaatacacagacttcaagtctccaaaaaaagtaaagcccggcatctggtacaacatgcctgtcgaagaaaaaagtcaccttgcatgggcaggcttactccaaaatccatacaagtatcacagatattttatcgatgtaattgatatggttaataatcttggatgataaaaaatttgtcattttgtgcaaatttattaaaaataccatttacaaaccaacttttttgtgatatatttaacttgtccttatatcataccaaaggataatcaggtcgctacaataaagtagaacactgaaaagctctgaaagccgaccttgtgtcggctttcatcttttatacggaaggtggttatcaaatggcatactgcataggattggatatcggaattacatcagtgggttggtctgttttaaaacttgacgaaaatgaacaaccttatagaattgataaacttggatcacgtatttttgatgcagctgaacatccaaaagacggtgcttcacttgctgccccgcggagagaggcaaggggtgcaagacgtcgtttgcgccgacataaacacagacttgaacgtataaggtatcttataactaaagaaaatattttatcggaagaagatcttcgttgcctttatgacggagatttatcagacatatatatgctccgtactaaagctcttgatgaaaaagttacggaaaaagaatttgcaagaattcttattcatctcgcacagagaagaggtttcaagtcaaacagaaaagttgacgttgaagataaaaaaagtgatgccggtgcattaacttctgcagtaaaagaaaatactgaccttatggaaaagaaggcatatagaactgttggagaaatgctctataaggatgaaaaatttgcggagtgtaaaagaaataaacaggaaagctataaaaatactgtaagcagatcacaaattgaagacgaaatacatataatatttaaaaagcagcgcgagtttggtcaagcctttgcttctgaaaaaattgaagaagagtattcagatattgtcctttctcaaagatcctttgaagaaggtcccggtgaaggtccttcttcaagtcccagcccatatgctgggaatcagattgaaaagaaaatcggaaaatgtacctttgaaaaagaagagccaagagcagtaaaaggttcttattcttttgaactgttttcattgcttcaaaaaattaatgatatacgtattattcatgacggaaaaacaagatcgcttacacaggaagaaagaataagaatacgtaattttgcacatgaagtaagttctcttaattatgcatgtataaggaaagaacttggactttctgatgatgagtttttcaaaaatgtttcatacagcaataagcagggtgataagggacaaacaatagaagaaacagaaaaaaaaacaaaatttgaatatctcaaggcatatcacaaaatgagaaaagctttgagtaaagtatcaaaagatagaattaatttttatgataccgagcataggaatgcgattgcatacgctttaagtgtttataaaacggatgacaagatttccgactatcttataaacaacggaatagaaaaaattgatattgaacctttgctgaccatttccggactttccggaacaggacatctttctacaaaagcttgtgataaacttatcccgtttcttgaaaaaggaatgagatatgatgaggcgtgctcagaagccggatatgcttttagggctcattcaaacaatgaaaaaaacatgtttcttcctgcatatatacctgaatttgataatataacaagtcccgttgtaagacgagctgtatcacagagtataaaggttataaatgcaattatacgtgaacaaggcgaaagtccggtattcataaatattgagcttgcaagagaaatgtcaaaagattttgatgaacgccgaaaactcgactcggagatgaaagagaacaatgctaaaaatgagaaaattattgaaaaattaaaatcaacttatggtattaaaaatccatctggtatggatattgttaaattaaaactttttgaagaacaggatggagtatgcctttattcactcaaacattttgatgtaacacgtctttttgaagacggatatgtggatattgatcatatcattccttatagtatttcctttgatgatagttataacaataaggtccttgttctttcaagtgagaacaggcaaaaaggaaataagattcctatgcaataccttaccggagaaaagcgtgataaatttgaaatttatgttaatcagaatgtgcgcaatcttcgtaaaagacaaaaacttttgaaacctgaacttacaaatgaagatacagaaggttttaaggaacgcaatcttcaagatacaaaacacataagtagagtaatgctcaatcttattaatgattatcttgagtttgctccgtcagaaaccggaaaaatcaaacgagttaccgctgtaaatggacgtgttactgcatatgtaaggaaacgttggggaattaataaagttcgtgaagatggcgatcttcatcatgctgttgatgcggttgttattgcttgtataacagatggtatgataagaaaaataagtaagtactccaattacagagaagttgagtattcttttgatgatgaaggttcaacccttgttaacagaaaaacaggtgagtttattgatcgattcccggtaccatggaaagatttcaggcgtgaacttgaaatacgaacttcaaatgacccagctatgtacctccgttctgtaaaacttccgggttatattggtgtagatgttgatgaaattaaaccgtgctttgtatctcgtatgccaaaacacaaggttaccggtgcggcgcacaaagataccatcagaagcccgcgactgcttgatgacggttatgttatttccaagaaaaatcttactgaattaaagtttgataaaaacggagaaatagaaggctattataatccgtcaagcgatattctcctttataatgctattaaaaaacgtttggaagagtttgacggtaacgcaaaagaggcatttaaagatccgttttataaaccaacaagctccggtgaaagaggaccgcttgtaaaaaaagtgaaatgttttgaaaaacagagtctttctgttcctgttcatggaggcactggtgtagcctcaaatgacagcatagtcagaacagatgtattctatgttgagggcgaaggatattactttgttcccatatatgttgcggatacaataaaagatgaattgccaaacagagcatgtactagagataaaaaatacagtgattggaaagtggttgatgatagtagctttatcttttctctttatccaaatgatttaataaaaattattccttcgaataataaaatcaagttattattaaacaataaaaacagtactttagataaagagataatggtagaagaagtttttttatactatactggatttgacataagtgtttctgttgcaagtggaataacacatgacgattcatacaaatatcgttctataggtaaaaccatgaaggcaattgaaaaatatcaggttgatgttcttggaaattatcacaagataggaaaagaaaagaggatgccttttaatttaaaaaagaggtgattaagtgccttttaggaatattgtaattaccggaacagttgctctttcagcaaaaaaaaatcaattgcttattgataaaaaggaagaaaaaatttcatttcctattgaagatatatctgctcttatgattgagagcagatatgtatcaataagttcatatgcactttcacagctttctgaatttggagttcctgttttcttctgcaataatgagcatattccgaattctgtgttgttgtcttacaattcacactcaaggcaactcaaaatgactaaagtacaattttccttaccaaagcccttacttaacaggctttggcaaacaatagttgttgcaaaaattattaatcaatctctttgtcttgatttttgtaatgttgaagattctaaaaaaataaaactactttctcaaagagttcaatccgcagacaaaacaaatgttgaaggggttgctgctgcaacatactttaagttgttgtttggtaaaaattttacaagaaatcaggataatatttttaatgcggcgctcaattatggttattcaataatccgcggagtggttgcaagaagtcttgtgtcttatggtcttgatccgtctttaggtattcatcataaaagtgaactgaataattttaatcttgcggatgacataattgagccttacagacaaattattgatttgtatgttgctctaaatgtttccgaagatgataaaatgactccggaacttaaacatgaattgtttggattactaagtgtaaatgttttaataggtgaagaaaatttcagcgtttcatacgcaatagaaaaaactgtgcagagtcttagttcatgttttgtaaataacagagaagatattcttttaccgactctttgtgaattaaaacttcatcaatatgaataagtttatgagaatacttgtcttttttgaccttcctgttactacaaaaacagaacgtagagttgctacacagtttagaaattttcttcttaaagacggatatcatatggttcagttttcggtttattctcgtgtttgtaatggcagagatgctgtacaaaaacataaagaacgcatatacaaaaatgtgcctgataacggttctgtcagacttatggtaattaccgagaagcaatatgaagctgtggaaatattggttggtaaaaaggcacaagatgatactccggcagcgtatgaacaattgacaatttactaaaaaaagaatatttttaaaattaattttatattcattttaagatatttacaaaatgaaaaaaccagtcagacgtttatctgactggttttttcgcccctatcatatatcataccaaaagataacagggggctacaacggaaaaggtggtgaatatttaatgtatgaacatatatcataccaaaagataacagggggctacaacattcacttgaagcgaataattaactgaattcatatatcataccaaaagataacagggggctacaactttaactatttctacggttaagataatatacatatatcataccaaaagataacagggggctacaacactactcttctagctaaaattgctcatgacatatatcataccaaaagataacagggggctacaacttattaattctacaggctcgacaacttcgcatatatcataccaaaagataacagggggctacaaccttcgttgtcggagccgtcatcggtctcgccatatatcataccaaaagataacagggggctacaacttacacgatcgaacaggcggcgcgggaaatcatatatcataccaaaagataacagggggctacaaccgatcgtttcgactataacagccaagggtacatatatcataccaaaagataacagggggctacaacattttttttaattctcttgcttcccgctttcatatatcataccaaaagataacagggggctacaactcgtgatttcaaaaatttcaatgaaggtccatatatcataccaaaagataacagggggctacaacactatccatacttccccaagtactaggctccatatatcataccaaaagataacagggggctacaacccctcgacctgcaagaagataagcaatagacatatatcataccaaaagataacagggggctacaacgatagcattggaacgctttttactcagttccatatatcataccaaaagataacagggggctacaactaaaaaataaattttaatgaaaggagacgcatatatcataccaaaagataacagggggctacaacgcatttattccaattttaattttttctaacatatatcataccaaaagataacagggggctacaacttatcttcctgaggctccgtgtaacgataacatatatcataccaaaagataacagggggctacaacagtcaaagcagaggcaaaacaaaatcggagcatatatcataccaaaagataacagggggctacaactgtcggcggtttcggtatgactgcagttgcatatatcataccaaaagataacagggggctacaacatttgaaaaagacagcaaagtctactttttcatatatcataccaaaagataacagggggctacaactggatctaccgacgtaacgcagtcctctaacatatatcataccaaaagataacagggggctacaacattatacattggtgtgttttctttaccttcatatatcataccaaaagataacagggggctacaactgcaaatgtctgcttaatacctgtaaacttcatatatcataccaaaagataacagggggctacaacttgagacgaaaattggatttcggtatttcccatatatcataccaaaagataacagggggctacaactactccaactatcagcaatttttcaccctcatatatcataccaaaagataacagggggctacaacatccggaattcttctactcatttattttccatatatcataccaaaagataacagggggctacaactcaagcaggggcatggttttcgattgtcaacatatatcataccaaaagataacagggggctacaactggcgattttcgccaccgttccgtaccatgcatatatcataccaaaagataacagggggctacaacgagttgagttacaggcaaaaggaattaatcatatatcataccaaaagataacagggggctacaacccagcaggcaaatccgcagaatgaagttgacatatatcataccaaaagataacagggggctacaacatgcgatctgaacctcgcaccagccgaggcatatatcataccaaaagataacagggggctacaacctctgtgatggacatgagaccgtccgccgtgcatatatcataccaaaagataacagggggctacaacacttgtgttcactgtagacagatagattgccatatatcataccaaaagataacagggggctacaacttaatagctgatatatcaaccctttataccatatatcataccaaaagataacagggggctacaacgcttttattccaattctgctttttgctaatcatatatcataccaaaagataacagggggctacaacaaaccgctttgggttgttttttcaaggttaattatatcataccaaagaattacaggggctacaacagatagttctttcctagaaatatagccataggcaccgaccgctgcgcctgacgaaactgtgccatacgcaaggacgttttcccgttaaggctatacttttctttgacttgggataaagtagctcttataatgctccttacacagtcggttaatcgtcttgtggtcggcgtccataacggcctcaatctcggtcacggtacactgcagcttacacagttcctcaaactgcttatacttcttgttgtcccatataattttctttgccatagtgacctccaaaagcttcctctattattccccggaggaggaacggggttcaaatgagtataggaggtgagaaatgaaaaaggaccctcaaacgagagtcgcagaagttggatttttaataaatataatctatcgtcgcctcttttaacacatcgtatagaggcacgccggccacagacaagtctgtcatggccttaccgttttcacaacggcatagttccttgttgccgttcaacccttcttgtagatactcgtaccccggttcgcagcaaacaagaaagtattccactcccttatagtggaattgaatatcgtgatcatgcgcgtaatcctctaaaatttccgacatatcgttcatctcttgttccccccttttataaacttatcaattaatcggcgttgttctctggtcgggtggtggtatcctcttagtcgatgacctttaccgtcatagtaatgtatgtggattgcaaaagaaggatccttgctgtggttatgatccaagtcgatctcgtacatcttctctctcggttatcaccatacacggaaaagtcaaacatatattttatccgagtttactccttattttcgttcattttttcaagttctttatcaattacataaagatttgttgcttttctctcaagttgcgttattaactaactaatttcaattgcaaatgtcatatcagtcattgtatttattcctttcgttaatcaatatgtttattttttcagtaaagattgaaaaattcccaagaaaaacattaccgggaaaaagaagatgcaaaatataacatctgatatttttctgcctgccaggctcatgtcgagcagcccacaaattgcaattgtggcaaagaaagtaattgcaagaacaatataaaaatccatgtgatcacctcataatttttattttcaccctgattatatctactgataatttttaattcaataaaaaaaacacgaaaaaaagagataagtaccattaatcgtacttatctcttaatttttttattttggtaagaagaatttactcatatcaacatgttcacacttgagtaatcctattttattttgtattccgccgccatatcctgtgagggagccgtctgagccgacaacacggtggcaggggatgatgatacaaataggattccatccaacggcaccgccgacagcctgagctgacattttttgtatgccgcgtgttttagcaatttgtttagctatgtcattgtatgaaacagtttcaccataatgaatcttgttcatgatatcaattacagaagctcgaaagggggtgatgtccgaaattttatactttggagtaaaatcaggatttttcccggaaaagtaaatatcaagccattttgatgtttggttaaaaatcgggagatctttttcttcgaatttacaattacgtttttgtgcgtctgttgatgaatcgaaccacaagccggttaaaaatttaccgtcgccggtcatgtctatttgtccgagcggtgattggtaataagaaatatacatatcgaatttccttctgaatgattcatttatatactgcaatttatcggataaacacattttacaataaaacgcagagtgagaaaaggggtatttacattgccgttattttgtgatacaattatacaaaataaaagttttgtataattaagagcagtaaaaaagcatataaaaacaaaaaacacctttcttgcggtgcttttcggattattagtcagtctttgattgtttctttcttatactgtatttgtataattgttttagattatatcattgttttatttgtttgatttaatttgtttgttttgatcttttggtttgttttgtttaaaaaatttctttattatatattatctttcgtattatacttaagctgtatctctgcttgtatgatctttctgaagctaatcggattttttgaaaatgcccgtcctctcagttttttctttgtgatacattgtatgtcttaaaaaaactgattggctgtaaacgaggtcactttttcttgattttatgttgctttcgcattttgcgacattttcttttgcaggcagctttttatttaatatttatcaaacaaatactgttttattgaataaaaatttgctttttaacatttaaagaaaatttgtgttatgcattgattttttccgttgagttataccagggctttttataaaataaaaacaaaccttaaaaagtattcttgttttctttaaaagttataaagaaactgattatcttatctttaattatcttgagcatttattaaaaatcttaattcccgtgaaactgtttcacagaatggtgaaaaataatttgaggaggtttaaaatgattactcgtgccgattatgcggatttcccgcctcttatggttgaatttcttaattatattgacgccataaaaaataaatcaaaaaatactatatccgagtatgcaatggatctacgtacttttttcagatttatgaaggtaaacagaggccttgcctcccctgatcctaaagaatttaaaaagataaaaataaaggatatcgacgaggcttttataaaatcaataacccttacggatgcatatgcgtttctctcattttgtaaggatgtgatgaacaattccgcaaggacaagggcccgtaaggtctcgacaatacgtgctttttttaaattctgtacaactcagaagcatataataaaagaaaatcctatgcaggatctcgacacgccgaaacttaaacagacgcttccgaagtatctcactcttgatgaaagcgtaaagcttcttaaaaacgctgccgagggtccgaatgcagagcgtgatctggcaatcgttacattgttcctaaactgcggtatgcgtctttcagagcttgtcagccttaattatacggatatccgtgacgacaacaccgtaaagataaccggaaaaggaaacaaggaaagaacgatttacctgaatgaaacgtgtataagcgccataaacaactatatgcgtgtacgacctgtggacggggttccggcaaaggataaaaatgcattgtttctgagcagcagaaagcagcgtataagtccgaaaaccgttcagcatatcgtttataccgcattggaaaaggcaggactttcgggatattccgtacacaagttaagacatacggctgcgactctcatgtaccaatacggcggtgtcgatgtacttgttttaaaggaaatactaggacatgaaaatgtaggaactacgcagatttatacacacgtcgtaaatgagcagctcaagaaggctaccgattcaaaccctcttaacaacatggaaaaagctaaaaaagattgaatcgttccaggaaaaaattgcaaagaacagtatccgcgacggctgagagtataattattccggacaatatacaaaattgataaccgtattttcttgctgaattttcagtggaaatacggtttttgtctgataaaatcctgaaaatatccacggacatatgcagggcttcacaggatcctattataagcgcgacaagagcgatgacaaggcccggataaacggttgtcagacaatataaaaagcctttaattccgaagcttgagtagatgaatcccgttaccattccgttggaaataccgcatagaagcggtatcaggcatataaaaggatatcctattgccgacataccgaagaaatacgaaagaacaagaaaaaatccgtgcgttaacaatgaatttttaaaaaactgaaagcttgtgtattcggtacgggcggcatatccgctttcaattatcctttcaattttagaaagaagtacacttttatcgccgttgataaagatacatccaatgagcattcccgcccaaaaaagacaaatgagaagtacaacctcccatttctctatcattattgtttttagatcccatgacctgtagcgcagctgcgcgattttagacacctttattttttccgacatttaatgaaatcactcctccgaagcttccgaatccgagaatgagaacgattgttacaataagcattttagatacctttaagccgccgaaaagaaatgtcagcgcaaggcacagcgccgagataaaaactgcgggaagtattccggagacaattccgttctttccgacaagccttgccgctgcaaagccggaaatgaagctgctgaacatgtatataaactgcatgataagcgacaggtacgactcagaatagtcatatttcatatatgtggctgctgcgacggttaaaagtataataaatacaaccgttccaagcaaaaatgcatatgccgtacttttgacctgagacataaaaattcacctcacaaacttatttcaagtttatgaggtgactgatttttttatgtcttatgtttggtcggaagaataaaattatttcttcttattctttttttccgcagcagccttctttgcagcttcaacctttgcagccttaagctcttcagccttcttttcggctgtaacgttctttgcaatagcaagctttgtaaaacgtattttgtttctgtctgcgccggattcgataactacagagtcatcttttacagttacaactcttcccatgattccgccgatagttataatttcgtctccaaccttgaggttctcacgcatctcctgctcactctgctgctgcttcttgtccttacgtgtaagaaggaacatatagcctacgaggaaaacagtgataacaaccatcataactgtcatgcttccgcttccgccgtttgcaccggctgccgactggcttgtcatgttaagtaaagtagtaaaattcattaccttaaacctccgtttaattaaaagaaatattattccttaaagaaaatttcctgattattctacacgtattaaattcgtgtgtcaagcaagtccgtgtatttgtcgtggaattctttaaatctgccttcgtcaagagcatttcttatctcttccataaggttattgtaaaaataaaggttatggataacgcagagtctcattccgagcatttcctttgcttttaagagatgacgtatgtatgcgcgtgaatgtctctgacacgtcggacagctgcaccttgcatctatcggagcctcgtcacgctcgtattttgcgttgtttatgttgataattccgtcccatgtaaaaagatgcccgtggcgtgcgtttctgctcggcataacgcagtcaaacaggtctacgcccctgtatacaccctcgagtatattgccgggggtaccgacgcccataaggtatcttattttatccttcggtgcgacctcgtttacagcggaaatgattctgtacatatcctccttcggctctcccacggcaagtccgcctattgcgtatccgtcaagatcgagctttgcgatttcctccatgtgctttacgcgaagatcatcaaaggtacagccttggtttattccgaaaagcaactgatgcttgtttatggtgtcagattttgcattgagacgctccatttcctctttacagcgtataagccatctcgttgttctttcacagctttgctttgcataggcgtactgtgcgggattttcgacacactcgtcaaatgccattgcaatagtcgagccgaggtttgactgaatacgcatgctttcctccggtcccataaagatactgtgtccgtcgatatgacagttaaagcttacgccctcttcggttattctgcgcagctttgcaagcgaaaatacctgaaatccgccggaatcggtaagtatgggtccgtcccatcccgtaaatttatgcagtccgccgaggtcatgtataagctcatcaccgggtcttacgtgaagatgatatgtgtttgaaagcataacctggcattttaattccttgaggtcataggcggaaagtccgccctttatcgcgccgcaggtagcaacattttgaaatgccggtgtttgaaaggttccgtggatcgtctcaaattccgcgcggcgtgcattgccctcttgttttaaaagtctgtacatataattacctgcttattcttaataattttataaacatcttaagagatcatca

SEQ ID NO: 2741 - DNA, 23300 bp, synthetic construct
  source 1..23300: mol_type = other DNA
  misc_feature 1..23300: note = Synthetic
ttgcccatgccctgagcctgttgtgccggggcaacggccacgtgcggaccttttattccgtgggtcagcactgtctggcggcggccaaagaagcggccgcccgggaagacagccgccgggtgatcctggcggccctgctccacgacgccacggaatgttacctgtccgatgtgccccatccctacaaggtaaacatgccccggtaccgggaactggaaaacaccctgctccaggcggtgttggaccggttcctgggagggccccttacccgggaagaggcggcggaagtggagcagatcgaccgggcgcttatgttcagcgatctccatcatctgatggaccatccggaaaaccgggaacaggaggggaccctgcacctgactgtggattaccaggtgcggccctttgccgacgtggaacgggaatatctggactggtaccgccggtacagccgataaaaaggagaaaaccatggatcaaaagaaaatcaccgaaagctgggagaaacgccgggcagaactgtgcggcctggcggacagtatctacgattgggcggaagtgggcctggaagaagtgaaatcctccgccctgctggaagactacctggaaaaacaggggtttactgttgaaaagggagtggggaccctgcccaccgccttccgggccacctggaaacagggggagggaggaccccggctgggcttcctctgtgaatacgatgccctggaaggcatgggccacggctgcggccaccatctccagggcccgtccgtgatcggggcggccctggcggtccgggaccagtatgagggcaccggggtgcccttctccctggtaatctacgggaccccggcggaagagaccatcgggggcaagaccgtgatgatggaaaacggctgcttccaggacatggacattgccctgatgatgcacgccgcccccaatacctgtgtggatataaagagcatggccaacaaaagctacactgtggaattccacggggtccgggcccatgcggccatgagtccggaacaggggcgcagcgcctttgatgccgcgatcctcagtttcaacgccatggaatttctccgggaacatgtgaaggacgacacccggatgcactacaccgtccgggatgccgggggaccggccaatgtggtccctgaccggaccctggcccagtatgaactccggtcctatgacaccggctacctccggagtctggaaccccggttcctggacatcctgaaaggggcctgccttatgaccggcaccacccacaccatcaccgaaacccacgaattctacgccaagattccctgccttaccctcaacgacctggtgatggaacaggcccgggccttcggggcgccccagctgtccgaaccccggcagaaaaccggttccacggatttcggcatcatcctgtaccatatgcccggcacctgcatccgggtggcctttgtgcctgaaggaactccggcccattccgaagcctatctgaaagccgggaagacggaagccgcccatgaagccatcgggtacggcagccggatcctggccggtgcctgcggcgccatcctggatgatccggcccggcttactgccatgtgggaagaattccggaaacgaaaagcttcacactgagataagaacattctaataattaaaataaagtacaatgtattaccccccaggacagttgtatgatataatggatattgtataaaaccattagtcggttctttacctataggaggttgagcaatgaacaatccgaagcccgttaaaatcgtggaaacggttctcagagacggccatcagtccctctgtgccacccgtatgcgcaccagcgacatgctgcccgtactggaagcactggatgactgcggcttttatgccctggaagcctggggcggcgccacttttgactcctgcctgcggttcctgaatgaagatccctgggaacggctgcgcaccatccggaaacatgtgaaaaagaccaagctgcagatgctgctccgtggccagaacatcctgggttataaccactatgcagacgatgtggtcaccgaattcgtaaaacgcagcgtggacaacggtatcgacatcatccgtatcttcgatgccttcaacgatacccggaacctggaaactgccatgaaagccaccaaggctgccggcgctcatgcccagggcaccctggtgtacaccatcagcccgtaccacaaggacagcgactatctgaagctggccaaggaactggtggaaatgggggctgactccatctgcatcaaagacatgtccggcctgctggctccctatgcctgctcttccctggtggaagccctgaagaaagaaatcaatattcctatcgatgtacattcccactgcaccagcggcatggcttccatggctctgctgaagggcatcgaagccggtgcggacattgtggatacggctctgtctccctttgcggaaaccaccagccatccctgcactgaatccctggtatacaccctgaaagggactcccagagatacgggcatcgacatggataaactggggcccattgcggaccacttcaagaaagtccgtgctgacctggtgaagaccttcaacctgcccagcaacatcagcatcaaccccaaggtcctgagcttccagatccccggcggtatgctgtccaacatgctgaaccagctgacccagatgggtatggctgacaagtacgaagaagtgctgaaggaagtgcccagagtccgggccgacctggggtatcctccgctggttactccttccagccagatcgttggcaccatggctaccatgaacgtaatgatgggacggtacaaaatgatccccaaagaaatccaggacattgttttgggcaaatacggcaagactccggggcctatcagcgaagatctgaagaaagtggtgcgccgctggatcgtcaagaagaccggcaagaccacgatcgctcccatcacccacagaccggccgacgacattccgccgcaaatggacaagatgaaagccgacctggccgccaaaggctatcccaacgcctctgtggaagacgtgctgtcctatgcactgttccccgaagtggccctggccttcttcaagaacaatcggtaaggctgctgccgcggcaacagccgaagaaaagaacccgccccttttggggacgggttctttgttgttctcggccctccgctgaccattgacaaaaaaatccccgccgcatttgcgacggggattttttcattatcactgctttggcggccgtacgggcgggggtgtggagctcttcccggaccggggcggctggggaacgtttccgtctcccggcagactgtcttcttttttgctgctctgtttcttggtatccttcttcttggtggtttccttcttgggctgggccttgggagcttcatacttgggagcaggcatcttgaacccgtccggagtctcgaagtcttccgacggcaccccttccagagcgttgctcatgaaggtccgccacagagtggccggctcaccgccaccggtcatgccgcccagggattcgttgttgtcatccccgatccatacggcacaggccaggttgggcgtaaagcccacgaaccaggcatcatggtaagtgtcagtggtcccggatttcccggcgcagggacggttgatggcggccccccggccagtaccccgggtcataacgtcttccatcatggaaatcatcatgtaggcagtttccggtttcacagcctgggtgggattggttttgtgttcatagagcactttgccgttccggtccaggatctttacaatgggagtgggtttgttgaatttccccatattggcgatgcccgcataggcaccggccatttccagaggcgtcaccccgtgggtcaggccccctagggccatggccgcgttgtcgtcatcatccaccagggtggtgatccccagccgtttggccagtttcagggtcttttccgttccgtacttcatggccaccttgacggcaggcacgttgtaggaataggtgagtgccgtccggtaggacacggtgccatggaagctccggtcatagttctgggggttccagtctcccgggatgggggagtcctggacggtatcgctgggagtggcaccctgttccatggcgttcatgtaaacgaaaggcttaaaggaagaaccaggctgccgttccgccatgacggcacggttgaactggtccgtgccccggcctccgatcatggccttgatgtacccggtcttgggatccactgccacaatggcactctgaggctgcttcagcttgttgctgtcagtgtaataggtgggggtcagggctgccgccttttccgccgccttctgcatttccggatccagggtggtgtacaccttcagaccctgtttgtatacggcatccggaccgaatttgtccaccagcagctggatgcagtaatcaatgaagtatttcttggagccgggggattcattcaggctcttgtaggtcagaggttccgcataggctttgtcagcctgttccttggtaatgaacccgtacttggccatctgctccagcaccgtcttctgccgggccttggcggccttggggttggacaggggagagtagtagttggggctcttgggaatcccggcgatcatggcactctgggccaggtccagatcctccacatgcttgccgaaataggtgttggcggcggtttccaccccgtaggcaccctggccgaagtaaatctggttcatgtacatttccaggatttccttcttggtgtacttctgctcgatctggagagcaatgaaggcttcatggagcttccggctcagggtctgttcctgggtcaggaagtagttcttggccagctgctgggtaatggtactgcccccctggacctcgccccaccggatgtaggtgtagatggcccggccgatgccccggaagtcgatgcccccgtgttcatagaaccggatgtcttctgcagccagaaacgcgttctgcaggttcttgggcaccttgtcgatggtcaccgggatccggtcttcttccgaatccaccgtggtgatcaggttgcccttggcatcgaagaactgagaagaggccatgggagccatatccttggtaaggatcttggcggtggtgaatttggccacggcaaagaaggcagccaccgaaaggaagcccaccagcaccagggccatcagggcagaaaagattgttccgcccagctttttccgtttgtggggggaagacgaaccgaaggggttcctccagttcctgtttttattgcttgtcatcacgtcagctcctataacagatagaaatagattgagaccataagttacagcatattataccacatttgctttgtgaggtgtatagttccccttttatctcttctccttagacgtatcgaattctaatactcagaatttgattttttatagaagcattgcattatttaaagctactgaagaatatataaaatgtataaatcttaattacgggcgtaaagaatctaaagcgaataaatgtgtgcaagatttagctgaagatattattattaatagcagaattgctgttaataaatataagatgtttaacattgcattaaaactggacttatgggcgcttttatttgtacttatagtagttttattagcataattcccgactctctgaagttgaatacaaagtaagaaaagtattcacacctttgtgtaaattatgatagctagatttaacactatacgttataatcaacagatgaagtctaaagtcataaatttatgccgaaaaggagcttcctcatgcaaaaaatccgtaaggccataatccccgcagccggcttcggtacccggtttctgccggaaaccaaagccatgcccaaggaaatgctgcctattgtggataagcctaccattcagtatattcctgctgaaagtacaggatatggtggagaaacccaaaatggaagaagcccccagccgttttgcggctctggggcggtatgtgattaccccggaagtgttcgagatcctggaagagacccggccggggaaaggcggggaaatccagctgacagatgccctgcgggtcatggctcatatggggcatgtatatgcgtacaattttcaggggaaacggtatgatacgggggataaattaggatatttgaaggctgtggtggaatttggcttgagaagagatgatttgggtccgggatttagggagtagttgagggagcttattaaaacccagttgtgaatatcatcgaaagtgagccactgtaatcatagatcaataagcagcctaagggttccggtaagatggttaggtggctgagtggtaaagtgattaagtggccaattgcttatgagctcagttccctgtgtcagagtcggttaaaaaacgccaaccctagccggattaaaacagcccgtggccgggaagggcgtgcctgcggcgcacccctacggcgttggggtcggatgttgattgtttgatcgagcggacggggatgtcgttgaaccggcaaaggagggcggcccgtgtgggccgcgccctgcagtgacgttcaccagacggagaacatcgttgttgtcataagtccgaggtcgacggcgtaggggcttcccggaggggagcccgtcccggcctccggttttttatgttcaaaagcagatgcccggcatctggcatcctttggcgcgagacggcgtttgcagatgcgggcggcctgcacctgtattgttatttataggcgatacctttataatatacacatgagaagaaatgccaaacctcaaaaatcgcgatttttgaggttaacctattttctgaccgcaaattttggggattttgaggtgtatgatatacacatggcggagaatagcattgttgtcatcagttcgacggagacggcgtagggggcttcccggaggggagcccatcccggcctccggttttttgtatttggagattatttctttactgggtggcccccgcgcatgcggggatgaatctgatctgggcaaggccatgaccaaatggctaaagcagaaaggaatgataaagtaatgatttttgacaatcggccgctgtttctggaaaatccagagtggtatacctatgatgtgtatgagggcaaatacaagctcactgacaaggccacaaaagaagcaaggaaaagttatgagaagttttacaaacggctggaagagccagaagagacagccgagaagtaattgggcgtaccctgtgcgtacggggacatgtgtgccgctatggagtgaccatggcttggggccgggtccctttagcgtgatataccttgtgtgagatggaagaacggttggctgcttttccatcgatccaaagacatattattgggaaaggggaatatttcgctggaactggtccgctgactttgatccagtgcctccactggcagggcaaccggataaatgggtggttctggcgacattttgccggaggcaaacaggatatttcctaagcgggctgaccatctctacactttaaggataattgggtctgcctgaccaggaggccgggaagggtgtgcctgcggcgcgcaccctacagcgttggaatcggatgttgtttgttcgaccgagcggacggggatgtcgttgaaccgacgaatgtgggccggctaaatggccggcgccctgcgatgacgttgacatggcggagaacatcattgttatcataagctcgacggagacggtgtaggggcttcccggaggggagcccatcccggcctccggttttttatgttcaaaagcagatgcccggcatctggtatcctttggcgcgagacggcgtttgcagatgcggggttattagcttgtgggggtgaaccagtcttttggaaaacctagtgtttgaataatcgtgttggcagagattgtctttaaatttttgtttaaagtttgcattagaaaatccaatgaattgtgtaaaacgttaaactctccactgttgaggaagcattgcatggatagataaacggaataaatagtgttacgataatcatttgcggttaagcctgctgatgaatgaagaggaaaccagtatttgcagtcccttctgcatttaaaatcaatcaaacggttattatgggcacagatatttcttacatcattgatattttcgatgaaactcaacatcgtttcaggtgggaaaatttcagatttctgaaggttttgttggatgaaagtttccatatcatgggctattgagttttgaagctgggtagatactgaagatatcatgtggcgaagttcgccaaaatccatatagttgatgagcacccagataggaacagatccataattttttaaataatgggcgatactgctgtttggttgttttttataatgatttataatgccagacaggtggtaaatggttgttacaactgatagtgttttactagagtcatagcatgcggtatccaggtaggcatagggggtattcctgtattttttggcaaaatgataggcaaagatggattttaaatgcccctcaacgctgagaattttgttaaagaaagcctgcttgatttcgcggtcaaatgaatataaacagacgacttcatcaaagtttgcaccaggtaaataagtatctcctttggatataaaatatttactgtacccatttataatgttgtaataattgttactcagcaagtaatttgcagcatacgcttcatctgaaatgattaaacctcttgcttttaataatgaaatttgttcttctattgttttaaatgttttttgtttacccataaaaaaataccctctccaacaatggagaaggtattcgcactgatccccgtagagatttcagcactcctttgttctccattatatagaatttatatatcaatgtcaacgtgctaaaaattgaccattttatttaatgcataattcagtaaattatttcatataatcatataggattgacagagaaaatgcaagcgttgttagagtcgggttaaaatcgccaatttcagtcggatgaaaacaacaagtggccgggaagggcgtgcctgcggcgcacccctacggcgttggggtcggatgttgtttattctaccgaagtctgacggagacggcgtaggggcttcccggaggggagcccgtcccggcctccgttttttatgttcaaaagcagatgcccggcatctggcatcctttggcgtgagacggcgtttgcggatgcgggcggccgggcctgtcgtccccgcaagggggcatagattgaaaatacgtcatggatggagaaatcgacacacatcccttgtcgcccccatacgggggcatggattagaatggagaatcaggaatgaatacggatgtgatagactgcaacgttcttcactttaaggataattgggtctgcccgactaggaggccgggaagggcgtgcctgcggcgcacccctacagcgttggggtcggatgttgtttggtcgaccgagcggacggagatatcgttgaaccgacgaatgtgggccggctaaacggccggtaccctgcaatgacgttgaccaagcagagaatatcgttgttatcctcagttcgacggagacggcgtaggggcttcccggaggggagcccgtcccggcctccggctttttgtgttgggagaatttctttactgggagtttttttacacagggaatgtggtatagtagaaggagaaaaggttcaattaaggataaacagtctttgagtgaagaaaaaagcaaaatatgataaaatattcataatgttctttactttatatggtaagtgcgttataataaattcggttataccaaaccaatgatcagtgggttactatgataaggtaacacaccgaggagctctaacgccttgccattcggcaaggcgttatctctttattggaaaaaaattgaaggaaggcgggaagggttatggcgtatggcattggactggatatcggtatcggatcggtggggtgggccgtgctggctctggatcatgaagaaaatccctggggaattatggatttgggcagccggatttttgatgcagcagaacagcctaaaaccggggcttctcttgctttgcccagaagagaagccagaagtatgcgtcgccgtctgcgccggcgcagacatcgtatggaacggatgcggaatctctttatcaatgatggactgttgacggaagaacaactgtatcatctgtatgacggaaatttggaagatgtatatgctctccgtgttaaggctctggatgaacggctgacggatgaagaggtggcacgagtcctgctgcatctggcccatcgccggggatttaaaagcaatcggaaagctgaatccaaaagtgcagaagcaggggaactaaaaaaggccatcagtctgaatcaggaaaccatggaagaaaaccgctatcggacggtaggagaaatgttcttcaaagattcccgctacgcagaatataagcggaaccgaggcggaaattatctcaatacggtagaccgcagcatggtggaagaggaagcacgcaaaatcctggaaactcaggaaaagctggggaacagcaagctgaataaagattttcagaattcctatctttccatcctgctgagccagagacaatttgatgagggacctggaggaaacagccattacgggggaaatcagattctgaacaaggtagggacctgtacttttgaagatggaagcaatggggaacctgcggagaagagagctcccaaagtctgttattcttttgaatatttcaatcttctgcagaaagtgaaccatttgcgtttgagctctgctaaagacaaccggggactggatgaagaagaacgggaaaaagtcattgcgctggcaaaagacaaagcagacctgcgttttggaaaaatccgggaaacactgcagatctctccggaatatcggttccagggtgtttcttacagtaccaaagaacctcgtgaggatactgagaaaaaagccaaattcaatttcctgccgttctatcatcagatgcggaaaatcctgaaatcaaaagctcagattgatattaaggaatatactttggatgagttggacaaaattggtcagattcttgctttttataaaggggatgatgcccggcggaaggaactgggaaagctgcgaatcgaacccaaagccatagaagctctgttggaactgaacggtgccagcaagttctcccatttgtcattgaaggcgatccgaaagatcacaccttttctggaacagggtatgacctatgataaagcctgcgaagcggccggatatgattttcgggcccatcaagaggataaaacgttcctgctgccggccaatgcaccggaactggaagatataaccaatccagtggtacgccgtgccatcggccagaccatcaaagtggtcaatgccattatccggaagcagggaagcagtcccttgtatgtcaatgtggaactggctcgagaaatggccaaagattttcaggaacggaagaaaattaaagatgataacgaagccaatcagagccgaaatgacaggttgatgcaggaaattaaagagaattatcaaagattgaatccctcaggtatggatcttatgaaatggaaattgtggaaggaacaggatgggaagagtccttattctcaaaaatctatagcgccagagcggctgtttgaaaccggatatgtggatatcgatcatatcgttccctacagcatcagctttgatgacagctataaaaacaaggttctggtgttttcttcagaaaaccgggataagggaaaccgtttgccctatcaatatcttctaaagaaatatgggcaggatacggcagacaggttcaaagtatgggttggcaacaatgtccgggattatcggaaacggcaaaggctgttgaaagaaaaaatgacggaagaagaaatgtccggctttaaggaacggaatctgagtgacacgaaatatatttcccggtttatgtataatttcattcgggaccatctggaatttgccccttctgaaacagggaaaaagaaacgggtattggctgtcaatggaatgattacttcctatttgcggaaacgctggggtatccgtaagattcgggccaatggggacaagcaccatgctgtggatgcggtagtcattgcctgcaccaccgataagatgatccgtgatctgacgctttattcggaagaaagagaaaacacgtatgatgtggatgaacggggaagccgtctggtaaatgaatctactggggaagtactgaaaggatttccgcttccatgggagggattccgccaggagttggaggctcgctgttctccgcacccggaacgggaattggctggtttgaccttttatatgaacaaggatttgaatgacatcaagccgatttttgtttcccgtatgcctagaagaaaggtgacaggagctgcccataaagacactatccgcagtgccagacatattgcggatggaattacggtctcgaaagtgccgctgaacagtttgaaactgggaaaggatggagaaattacggattattataatccggatagcgatcggcttctgtatgaggcattgaaaacacgactggaagactttaagggtgacggcaaagatgcatttcaagaaccgttttataagcctaaagcagatggctcccaaggtccgttggttaaaaaggtaaaaatccaggcaaaagcgactttggcagttcctgtggaagggaagactggagttgcggaaaacgacagtatggtccgtgtggatgtgtttaaggtggagggggaaggatactacctagtgcctgtttatgtagcggatacagtaaaagcggaattaccgcagagagcagtaacacctggtaaaccatatcaaaactggaaaattatggatgagaaagattttctcttttctttgtatcccaatgacctgattaaaattgaggccgaaaaagagatttcgttttcactagtaaatccagacagtgatttgttaaaagaaattaaaagcaatcaaatttttgcatattatgtaaagacgggcattgctaatggatcaattaaagttattaccaacgataattgttatcagaaattgagcttgggggtgaaaacgttaaaatcaataaaaaaatatcaggtagatgtgctgggagaggttcatcctgtaaaaaaagaagtccgtcaaaagtttactattcagcagaaagctcgatgatgaatgagaaaggttttgatcaatgggatatcgcaatattgtgattgcttctgctgctactttatcctgcagagaagaccagctgattatcctcaatgagaataacaacaaagtacccattgaagatatcagtgccattgttttggaaaaccagcagagtcgaatcagtcttgcggctttgggacaactggtatccaataatgtgacggtttatctgtgcgacaaacagcatattcccagtgcagtggtattgcccttttatcaaaattccaccaatgctgtggttatcgaaaaacaggagcagctatctgttccccagacaaaacaggtctggaagcagattgtgatggccaaaatccagaatcagggccgctgcctgaaggaaagaggggatgaagaaggaaaccattacctgatggaactggccaaaacagtaaccagtggggacatccacaatgtggaggcaactgctgcccggtactatttccgcagggcctttggggaaaagtttaccagaacaggagatgatagaagaaacaatggactgaattacgggtatgccattatgcgggggctgattgccaggctgcttacagggtatggattcatggttatcaagggaatccatcactgcaataagtacaacagctttaacctggcggatgattttatggagccgctgcggccggttgttgatttgtttgtgttgaaccacatgacaggggatgataatctgacaccggatctgaagcacgcgctggtgaatctgttaggagtggacgtgctttcagggggtcaaatacacagcttgaattatggcgcagaacggatgatccagagttttatgcggatctgccagcaggaagggaaagaactgatgattcctgaactggttcagctgagacagcatcaatatgaataaatttatgcgtatacttgtactttttgatatcccggtaaagacaaaatatcaacggcacgtggcttcaaaattccgccactttcttttgaaagatgggtattatatgctgcagtattccgtttatgcacggatctgcaacgggccggatgctgtagaaaagcatcggcagcgcctgatgggtgcgctgccggataatgggtccgtcagaatggttgttctgacggaaaaacagtatgaagcgattgatgtgctggtgggacgatatctgcccgaagaaaaggcctatgatacagagcatgtttccgttttttgaaaacaaccgaataaggcttcaaaaattcttttttacaggagtttttgaaaaaagtgaaaagcccttgtgccagatgacacaagggcttttgctgattacaattataccaaaccaataatcagcagggaactacaactttagtgcttcgtttgactttaagcaaaacattataccaaaccaataatcagcagggaactacaactaaaacgcggacgtcagtaaggattttatcattataccaaaccaataatcagcagggaactacaaccaatcaaacacatcttcgccgctttgccacattataccaaaccaataatcagcagggaactacaacccggaaggttgagccttttcatcgcttccaattataccaaaccaataatcagcagggaactacaactgtttaggctgtacccatatttccccgtagattataccaaaccaataatcagcagggaactacaacctcttgtatctgatcatgagtaccttccccattataccaaaccaataatcagcagggaactacaacaactgccagtggctatgctcaaaaagctgaattataccaaaccaataatcagcagggaactacaacatacgcactgtgaattcacagaagacacggattataccaaaccaataatcagcagggaactacaacgcgacatgataatctaacgaatagatatatattataccaaaccaataatcagcagggaactacaacaagaccgctcttgcgttgataccctgcttcattataccaaaccaataatcagcagggaactacaactacatccgatggtgatttcattggcgtcgattataccaaaccaataatcagcagggaactacaacattacatactggtgcattggcataaagtaaattataccaaaccaataatcagcagggaactacaactcgcagttatagctcataaccggattttctattataccaaaccaataatcagcagggaactacaaccttttcgttgatgtacaggtggtcctcgtcattataccaaaccaataatcagcagggaactacaacatacttgaccttgcaaggacaaatgcgtggattataccaaaccaataatcagcagggaactacaacggctccgcatcggggaagcccttgccctcaattataccaaaccaataatcagcagggaactacaacgtatggggacgtggattaaattatgataaaggtatttctttggagtttatcagttatttaaatttctatcaatatagaagacaactatactaaatacgttatcaggctgttctgcattctgttttctgtactttttttgccctccgataggccgggaagggtgtgcctgcggcgcacccctacggcgttgggatcggatgttgtttgttcaaccaatttggaggaagttgtcgttgaccaggcggagaataagcgttgttgtcatcagctcgacggagacggcgtaggggcttcccggaggggagcccttcccggcctccgttttttatgttcaaaggcagatgcccggcatctggcatcctttggcgtgagacgggagacgttgagcgtgaggcagcgtttgcagatgcgggcggccgggcctgccgcccctacgggacggagaaaaagggacaagggagacacctgcgcctgtattgttgtttatggacgatgccattataatatgaatgtaaagataattatcaagcctcaaaaatcgcaatttttgaggttaacctattttctgaccgcaaattttagggattttgaggtgtacgatatacacctggcggaaaacatcgttgttatccgtggaccccgcgcatgcggggatgatcctacgggcgggaagccctggaaagccgttatcttgtggaccccgcgcatgcggggatgaacagccggtacttcaaagagtaatcgggaactatttatatacattttggaattgcaggtttaatcaataccagtttatagggagtgaaaagtgattgagtggttaggtggctaagtggttatgaaaccaggttacttcttgaagtcgggttaaaatcgccaatctcagtcggattaaaacagccaggaggccgggaagggtgtgcctgcggcgcacccctaccgcgttgggatcggatgttgtttgttcgaccgattggaggaggttgtcgttgattaggcggagaatatcgttgttgtcatcagtccggcggagacggcatttttcaatcggatggacggggtccaggggggggaacggacggctctggcggcatttttgtcggtggcaaaggcgtgagactaaaaagcggctgaccccttttcaccatcctactggcatatattatggtagaataatggtatggacgaagtggtatgtgagtgtttatcctgaaatgggggcattgatcatgaaaaagagtgggaaatttctgacttggattgtgttggcgggtttgctggctttgcctttggggatgggggaggccagcgtggagaagcatgtggcggacgaggccaattacaagatgagctaccccattgtgtatgtggaccgcaatcaggaggcccaggaccggatcaattcggatatctaccaatatatagccgggttccgggatgattatgcggccggaaaattcacccgggggaggttttcttaccaggtgcagtatgaggacgggacgctgctttctctcacgctggcggatttccggtacagccagggggcggcccatgggtacaccaatacccgggggctgacttacagcaaggtgacaggggagaagctgcctcttccttattttgtccggatcagtacggcggacaagagcctgatcctgtcccagcccatttacaacagccgaaatgagccggtgccgctgagcaagacctttgccaatgattctttcatgtgggacaagctgaagatcagcgacaattatttcctggagggcggaggaaaaatcgccctgatctaccggccctatgaactggggtgctacgccctggggaccctgcgggtggaactgtcgcccaaggtcattgcttacttgaaccggaaaaactgacgtctgacttttgacaggcccggaggggccgggtgtgatttttctcccgccttgacttttcttttcccccgtgctacactagaaaaaacttcaaagaatcaccttttaacctagtcctgtgagactaagaaagggacttttatctagaagcagttattagaagccttcttgtcttaggacgagaaggcttattttttcaacctgcagtttattataggaggctacaacatgacaaaggcggcagtcagcctgtccggacgggatatcctggatctttcctccctgtccgtggaagagtacgatctgatcatgcgaacggcggcggagatgaagaaggtcatgaaacgggacatcaagaagctcccgtctctccggggcaaatccattgtgaacctgttctatgaaaacagcacccgtacccgcagctctttcgagctggccgggaagtatctgggggcggacgtaatcaacctgagcaccggcacttccagtgtgaaaaaaggggaatgcctgaaggacaccatcctgaccatgcagtccatggcctgtgatgccattgtcatgcgtcacccggtggaaggggcagccaagtacgcagcggacattgcagcccccattgtgatcaacgccggggacggggcccatgcccatcccacccagggtctcctggacatgttcaccatcctggaacatgggaaacagttcaagggcctgaaaatggccattatcggggatatcctttacagccgggtggcccggagcaacattgcggcctggaccaagctgggagcggatgtccatgtggccggtcccatgaccctgattcctcacgacatccaggaactgggggtcacggtgcacaaacgggtggaagacgccattgaaggggcggatgtggtggatgtgctgcggatccagctggaacgccaggacaaggccatgttccccactccccgggaatacgcccggatttacggggtcaacgaagaacggatgaaactggccaaaccggactgtctggtgatgcatcccggtcccatgaaccgggggttggaaatctcctgggatacgggctacagtgaccaggctgtgatccgggaacaggtgaccaacggggtcgcggtgcggatggccgtgttattcttgacgattatgggaggaaagccagttgaaaacgctaattaagaacggacggatcgtagatcccagccagcagctggaccaggtgatggaccttctggtggaagacgggaaaatcgcggaagcggcacctcacattgatgcagcggcgaacgaagtgttcgacgctacgggcctggtggtggctcccgggttcatcgacctgcacacccatctccgggaaccggggctggaagccaaggaagatctggtcaccggcactatggcagcggctcacgggggcatcacccgggtggcctgcatgcccaacaccaaaccggtgatcgacagctccattgtggtcagcggcatccaggaacgggcccaaaaggaagggtacgtccatgtggaagtgatcggggccattaccaaaggggaaaaaggcaaggaactgtctgaaatgggggacatggcccagcacggggtcatgggcttctctgatgacggccactatgtgtccagtgcctatgtaatgaacctggcagcccagtatgtgagcgcttttgacaagcccctgatctgccacgacatcgacgaagagatgaaccacgaagggttcatgcacgaaggggccgtttccgcccgtctgggtgtgcccggcatcccttccatcgccgaagacatctgtgtggcccgggatgcggccattgcggaatacaccggggcccacatccacattgcccacattgccagcaagggggctgtggacattgtccggaaggccaaggcccgaggggtgaacatcacctgcgaagtgacggtccaccacctgacccttaccgatgaagcctgcgccggttacaatacggccacccgggtttctcctcctctccggagccgggatcatgtggaagccatgcgggcggggttgaaggacggcaccatcgatgccatcgtaacggaccatgctcctcatgcgccggaagaaaaagatgtggaattccggtatgctcccaacgggttctgcggcctggagacttccgtaggggtgatcctgacggagctgtaccatacgggagaattctccatcaatgaaatcgtcaacaaaatgagcaccagcccggcccggatcatgaatctggacgccggcagcctgaaggtaggccggaatgcggacatcaccatcctggatctggaccgggaatggacggtggacagtgaaaaattctatacccggggcaaggtgactcctttcaacggaaaacactgcaaaggcatggcagtggcgaccatggtcgatggccggtttgtgatgaaagacggtgtagtatgcaaaaagtaaaaggcaagttggtattgaaagacggaagcgtctatgaaggaactttgtacagcacccataaggcagtgggggaagtggtgttcaccaccggcatgtccgggtatcaggaaaccctgacggacccctctttctgcgggcagatcgtcatcttcacctatcccctgatcgggaactacggctgcaacgacctgttctgccagagtgacggctgctgctacaaggggctgatcgtcagcgaactgtgtgacgaaccctccagctggcgggatgaaggcacggtgctggaattcctggaaaagaacgatatcccggtgctggccggtgtggatacccgggcgctgacccggcggatccggtcctacgggacccttcagggggtgctggtgccggcagatactccggacgacgaagtccaggctcttttggccactcccgaagaacatgaccaggtggcccaggtaaccaccaaaaaggtgtacaccatgggaccggacgacgccaaatattccgtagccgtcatggactacggggtgaagcggcacatcctggaatgcctggtggaaaaaggctgcaaactgaccgtattcccggcggaaactccggcggaagaggtactggccatggatccggacgggattttcctgagcaacggccctggggatccggcggatctgacggtggaaatcgacaacatcaaaaagatgatcggcaagaaacccattttcggcatctgcatggggcatcaggtcatggcgctggccaacggggccaagaccaagaaaatgcttttcggccaccggggcatcaaccagccggtccgggatctggtggaccacaagatctgcatcacctcccagaaccatgggttcatggtggatgaggattccctgaagggactgccggtggaagtgatcaaccggtccctgaacgacaacaccatcgaaggcctgcgctatctgaaccatcccaccttcacagtgcagtaccatccggaagcatcccccggtcccagcggcaacgcttatctgttcgaccggtttatcaaaatgatgggagggcactgatatgccaaaaaaagagaatgtaaagaaagtcatggtcatcggttccggcccgatcatcatcggtcaggctgctgaattcgactattccggcacccaggcctgccgggccctgaaggaagaagggctggaagtggtgctggtgaactccaacccggccactatcatgaccgatgtgcacattgcagatcgggtgtatgtggaacccctggatgtggaattcctggaagccatcatcgccaaggaacggccggattccctgctggccaccctggggggccagatcggcctgaacctggccattgaactggacaaaaaaggcattctgaagaaatacaatgtgcagctcctgggcacccagatctccagcatcatgaaggcggaagaccgggaactgttcaaagaaaccatggagaaactccaccagcccattccccagagcaccattgtggaaagcgtggatgcggccaaggaatttgccaagaaggtgggcttccctctgatcgtgcggccggcctacaccctggggggcaccgggggcggcattgcccacaacatggatcagctggatgacattaccaccaaagggctcatgtactccctgatcggtcaggccctgatcgaacggtccgtagccggctggaaggaaatcgaatatgaagtggtccgggaccatgaagacaactgcatcaccgtctgcaacatggaaaacatcgacccggtgggggtccataccggggactccatcgtggtggctccctgccagaccctgactgaccgggaagtccagatgctccggaccgccgccatcgacatcgtccgggaactgggggtggaaggggcctgcaacgtgcagtatgccctgaatccggacagtgaagaatacatcgtcatcgaagtgaacccccgggtaagccggtcttctgccctggcttccaaggcaacaggctatcccattgccaaagtggccgccaagatcgctgccgggtataccctggacgaaatcgaaaacgcggtaaccaagaaaacctccgcctgcttcgaacccaccctggactactgtgtcatcaagatcccccgctggccctttgacaagttcgtcaatgcggaccacaccctggggacccagatgaaggccaccggggaagtgatggccatcgaacggaatatcgaagccggtctgctgaaggcggtccgctgcctggaaatcggcctgactcatatggacatgccggaactccacaagctgacggaccaggaagtctttgaaaaggtccggaaagtggacgacgaacggctctttaccatcgccgaagccttccggagagggatgaccgtggaccaggcccatgccatcaccaagatcgacgaattcttcctgcggaagatccgccacattgtggaactggaagtgcgtttgaagagcgaagaactgacgccggaactgctccgggaagtgaagaaacggggctttgccgatgtgaccatcgggaaactggtagggaagaccggtctggaaatccgtgccatccggaaggaatggggcattacccctgtttacaagatggtggatacctgcgccgcggaattcgacgcggaaactccgtactactactccacctacggggtggaagacgaagtggaagacacccccaacaagaaggtgctggtactgggctccggtcccatccggatcggccagggggtggaattcgactactgctccgtccactctgtatgggctctgaaggatctgggctacgaaaccatcattgtaaacaacaacccggaaaccgtatccacggacttcgataccgctgaccggctgtatttcgaacccttgaccctggaagacgtgctgaatgtgatcgaccgggaaaaaccggaaggggtcattgtccagttcgggggccagaccgccatcaacctggccggtccgctccatgactgcggggtgaagatcctggggtcttccgtagacagcatcgaccgggcagaagaccgggaacggttcgacgaactgctgaccagtgtggggattccccgtccgaaaggccacacggtgtttgacatcgacggggctctgcgggctgccaacgatgtgggctaccctgtaatggtgcgtccttcctatgtattgggcggccgggccatggaaatcgt

SEQ ID NO: 2742 - DNA, 23294 bp, synthetic construct
  misc_feature 1..23294: note = Synthetic
  source 1..23294: mol_type = other DNA
accggtgtgatcaacgggcgtgacctgggcggctactatactgccgacggccagttccgcgtcaagaccggcatgctgttccgcacggccaacctgcatgacgcgacgcctgccgacattgcgcttctgcagtcgctcggcatcacgaagatcatcgacctgcgctccaacatcgaggcggcgctcaagcccaacaagcctgttcccggcgcagagtatctgcacatctccccgctcacgatcccgaacctgctcgtcatgaagtcggatgactggatggccattctgcgcgcgacccgcaccggcgtcatggatacctatatggcgaatatgtaccgtcagtgcgtgcaggatcctgtcgcgatcaaggcgaccaagcagttcttcgcagaggttctggacgctgacggcgcgcccatcctctggcactgcaaggacggcaaggaccgcaccggcattgaggccacgctcctgctcggggcgctgggctgcgatctggacgtgatcagagccgagtatgagaacacgaacgtcttcaaggccgaggcgcgtcagagcgcctatgacaaggcatacaagatcacccgcagcgactggatcgcctccgaattcatgaagtatgagggcgtcagccccgagtggctggatatcgccctgaacatcatgaaccgctacggcggcatcgagggttatctgcgtcaggtcattggtctgacagacgatgactttgccgccctgcgcgctacatatctggagcctgttgcggagcagcaggagcctgttgtcgatgcgctggcgaacgccgcgtaaagcagcaaatctcaaacgtctccatcttcggatggagacgtttttgcttttcggattgaaaacgcgccgaaagcttgctatactgatctttggataacaagccaagtttgggagaaagaggcggtttgatgaaaagacttctgacagttctgcttgtcgcggctgtgctctgcacgggccttggcgtgacgagcgccgctgccgcgcccgcgcagccgcactgggtcagcgcgtggagcaccagccccgtggacgcgagcctgtctgagctcggcgcgctttccggcgtctcggtgccggtggtgaatgtgtcgtcccgcgtcgtgattcgtccgacgatgacgggtgatcaggtgcgtttggtgttttccaatgaatacagcaaattcccgctcgtgatctccgcctgcacggtcggcgcttcggcaaagggcgatgcggcggtctcgctctgctcgctgcgcacagtgcgctttcacacgctcggctgcgtggtcatccccgcgggcgaaacggtcacctctgatcctgttgccatgtccgtcacagccggggaggcgctcgccgtgacgacgtattatcgcggcctgtccgccatgcgcacgatcgggctcatcggcggcaggagctatgccgccgtcggaaaccggacgcacagctctgccatgctcggggcactcccgctcaatttcaccgccgacagcggcgcctatgatatcatcccctgcctcaaggaggtcgatgtgcgcactgccgatcccgctgccggtgcgtgcgtggtcttcggcgattccaccgtcgccaatgagatcccgcgcatgctcgcggcccgtctgcgcgaaaacggcgtcacgagtgtgagcgtcacgcaggcagccatcaagggcgaccggctgagctatgacggcgtcggcaagcttgccgcgatcacgggccgcgcgggcgtggatcgtttcgcgtccgatgtgctcgatcaggcgggcgtcacctccgtcattgtgaagatcggtgtaaacgatgtgatccatccgcagctgaagagcaagcagggcgccgcgccctacgcgagcttcgagcagctcacttcggacttcaccgctctcgtggagatggcgcacgcgcgcggcgtaaaggtctattttgccgagctcacgccgtggaaaggctatacgcgcaatctcttcggcatcacgggcgacgacgtccggtggacgccggagatcgacgccctgcgcgtgcagctcaatgactggatgcgctccgaggcctgtccggcggacggcgtggtgttcttcccggatctgaccgatccgaccgatcctgcggcgctgaatccggcgtataccaccgacggcgtccactttaccgacgccggcgcgcagcttgccgccgatgcgatcccgctggagtggtttcgttgagcgcgccggagctgccgccggaggcgctggaggatctctgccgctatctcggtgaatacgggtggaagccggagctcgccgtgcacatcctgcgccggcgctacggcatcgagctcaagccgctggacgcggaatacctgttcgccgtcgaaatgcggcgcagggcatacgaataacaaaaggctccccgagcaatcggggagcctttcttgcgttcgcttatgcttttcgtttggctctgccgccgcgcagctcgaacttgcctgcgcaccagagcttggtggcctcggcgacgagcgaccattcggcgtctgtcagcacgcggcgctgcagcgtcacggcgtcgtcatcgtccagaacgggaacggcagtttgcagcaggatggggccgatcccgccggtctcgcttacgagataggccgtcgcgcccgtgagcttcaatccctgacgcagcacctcttcgtgcaccgcgagcccgcgcagatccgcgaaggcgggcagcagcgagggctggatcgtgaggatgcggttgcggaacgcgctcgccgtctccttgccgatgccggggcgaaagcccgcgtcgatcacaaagtcgatgtcgaggtccttgatcttgttgcggatcgccatgtcatagctcgaggcgttggggaacatgcccggctcgaccacgatggtctcaagccccgcgtttttcgcgcgcaccagcgcgtaggcgttcggatcggaggaaatcaccgcaagcagcttcagctccgggatctcaccgaagaatatggagtccagcaggctctgcagcttcgttccgtttcccgaagccaaaacagcaccgcgaatcgttgccatgattactccctcccaagcagccgggcggctgcgatctggttattgtcctcgcgggcatacagcagctctgtgcgccgccgcagctcgtctttctgtccggacagcgacatggcgcggtcgatcatcgcgcacatgtttttcgcgtccgcatcctcgagctccacatagttgtcctgctcgatatagtccaaaaacgcccgcaccttcgggtcgtagctcacgcctgcgagcggaacgccctgtccggcggcgaacacgagcccgtgcagccgcatggagaggaccgcctgcatccgggacatcaccccgatgctcagcgcggcgggcatcggctcgtcgatgagatagtgcggcaccgtaagctcctcggtcacaagccgcgcagcgtcaatgtccgcgcgtgggttgatgcacaggaacaccggcgtcagcccatagcgggtataagcgtgccaggccgccgcggcaacggcgcgcgtgcgctcctcaaagccgcgccagcggcgcagcacgaacgcgatatacttcccgtccgggtccatgccgtgctgctcgaagaagcgctccacctgaaacgcgcttgccgcctgcaggcggataacggggtcagccgcgagcagaacctccggcttttcgatgccgaactgccggagcacgtccagcgaatccggctcgcgcagcgtgatcacgtccacgttgcggttaattgtgcgcgcggcgagcttctggtcgccgggcacgacgatcgggccgatgccgcagccgtacatctgcacctgcgcgccgcagtgcttggcgcaccacagcgtgtagaggtaataccagagactcatccggctcgtgacgtcctgcatcaggttgccgccgccgttgagatagagcttcgtgcgccgcaggacgcgcgccatgcggatcaggtcgaagctgtgcagcgtgctcacgccgtagatccggcgcgtttcgtgcggacggcgcgagagcaccgtgacgggcatgttcgggtcgatggcgcgcatctcctgcaaaatcgcctccagaatcgcgtcgtcgcccgcgttgccgaagccgtaggcgccgccgatcaggatgccgtcgcgcttgccgtgacgccacttttcgtggcggtagatcgtgttgtaaatctccagctggcgttcgcccgtggcgatcacggagagacgctgcctgccggtgtcatagagcgcctgacccattttctcacgcagggcggggtcctttgcaaaggtcacgagcgcggaggcaaagccgtccacgtcgcccggctccacgagaaaaccgttcacgccgtgctcgatcagatccggcacgccgccgacgctcgtcgccaccgtggcaaggcgggcgcgcgcgccctctgtgagcgcgtaggggaagctctcggagatggaggacagggcgttgatatcgagcgccccgtagaagcggtcgaggtccgagatccagccgaggaaaaacacgtccgcgccgatgccgagactttcggccagcgcctcaagctccgcgcgctgcttgccgtcgcccgcaatggccagacgcagacgcgcgccgcggcgccgcgccagcgcgaccgcgcgcagcagcagcgggatgtccttcacgggatcgagccgcgccgcaatgccgacgatcacgtcgtcgggcgcaacgtcgaagtcatacccggcgaaaaattccttccgatcgacgcgcgggacctcgtgcgagaagtccagaccgttataaatggaaaacatccggccggggtcaaagccgcggtcgatgagcttttgcatcagaggattggagacgcacacgcggtagtttaaaagccgcagcgcgaccttgttggcattgccgtaaaacaccgtcgcgaacgggcggccgagatagtcgagccggtagtcgctgtgcacggtggtgagcaccggcacgcccacgagcgggcggagcatcgcgccgatcacgttcgctttcgcgccgtggcaatggacgaactgatagccctcctctcggatcagcttctgcagcgcgcagacgcaccagagcacgttgtgctgcatcacgatcgtcggaatgcccagcgcctgcgcctcatcggagaaaatgcccctgcggaagcaaacaaggcgcacgtcaacgacctgacccagataggtcaggagcgagtgcacatgtgtttttgcgccgccggtatcgccgccgccgatgagatggataactttcacgcttgcctcccgggcacttgtcggatgggaaaaaacagagtatactatcgttattcgccgaaaaacagatctgtctgcgcccgtgcgcagagtctcccacattgttcaatacattctagtataacttaggtttgcgcaggagtcaactttacataatgtcattttttgacgtatttttggcgctttttcagcgcgcttccgcgcgcggatttcaagaggagaagaccgacatgacaacgctttatctcatccgtcacgcggaggcggagggcaatctttatcgacgcattcagggccagtgggacggagagatcacgccccgcggcaagcgccagatcgaggcgctggcagagcgctttcgggatgtgccgctcgacgcggtgtattccagcgacctgcgccgcacgatcgagacggccggcgcgattctgcggtatcacgacctgccgctgcagaccacgccgcgtctgcgcgagatctatatgggcgcgtgggaggggctcgcctggggcgacgccgaccacgccgagcccgagcagatgttttacttcaaccacgaccccgcgcgctggcagatccccggcgcggagccctatgccgtcctggaggcgcgcatgacgtcggcgctgcgcgacatcgcggcgcgccaccccggcggcacggtcgccgtcgtgagccacggcaccgccatccgcacctatcttgccgcccggctcggcatcgccagcggagagatcggcacgctcgcccacggggacaacacctgcgtcgccaagctggagtttgaaaacggcgcggtgcatgtcgcgtaccacaacgacgcttcccatttgccggaggagctcagcacgttcacacgacagacctggtggaagggcgtggacaaggatccgggcaacctgcgcatggagcagatgacgttcccgcgcgacagcgcgttctatatcgcctgctaccgcgacgcgtggcgcacgatccacggcacggaggagggcttcaccgcccagctgtatcttgcctcggcgcagaagcacgcccgcacgcgggatgccgtcatgcgcctgatgagcggcgacacgcccgtcggcatgatcgagctcgacgagcatcacaaaggcgcggacgggcggctgtggatcagctttctttatctcacgccgcacgcgcgcgaacagggctggggcgtgcagctgctgggtcacgcggtctggtactgcgagacgcgcggctttcccggcatccggctgcactgcgcggcctcgaacgagcacgcaaacggcttctatgcgcactacggctttacctgcgtcggcgaggccgcgggtgtgcgcggacggctgctgctgctcgaaaagcccgtgcgcggccggggcgtcaagcccgtcggaccggagacaatcgactggaaggagcatgaaaaatgaccacaccgactatccttgccatgaacgttcagcccgaaaagctcgggaagctgcgctttctctgcctgcggctggggatcggcctccgggtcgtggagcagcgcgccttcggctgctcggtgggcgacctcgttgccggcaatgccgcgcccgtgcgcggcaagtgggcgccgtttcaggacgagatgctcgttatggcaagctttcgcccgggcatgctcgatgcgttcctcggcggttttcgcgagatgggcatcgcgccgatcccgctcaaggccatgctcacggagacgaacgcctcctggacactggagcgtctgcacgccgcgctcaaagaggagcacgagcagatggcggcgttccggaagcaggcgggaaagtgagatgctctcagcatatttgatttaaatggctaaattaacgtgcccgaaatcgtgcactttcacgaaaatgcaccgcgtggtgaaaaacggcgttgactttcgcggtgcagggtagtaaagtgtggttatattccgaaaaagaggggaatcaccatgaaaaaaattatcactttgcttttggctgcgatgatgctgctgagccttgccgcgtgcggcagctccaacggcggcagcggcggcgacgctgctgcggacggcgaagtttacaacgtcggcatcgtgcagctcgtgcagcatgacgcgctcgacaaggccaccaagggcttccaggacgcgctcgtgaaggagctcggcgaggatcatgtaagcttcgactttcagaacgcctccggcgacagcgccaactgcgccaccatcgccaacggctttgtggccgacggcgtggatctgatcatggcaaacgccacgccggcgctgcttgcggccgcgaatgccaccaccgagatccccatcctcggcacctccgtgaccgattacggcgatgcgatgggcatcaaggactttgacggcgtcgtcggcggcaacgtctccggcacgagcgaccagcccccgctggaggagcaggccgcaatggtcaccgagctctgcccggacgccaagaccgtcgccatcctctattgctccgccgagccgaactccgtgttccaggccaaggccgtgcgcggctatctggaggacgcggggctgaccgtcatcgagaagaccttctccgactccaatgacgtcgtcgccgtcaccaccagcgcctgcgacgaggcggacgccatctatatcccgaccgacaacaccgccgccagcagcgcggacgcgatcggcaaggtcgtccttgagaagaaagtgcccgtcatcgcgggcgaagagggcctcatggcggcctgcggcatcgccaccctctccatcgattactacaacctcggctatgccaccggcgagatggctgccaagatcctcaccggcgaggctgatatctccacgatgaaggtcgagtatgatcccagccccgtgaagaagtacaaccctgagatctgcgagcagctcggcatcgacgccccggagggctacgttgcgtctgaggcctgattatccgggaatccatcgttcccgcccgtcgacttttgcttcggcgggcgggatttttcattgacggaacctgcgcgcgtgtgataccatgacgtgtgttttttaaggaggcgagcagcttatgcagcttcaagtggaatatatcgaccagtcgcagtgcgcaccgacgggctgcgagagcgtcacggcggtcatgctgctgcggtatctgggcgtggacatggacgtggatacgtttttggatacctgcctcgaccgccgcgatttcgagctgcgcgacggcgtcctctacggggcgcacccggcggagtgcttcgtcggcgatccgcgcgatcccgaggccatgggctgctatgcgccggtgctgcgcaaggcgctttcgcgcgcgctgccggagggctggtttgccgtggacgagacgggcgcggagatcgatgagctcgtcgagcgctacttaaagcgggaaaagacgcccgtcgccctctggacgacgattgacttaaagccccatgtcgagggtccctcctggcggctgtttgattccggcaaagaatttgtctggcgctccaatgagcattgcctgctgctgatcggcgaggacggcgaggattatatctgcgcggatccgtgggaaaaccatggcatcgtgcgctatgacaaggcgctcatgcgccgccgccaccgcgcgcagtatatgcaggccgtcggcgtgcgccgccgctgagatcatgacgatctaccccgatttttacgacgtgtttcgctgcgcggcgtccggctgccgccacacctgctgccgcggctgggagatcgatatcgatgcggagactgccgcgcgctatcgcgtcctgcccggagaacttggcgagcgcctgcgcgcgtcgatcacggagacggagagcggcgcgacgttttgcctcacggaggatgagcgctgcccgtttttgcgcgctgacggcctttgcgatctcatccgcacgacgggcagtgaagatatcctctgcgacgtctgcgcgctgcatccgcgctttttcgccgaggtcggcggcgtcacgcttgcggggctcggcctttgctgcgaggaggcgtgccgcctgctgcttgcggagaaaaagccgctgctgttttgcgcggaagatcgagcagttccgctcgcggcgctcaccggatgcgcgttttcggacgatatgctgcgctttcagccgcgcaccgacgaggcaagctgtatggcgctcctggagcgttacgcccgcaccgagccgatcgacgaagcgtggacggcgcagctcgccgccctgcgcgccgatgctgccgcctgtgtctgcgcggcagaggcgtatcggacggaatacgacagcgcggtcttcgaccgcatcctgcactacatcctctatcgccagctcgaccgactggagacggacggaccgcttgccctcgcgcgctacgcgcaggacgcggcgcagtttgtgttcctcaccgccgctgtcaccggcgacctccccgaagcgctccgaagatggtccgagcagatcgaatacagcacggagaatgtggacatcttgatcgcaggataaaacaggcttgcatttctcatgaagcatgatataatgtaaatgttcttataccataccaagaacgatcaggttgctacaataaggtagtaaaccgaagagctctaacgccccgtttctttacggggcgttatctctttttaaaacggacagttgaacaagaatgtaacgagatgtataatgacggcaagagaaggaggcgtgtatatgagaccgtatggtattggattggatatcggaatatcgtccgttggctgggcggcaattgcgcttgaccatcaggactcaccctgtggaatcctggatatgggcgccagaatttttgacgctgcagaaaacccaaaggacggcgcctctcttgcagcgccgcgaagagaaaagcgcagccagcgccgccgccttcgtcggcatcggcatcgcaacgagcgtattcgccggatgcttttgaaagaagggctgctgtcagaggcggagctgacaggtctgtttgatggtgctcttgaagatatctatgcgctgcggacgcgagcgctggatgaggcactgacgaagcaggagtttgcccgtgtgctgctgcacctgtcgcagcggcgcggatttcgctccaatcgcagagcgactgcagctcaggaggacggcaaattgcttgatgccgtctcggagaatgcaaagcgcatggcagactgcggatatcggactgtcggcgaaatgctgtaccgggacgccgtgtttgcaaagcacaagcgcaataaaggcggcgaatacctgaccacggtttcccgcgcgatgatcgaagacgaggtcaagcttgtttttgcatcccagcgcaggcttggctctgcgtttgcttcggaagcgctggagcagggctatctggatattctgctcagccaacgctcgttcgatgaaggcccgggcgggaacagcccgtacggcggcgcacagatagaacggatgatcggaaagtgcacgttttatcctgaagagcctcgcgctgcccgcgcctgctattcatttgagtacttcagtctgctgcagaaagtgaatcatattcgtctgcaaaaggacggggagagtacgccgctcacatcggagcagcgactgcagctgatcgagcttgcgcacaagacggagaatctggattatgcccggattcgcagagcgcttcagatcccggatgcatatcgtttcaatactgtttcataccgcatcgaaagcgatcctgccgccgcggagaagaaagagaagtttcaatatctgcgtgcctatcacacgatgcgaaaggcgattgacggcgcgtcaaaagggcgctttgcgctcctgtcgcaggagcagcgcgatcagatcggaaccgttctgacactgtataaatcacaggagcgcatttccgaaaaacttacggaagcagggatcgagccctgtgatattgctgcgctggaatccgtttccggcttttccaagacgggtcatatctcactgcgtgcatgcaaagaactgattccttatctggagcagggcatgaattataatgaggcgtgtgcagcggccgggatcgaatttcacggacattcaggcacggagcgaacagtcgttctgcacccgacgccggacgatctggcggatatcacgagcccggtcgttcgccgcgctgttgcccagacggtgaaagtgatcaatgctgtcatccggcgctatgggagtccggtgtttgtgaatatcgagcttgcgcgcgagctggcgaaagatttcacggagcgcaaaaaactggagaaagacaacaagaccaaccgcgcggagaacgagcggctcatgcggcgcatccgagaggaatacggcaaaatgaatccgaccggattggatctggtcaagctgagactctatgaagagcaggcgggcgtctgcccgtattcgcagaagcagatgtctctgcagcgcctgtttgagccgaattatgcagaggtcgaccacattattccttacagcatctcgtttgatgattcccgccggaacaaggtgctcgtgctcgcggaggaaaaccgcaacaagggaaaccgcctgccgctgcagtacctgaccggagagcggcgggacaatttcatcgtctgggtcaacagctcagtgcgcgattatcggaagaagcagaagcttttgaagccgacggtcactgatgaggacaaacagcagttcaaggagcgcaatctgcaggatacgaaaaccatgtcgcggttcctgatgaactacattaacgatcatctgcagtttggcgtttccgcaaaagagcgcaaaaaacgcgtgactgccgtaaacggcatcgtgacgtcctatctgcgcaagcgatggggcatcacgaagatccgcggcgacggagacctgcatcatgcagttgatgcgctcgtaatcgcgtgcgccacggacggcatgatccggcagatcacacggtatgcgcagtaccgggaatgccgctatatgcagacagacaccggaagcgctgcgatcgacgaggccaccggagaagtgcttcgtatcttcccgtatccgtgggagcatttcagaaaagagctggaggcgcgtctcagcagcgatcccgcgagggcggtcaatgcgcttcgcctgccgttttatctggacagcggcgagccgctgccaaagccgctgtttgtttcccgcatgccgcgccgcaaggtcagcggcgccgcgcacaaggataccgtcaagagcccgaaagccatggcagaaggcaaagtgatcgtaaggcgtgcgcttacggatctgaagctgaaaaacggcgaaatcgaaaactactttgatcccggcagcgatcggctgctgtatgatgcgctgaaagcgcggctagccgcatttggcggcgacggagcaaaggcgtttcgggaaccgttctataaaccccggcacgacggaacgccgggaccgctggtaaaaaaggtgaagctctgtgagccgacgacgctgaatgtcgcggtgcatggcgggaaaggcgtcgcagacaatgattccatggtgcgtatcgatgttttccgcgtcgagggcgacggatattacttcgtgccgatctatattgccgatactttaaagccggttttgccgaataaggcttgcgtggcgtttaagccatattcggaatggaggacgatggatgatcgtgattttatcttctccttgtatccgaacgatctgattcgcgtcacgcacaaatcggcgctgaagctgagccgcgtgagcaaagaaagcacgctgccggaaagcatcgagagcaaaaccgcgcttttgtactatgtcagcgccgggatctccggagcggcagtgtcctgcagaaaccacgacaattcctacgagatcaaaagcatgggaatcaagacgctggaaaagcttgaaaaatacacggtcgatgtgctgggcgagtatcacaaggtcgagaaagagcggcgcatgccgttcaccgggaaaaggagctgagcagggcgtttcggaacgtgatgatcgaaaatcccgcgcatatttctctcaaaaatgagcagctgatcatccataccgacagagcatacagcctgccggtcgaggatctctctgcacttttgcttgaaaaccggcaatccacaatcacaacagccgcactgtcccgcctgggacagtgcggctgcgctgtctttgtctgtgacgaaaagcatctgccatgcgccgtgctcacgccctatgcgcagcacagccgggcgctcacggcggcgcgggagcagctggcggcgacgaaaccgctgcgaaagcgttgctttcgcaggatcttttgatcgtctattataccataccaagaacgatcagggaactacaacgcagatacgagggcagttacgcccgtggacattataccataccaagaacgatcagggaactacaacgcggtgtgcaaaaaggaacattgccgtacgattataccataccaagaacgatcagggaactacaacgggctgagcgagtacaaccagaaagtatccattataccataccaagaacgatcagggaactacaacagcgcctgcgactgcctgtcctctccccatattataccataccaagaacgatcagggaactacaaccgggtttgtcaggttggtggatagctccgaattataccataccaagaacgatcagggaactacaacaatatctgagtacagataatcgtctttctcattataccataccaagaacgatcagggaactacaacttttggcttgcagaggcagacacagacctcattataccataccaagaacgatcagggaactacaacgccatgcaagcagcgtacgcccgtttccgtaaaatgtagtaacagcgctttttgcatcatgtgatcagcgcgtacagccagtggatgaccggcagggtaaacaggcacaggacggaggagaggatgttcgtcgcgctggcgaactgggcctcctcctcggtgcggaacatcgtggtaaactgcacgaccatgacggcggagggggcgcccgccgtgagggcgacgaccgtgaggatctcgcgcgcgtgcggatgcaggtgcatcacgccgcacaggcgcagcgccaaaatcgccgcggcggggtacagcagcagccgccccgcgcagaggagataggcttttttgtccccgaacacgcggcgcagatcggcgctgccgaggatcatgccgatcgaaaacatgaacaccggccccatcatgtcgccgagcgtgctgacgctctcgcccagcagcccgggcagccgcagaccggacacccacagcgcaagaccgatcacaacggcgatcagcaccgggtttttcacgaacatggcgaggctgatatgcctctgcccgctcagcacggcctgcccgtgcgtgaagatgagcaggttcatcacgaaaaacgcagggcttaagtaaatgacccactcgccgcccatcgcgctcgcgatcagcgggagcatgaagttgcccgcgttggggtactccagcgtcgtatagtccacgaccgtgagcggcaccgcgcggcgcagagccgccgtgagcagcgcaaacacgaccaccacgatcagcgagccgacgagactcacgcccatacccgcgagctttgcggcgctgaattcatactggaaggcgttgaccatggcgcacggcgtgagaaaccagagggcgaactgccccagcgccttgctgtcctgataggtcatcagcttcgagcgcacggcgagaaagcccagcgcgatatagatggcgagcctcgcgaccttctgcgcgatcaccatggtgagactcatgtacattccccttgctcaaaaacacccccgcagaggcattgcctttgcgggggcaaacgtttggttttatttcgcgtaatcgacggccttggtctcgcggatgatgtggaccttgatctggccgggataggtgagctcgtcttcgatcttcttggcgatgtcgtgggcgagcagcgtcatctgatcctcgctgacctcctcgggcttgaccatcacgcggatctcgcgtccggcctggatggcatagcagctgccgatgccggggaaggacttggtgacctcctcgagcttctccagacgcttgacgtagttttcgatgttctcgcggcgcgcgccggggcgggcagcggagatgctgtctgccgcctgcacgatgcaggcctcgacggtgtgcgcctccacgtcgccgtggtgcgcctcgatgcagtggatgaccgcttcgttttccttatacttgcgggccatgttcacgccgatcgtgacgtggctgccctcgacctcgtggtcgatggacttgcccaggtcgtggagcagacctgcgcgcttggcgatggcgacgttcgcgcccagctccgaggcaatgagcccggagatgtgggacacttcgatcgagtgctgcagcacgttctggccgtagctggtacggtacttcatgcggccgagcagacgcacgagctcggggtggatgccgtgaatgttcgtctcgaacacggcgcgctcgccctcggccttgatggtggcgttgacctccttctgggccttggcgaccatttcctcgatgcgggcggggtggatgcggccgtcggcgatgagcttctccagcgccagacgggccacctcgcggcggactgggtcaaagctggagacggtgattgcctcgggggtgtcgtcgatgatcaggtcgcagccggtcagcgtctcaatggcgcggatgttgcggccctcgcggccgatgatgcggcctttcatctcgtcgttcggcagcggcacgaccgatacggtcacttcgctggcgtggtcggcggcgcagcgctggatcgccgtggcgacgatctcgcgggccatgcggtcggcctcgtccttgtactgggcttcgatctctttgagcttggcggccttctcgtgcgtgacctcggcttcgagcgtctcgatcagataggccttggcttcttcgatggtgtaaccggaaatcttttccagcatctcctgctgggttttgcggatggtgcggatctcattctgctgtgcttccacgttggcaagcttggcgttgagagattcggtcttgcggtcgagcgcgtcggtcttgcggtcgagcgtttcctccttctgctggaggcggcgctcctgcttctgcagctcggcgcggcgggatttctcctcgtgctcgaactccgtgcggctcttctgaatctcttcctttgcttccacgagcgcttcgcgcttcttgctctcggcgctcttgagggcgtcgttgatgatgcgctttgcctcttcctcggcgccggcgatctgcgcctcggcgaccttcttgcgatagatcacgccgagcacaaagccgatcacgagcgtggcgatgcagatgatgacccaaataatcgggctcatgtttgtgtttgttcctccattctgattgcgttccaaataggtgttttgacgaaaggcggaccataaaacgtatccgccgaatagtgaatcgtatttctcagcagcggctccacactgccgctgaaaatagtatcaaatcattctacctttttttgtgcattatgtcaagcggatatatactttaaaataattaataccgattcaggctttcccgccaacatccgcttgcgcggagtggaacattccggtataataattagatgttaatttgatttcccacaggaggcgcaggcatgtcagcgctcacgtttgtgttcccgatcgcggtaatcctgatgatcgggtttttgctcctgcatctggagttagcgaaaaaaaccgccatacagccgcgcaggggacgcttcggtgctgtcggcgcgctgctcatcacggcggtctacggcgtcacggcgtttatcggtctcggcgaccgcgtcgccccgcagacgttctatgtgcccgttgcgggcgagcgcgcgacgatcacgtttcagcagccggagcgcatcgggcgcgtgatgttctacgccggcatcggcacgggcagctggactgtcgtccgtgatgacacgggcgagacgctctgcaccctgccgcaggaatacaaagacgtgctcaaatggtacgagaccgcgcccgaggacggcggcgagacgagcgtttcctccgtctcgatcctctgctccggcaccggcgcgcagctcggtgagatcgccctctaccgcccggacggcacgcgcatcgtaccgcagcatgtgacaaacgacgcgctcatggacgagcaggcgctcgtccccgcggaatcgacctactgcaacagcacctatttcgacgagatctaccacgcccgcaccgcgcaggagcatctgacgaatctcaggccctacgaggtctcgcacccgccgctcggaaagctcatcctctccatcggcatcacgatcttcgggctcacgccgttcggctggcgcttcatgggcacgctcttcggcgtgctgatggtgccggtgatgtggcggcttgccggggagctgtttgaagatgaccgcatcgccctgtgcgcgacggcgatcttcgcctttgacttcatgcactttacgcagacgcgcatcgccacgatcgatacctacgcggtgtttttcatcctgctgatgtatctcttcatgtggctctggctgcgcgacgggcgggcgcgcgacctgggactctccggattgtttttcgcgctcggcgccgcgagcaagtggacctgcctctatgccggcgcggggctcggagtgctgtggctggtgcactggatcatcgccggtgtgcgggcgcacaccgcgccgaagatcagcctgaaaaagcagcccgaggcgctctcggcgcagaaaagcgcctattaccgggcgctggggaagaacatcctcttctgcctcggcgcgttcgtggcgctgcccgcgctggtgtattatctcagctacacgccctacggcaccgccaggggcctgcacggcgtcgggatgtatttcacgaaggaatacttcaccaccgttgtggagaatcagaagttcatgttcacctaccacgcggggctcgtctcgacgcatccctactccgccccgtggtggaagtggctgctggacatccgcccgatcctgtactatctgcgctacggcgaggggacggtcacgagcatcgcggcgtttgtcaatcccgtgctctgctggggcggccttgcagcggtcatcgtgtgcgcggtgcgcgcgctgcgccgcggcgaaaagcgcgacatgcgcgcggtgttcatcgtcatcgggtatctcgcgcagcttctgccgtgggtgttcatctcgcgcatcacgttcgaatatcactattttgcctgcacggtctttctcacgctcgcgctcgcgctgctgttcgacgagctgcggcagcggggacagatgcgcctcgtctatgcctgcacgggaacgagcgtcgcgctctttgcgctgttctatcccgcgctcgcgggcgtcgaggtctcgcgctcgttctctacgcactttctcaaatggctgccttcgtggcctttataattatacagaaagaaggattttattatgatcgcaatcggttctgaccacggcggattcgccctgaagcaggagatcatgaagcacctggaggctgcgggctatgcctataaggactatggcacgtataccgccgacagctgcgactatcccgtctacggcgagagggtcgcccgcgccgtggcaggcggcgaggcggagcgcggcatcctcatctgcggcacgggcatcggcatctcgatctccgcgaacaaggtcaagggcatccgcgcggcgctctgcggcgactgctactccgccgaaatgacccgccgccacaatgacgcgaacatcctcgcgctcggcgcgcgcgtgctgggacccggcctcgcgctcaagatcgtggacacgttcctgaccaccgaattcgagggcggtcgtcacgcccgccgcgtcgcgctcatttccgacatcgaaaaccgctgaccctcaaaggaggaaacccggaatgggaaacgaagtataccgcccgaagagccggcccggcaggagactgcggcgcattctgacggcggtggttctggcagctgccgtcgcggtcatcgcgctgtttttcatctgccagaaatatctggtctttaccgccgacggtgtgcgcatcgatcccagggcggcgtctgcggcggcgtccgccacgtcggcgcccgccccggaggtctcgccgctcgtggtggacgtggaggtggagatcgggaaaaccgactattccaccctcgtcaccgacgccggtacggggctttcggcgctgcacggaaaatatctcaccgccgaccagatcacgccggagaatctcaagtccgccgccgcgcagatcaaggcggcaggcggcgatctgctcgtgctgcagatgaagccgtcctccggcaggctcagctggaagtccgctgtcgcgctcgccgatgaggccggggcgaacggctctgccgagcttcaggacacgatccgggagctcaaagaggacggcgtccgcttcgccgcaacggtaagctgctgcgcagactccgcgcttgcgcaggcaaagagcgagcttgcgctcaagagcgcgggaatgccgtattccgacggctccggcagctgggtcgatcccatgaacgagacggtgcagcagtatgtcgcggcgctctgcaaggagctcgcgggcatgggctttgaggagatcttctgctcctatatgcagacgcccgccacaaccgcggatctggagctcggcgaggacgtctcgcgctccgacgccgtgatgggctttgccaagaatctgcgccggagtgtccggagcgcgaacgcgaagctctcgatcgtgtgcagcgtcgattccgtggcctatgaccgcgcgaatctcaccggacaggagctgacgctcctgccgcgcgtgtttgaccggctgtgcgtctttaccgacgccgctacgctcgcgcttctggaggggaagatgacggacgcgtatccggagctcgacaccgagacgcgcgtcgtgccgttcatccccgccaaacgcgacgccggaagctggattttaacgacctgacaggaggaacaatcagtatgcaatggatcgaagccgccgtggagacgaaaagcgaggagatcgacgctgtgtgcgccgcgctcgccgagctcggcgcgggcggcatggtcgtggaggacgaggcggatttccagcgctttctcgagcagaaccaccagtactgggactatgtggacgacgagcttgcggacaaattccgcggcgtgtcgcgcgtgaagttttatctcgcggacgacgacgaggggcgcgcgctcctggagaccatccgcgcgggactggaccgcgagatcagaaccgccatcgtcgcggactcggactgggaaaacaactggcggcagtattatgagcccatcgagatcggagaaaagctcgtcgtcgtccctgagtggctcgaagcgccggaggggacgcgcattccgctccgtctcgacccgggtctgatcttcggcacgggcagccatgccaccacgcgcatgtgtcttgccgcgctggagggactgtcgggcgcggggaagaccgtgcttgacctcggctgcggcagcggcatcctcgccatcggcgcgctgctgctgggctgcgagcgcgccgtcggctgcgacattgaccccaaagcccctgacgtggccgagtccaacgccgccctgaacggcatcggcgccgaccggtttcgcgtctacgcgggcgacgtgctctcggatgcatcgatgcgcgccatgctcggcacggattttgacatcgtgacggcgaacatcgtctccgacgtcatcattccgctctcgtccatggtgcggccgtttctgaagccgggaggcagcttcctctgctccggcatcatcgagggacgccaggacgaggtcgcggacgctcttgtgaaaaacggctttgccatcgaagcgcactacaatgaagaggactggcactgtttcctgtgccgctgagcttcaaaaaaagaatctcccctgtggatgaacagtccacaggggagatttttatgggttgctccgggggacgagctccctcagagcgcttgggtcattctgccgaaaggctctggcagaagcgatacaggaccgttgccgcctgcgcgcggttggcggtgacggcggggccgatcgaatcatcggtgagaccgttgaccacaccgttggcgactgcccaggcaaacggggtctgcgcatagccggcgatggaggcggcgtcggagaagacgctcagatccgcggtcttgtcgttcaggctgccggccatctttgcatagcgatacaggaatgtgaccatctgctcgcgcgtcacggaatcgttcggagagaaggtcgaatcgcccgtgccgttggtgatctcgttggcggttgcccatgcgactgccttggcaaagtagctgtcggcggggacatccgagaaggcagaggcctcggtgacctccggctcttttgccaggcggtacagcatcgtcacgaactgggcgcggctgagcgcggcgttcggagcaaaggtggtctcggtcatgccgttgatcacgccctgctccacgagcgcgtagaccgcgtcgtgatagtaggcgtcggcggggacgtcggtaaacatctcgtcagcgggcttttcggtgagcgctttctgcgcgtcctcaagcgccttctgcgcagcggcgttggcttcggcgtccgtgctctcggcggcgatcagcgcctcggcagcggcaagcgcgtcggcgtaggccttcgcggactcttcggtgtaggcgtcaagatccgtgacggcttccttggaggcggcgacggcttccttcggcgcgtcgagactcgggttggccttcttcgtcacgggcacgcagacggagacgctcgcgtcatcaacatcaatgctgatgttgcggttggacagggacaggctcagctgcagagtgtgaccggcccgcacggtgtagacgctgggctggatgtagaccgtataggtgtagctctcgccgttctgcagcgcggtgcgctcggcagcactggcggagtcatagccggcggtcgggttgtacaggtcgatgtagccctggccgatgctcttgctggcagcgctcgatatggcgtactcgacgaggtcgtagtttttgacgccgccgcccatccaggcgccgtccttcttgagggtggtgatgggcagatagctgcttctcggcacgaagcaggggaaggcctccgcggcggtgtcgttcacgccgacggtgagacggacgttgtccagcgtgtcaatctgctcggaggtgggcttggccgtaaaggttacggcgatggcgccctgcacggtgaactcctcgggaacctcgaaggtgtacacgccgttctgacgataggcgaccgtggtggcggcgggcgcttcggcctcgggatccacctcaggcttgaaggtcagcgcgctctcggtctcccagttgtcgagcgtgctccagctgccgtccacgttgctctgcacggtcacgggcgccatctgctcagcgccgttgttctggccatacagatagtggctgaaccagcggttgaggatcgtgtcatacagctcgtcgccgatgaacatctcataccgctgcgcgggataggtgggcgtcaggtgcgtgccctggtgcagcatgagcttcacgtccgcgccggccttctgataggccttgtacatcagatcgaattccttggtgcgcacgttcgtgtcgttcagaccgtgcacgatcagagccgggcacttgatcttgtccgcattcagggtatagtcgcgggtggcccagtgcttgccgtagttgccgttgagcgcattctggtcggcacggagctggttcagatagcggccgtacttgtcggcgatggtggcatagtcctcatcgtccagatagcggccggcgcagtagaaggccagataatc

SEQ ID NO: 2743 - DNA, 23288 bp, synthetic construct
  source 1..23288: mol_type = other DNA
  misc_feature 1..23288: note = Synthetic
tcaccgtcggcgacgttctcagccgcatcacgaacgacgttgacaccatatcctcggcgctcaactccagcataacgacgctcgttcaggctgtcgtgcagttcgtgggcgttactataataatgtttgcaaccagcggccgccttgcactgacggcgatcggctcgtcgatactcggctttgtgctgatgttcttcatcgttttgcgctcgcgcaagtacttccgccagcagcagcagaatctcggcgatatgaacggccacgttgaggaaatgtattcgggccacaacatcgtaagagcctacggcgcaacggcgcagtcgaaaaaagagtttgaccgcataaacgataatctttacaacagtgcgtggaagtcgcagtttttcagcggaatgctgatgccgctgatgggctttgtcggcagcctcggctatgtcgccgtgtgcatcgtcggcgcaacgctcacgatgagcggagccatccgcttcggcacggtagttgcgtttatcagctatgtaaagctcttcaccaaccccctgagccagatatcccaggctgtcagcagtctcatgtcggccggcgctgccggcgaaagggtgttcggcttcctcgccgaggaggaaatgcctgacgacagcggctgcaccgcgcacatcgatcatgttcgcggcaaggtcgagtttgaaaatgtacgcttcggctatgacgaggataagccgataatccacgatttctccgccgatatagagccggggcagaaggtggccatagtcggctacaccggcgccggcaaaaccacgatggtaaacctgctcatgcgcttttacgagctgtggagcgggcagataaagatcgacggtgtgctggtttcgcagatgcgccgcagtgacgtgcatgcgatgttcggcatggtgcttcaggacacatggctgttcgacggaacatatcgcgagaatatcgcctatggcaagcccggcgtcaccgatgagcaggtcgaggccgcatgcaaactcgtgggtcttgaccactacataaagacgctgcccaagggctatgatacggagcttaacgaccgcagcagcctttcggcaggccagcgccagctgctgaccattgcgcgcgcaatggtcgaaaatgctccgatgataattctcgacgaggccacaagctctgtcgatacgcgaaccgaggtgctcgtgcagaaggcgatggatcgcctcacgcgcggcagaacgagcttcgtcattgcccaccgcctgtccaccatccgcgacgcggacctcatccttgtcatggataagggtgatatcgtcgaaagcggaacgcatgagcagctgctcgaaaagggcggtttgtataaggagctgtacaccagccagtttgaaaacaagtgaggtagagcgttgaaaaaggttgcactgataaccggctcgtcgcgtggcatcggcaggtcttgcgccgtgtcacttgcccggcgcggctacgccgtgtgcataaattacatcgagcgccgcgataaggcagaggagcttcgcgatgagttgcttgccgaggggcatgaggccatgtgctttggagccgacgttgccgacagagccgccgtgcacgaaatggtcggcgcggtgaaggcacgctttggagatataacgctgcttgtcaacaacgctggcattgcgcgccaaagcctgtttcaggatataagcgaggaatactggcgcaggatattcgatgtgaacgtaaacggtgcgttcaacaccattcaggaagtgctgccgagcatgctgcatgagcactcgggctgcatcgtgaatgtgtcgtcgatatggggcatgcacggcgcgtcgtgcgaggttgcgtattcggcaacaaagcacgcgataatcggccttacgcgctcgctcgcgcaggagcttgcgccgactcacatccgcgtaaactgcgttgcgcccggcgtcataaacaccgacatggtgcaggtgctcggcgatgaaacgctcgatatgctcgccgaggacacgcccctcggcaggctcggcagacccgaggatattgccgaagccgtcgcgttcttggcgtccgacagcgcctcgttcataaccggccaggtgctctgcgccgacggcggattcataaaataagaaaaactccggcagacatgatctgccggagtttttgcggatttattcttctctttctgagcagtcgatgaacatttgctcggcttccttttgcgtgttcaccagcgtcagtagtgcgtcattatatcgtccttctttaatcatctcggcggcatccgttatacggttgaacatgaaaaagtaaagctgcttatacattgatatgacctccttaaagtccggagttgttacgctgctgtgcgcttaacgacactacacggttcgcaaatcaagcgtacgatgttcgcaaagtttacacataatattaaattgtgggtataattttgtcaacaataaatacggaggttcgcgtaaatggtatatgacgataaagtccgctatacgatgagaatagatcgcaaattgctcgataaattcggttatattgccgaatatgagggcagaacaaagaaccgcgagatcgagcagatgatgaagcgccgcatagcagatttcgaaaaggagttcggcgagatagagatttgaagaaaaatatttgataacgccaaaaaagacgaggccaaagcggcctcgccttttttaatggggagtataaagaaggagaattgtatcgaaatcagtgtctgccgtactcgatccttgtgaccgagacaacaagtccggcaacgcctgcaagggcgaggactgcgcagactgccgtccagacggctgcgtcgtggtttgccgcgtcaagatccatgcggtaagcctcgcctgctgcggcgcagatgccgccgtaggttgtggcataggtgtcggtgccgccgagcagatattttacctcgcggtcaagtgcggccgagtcggtgttgtagtctgcgatgggcttgagcgcctcggccatgcggccaagatcattgtcgctatagtcggcaacgctctgcactcttgccggatacatgtcgttttcaacacccatcgaggcagcaagctcggctgcggtctctgcgcggtttatgaaattcgtgtcgaccgaaacgcgctcgaccttctgtgcttcaacatttgtaaagccgactgcggccagcaggatgacaactacggatgcaaaggctgtgataacatataatgtgttgtttgatgacttcgttttcatgatgtgatcctttccgctcttaaaagagctgtctttattcattgaccacataatagacccggtgtttatgtaattcaacgtacaaatttgcctcgagtgacaagaaaataggcaattgcataaaactgcgcaaaaaaacagctgacgtaatttctacgtcagctgttagttttaaattcagcgctttatcttgtctgtaagcttgcgcacggcatctatgaagccgcgcagctcgcggtttgagcgcccctcgcagccgcgaacggcctgcatgagcgcctcggcggagtgcagaagctcggtaaacagcggattgaccctgcgctcggccgacggagccttcggcgttttaacaatgggcttgccctgcgtcacgactgtgaagcggccggccgcaatgtcaaactcggtgccgctgtatggtgcaaatgcgcggtagccaagctcattgttgaggcaggcagtgaagctgtcggcactttcggggtcgccgtgattgacgaaaacaagctccggcttttcggaaaagccctcgagccacgcgatcaggccgcgcttgtcggcgtgtccgctgacgccggggagcgaggatatctcggccctgacctcaatctcctcattgaagagcttaacctcctttgcgccgtcgtgcagcgcacggccgagcgttccgaccgcctgatagcccacgaacagcacaaggctttccggccgccacagattgtgcttgaggtggtggcgtatgcggccggcatcgcacatgccggatgcggagattatgaccttgggcgttttgtcctcgtttatcgccttggattcctcctggctcacggcaaggtgaagtccggggaagcagaggggattttcgcccgagcggataacggcctgcatttcttcgtcaacatagctcgagtcgcactgcaaaaacacgctcgttgcctcgatggcgaggggactgtcaacgtaaacggggaaatcgggatgccccgttacaaggccgcgatttttgatctcgcggataaaatacagcatttcctgcgttctgccgacggcaaacgaggggataacgacgttgccgccgcggtcgagcgtgcgctggatgcaggcggaaagcccggcaatataatcggggcgctcgtcggagtggttgcggtcgccgtaggtggattcgattacgaggtaatcggttttgtcgatatgcttcgggtcgcagagtatcggctgatcgaggtttccgatatcgccggagaaaactatctttttctcgcagctgccctccttgagccagatctcgatagctgccgagccgagcagatgcccgacgtcggtgaagcgtatcgtgaccgattcgttcacctggatctcgctgccgtattcgcaggggcgcagcagtttcataagccctgcaacatcgtcaagatcgtaaagcggctcgacggcggcttcaccgcggcgcatcgccttgcgcgatttccattcggcgtcggccatttgaatgtgtgcacagtcgcgcagcatgatatccaaaagcgcgcaggtcgccgcagtggcgtataccgcgccgcggaagccgtttttataaagcagcggcagaagccccgagtggtcgatgtgcgcgtgggtgaccagcacaaaatcaagaacgcccgccgcgaccggcagctcctgattttcaaaaaggtccttgccctgctccataccgcagtcgataacaccttttttgtcgccgacttcgagaagagtgcagctgcctgtgacctcatgggcagcgcctaaaaatgttaccttcatgcttctgacctcacagctcgggcgtccacccgtcggcaaagcctgcgtcggccttgggctttgtaagctcaacatagtagccggcataggtcagatccatgtacggcagcacgaagaactgcaccagaacaccgaagccgacaacgccgattatctgtgcgatgatcgacggtcccattgctccggcaagccattcgctgatcgaatcggcaatgccgacaagcagcgcccagccgaagaaggtaatatccatccagaacagctcgcccttgtggccgaccataaggcgcttgctttcgcttatgcactgcaaagcgctcatctccgggtgctcaagcagcagatacagcgccatgcggtagcgatacattgcgattatgccgggaacgaggagcagcagcgaccagaggaaaatgaatatgccctcgaggatgtacagccagatgacgcggaagaacatgccgaacgcgtcgaaaaggttccagtagcttgcctccatgccgcgcactgtgcgcaggcaatagatcgtgaagccggcgccgatcataagcgccactatgctgaccgcaagattcagcagagccgcgcccggcgagggcatagcctgctcgatcgcgtaggcaaactgatcgggatcgatgctgccgtatgctccgtcgatgccgaactgctcgtaaatcgactgaagctcaaacgttgatccgccgacaagcttatacgaaaggaagccgagcaccgcaacgatgagaagatatatgatagcggtgacaacgggcttgggttgggcagtgcgaatgaggtttttcgactgcgctttcaattgctttctgtccatgtgtcagacctcctgatagttatgctgcaattatatcatcatatgccgcaaaataacatagccatgtcaaaaaaatattaaactacgacagcttctccggttcaaagccgcttccgttgaagtaccacagctcgtcaaagccgcagctgcgcgctatctgctcgcactgctcgaaggcgcagcatatgctgcttgccgagtgcgagtccgagcttatcacgatgcgtccgccgatatcgtgcaggtggcgcagaagctccggtgaggggtagggcgtcgtcctgtagccgcggcttatcgcgcccgtgttcatctcgaatatttttccggcggcattgagcgtctccatcgcggcaaaggcagcgtcgcggtaccatgcgctttgcgtgtcgtacagagcgccctgctcgttgtatttcgtcaaaaggtcgaagtggccgacgatgtcaacctcgggtatctgagccatagatgcgtagtttgcaaaaaacacatcagcggccttctcggccccgccgaagtgctcgatgagcgcaattgcccgctcgcgcgtggagtcaacatagaagccgtcgagcacatgtcccgagccgatgatatattcgtagccgtcgaaatttttctcggccgcggcgtcgtattcaagaccggtgtacagtgcgatctttccggcgtatttcaccttcaggcgctgcatctcggccttgaaggcggcctctttttccttgggcgtgcaccagtcctcgccgtccatcggagcgtgcgcgcttatgcccagtgagctcagcccgtgctccattgccgcgcagaccatctcctcgggtgtgctcgccccgtcgtcaaacgtcgtgtggcaatgcagattttgttgtaccatagcttttctcctgtgtgtcgatttatcaggcctatgttagcatatcgccgcccgacaggcaagaaaaagtccgccgcgatcgctcgcagcggacggataattgaatgtgaagaataatataaacaaaaactccgtcctcaaacgagaacggagtcttggctttggtggacccgaagggattcgaaccctcgacctctcggatgcgaaccgaacgcgctcccagctgcgctacgggcccataccttgctcggctttagtattataacacacttttcaaaaaagtaaagaaaatatttgttgattatattgcaaatctgagttataatactttcgcggcttttgacaaggctgcactagttggggagccagcggtgccctgtaacctgcaatccgctacagcaggaatgaattcccaacataggatctgtcatgtgtcgtctgacaccggtaagcagcgttgacgagccggtctcgcgcaacggaaacccgtgaaccatgtcaggcggggaaccgagcagcattaagcggtgcttttcgtgtgccgtgagggtgccggttctgagccggctgccggcgtaacgggcatatgtcagttttcgaggttgggtgtgcagtcttgtcaaaggccgcattatatttgttacgggatcattatttatgtatcaggctttatatcgtaagtggcggcctaagacctttgatgaggtcgtcgggcaaaagcacataacggaaacgcttaaaaatcagatatctacaggtcgcacctcgcacgcgtatctgttcatcggaacgcgcggcacgggcaagacaacctgcgcgaagatacttgccaaggcgctcaactgcgagcaccccgtggacggcaatccctgcggcaaatgccctgcctgtctcgggatcgaggatggaagcatcatggacgtcgtcgagatcgacgccgcatcgaacaatggcgttgataacgtccgccagctgcgcgaggaggccgtattttctcctgtctcggtcaaaaagcgcgtgtatatcatcgacgaggtacacatgctgtcaacggcagcgttcaacgcactgctgaaaattcttgaagagccgccggagcaccttgtgttcatcctcgcaacgacggagcttaataaagttcctgcaacgatactttcgcgctgccagcggcacagcttcaagcgccttgatgcgcagcttatcgccgaccacctcgagcacgttgcgcagtgcgaaaatctcaggctcgagcgcagcgccgccgagcttatcgccggacttgccgagggcggcatgcgcgatgcgctgtcgctgcttgaccagtgctcgggcgagagcgatatcgacaccgacgccgtgtactcggcgatggggcttacgggcaaccgccgcacggcgcagctgctcgactacgcggtgaagaaaaacaccgatgaggcgctcaagctatttgacagcctctggcgcgacggaaaggacccggcgacgctgctgtatgagctgaatacgctcctgcgcgattgtctcatgctgtcggtcgcaccgaaagcgggcgcagacctcatatcggggcgcttcagccgcgatattctgggcgttttctgcaaaaagctcacgaaagccgagcttataaatcgcataaatatcgtgtcggacagtttgctgaagatccgcgactcgaaaagcgcaaagctcaccgcagagctgtgcatcatatcgctgtgcgatccgcgcctgaccgagggcgttgacgagcttcgcgcgcgcatatcgcgcatcgaggagaacctaaagcacgcaccggtgagaacagccgtgccggcagccgaggatgacgacgatgaggaagagttccattcgactcttgacgagccgccgtttgacctcgatgagccgcctgcgccgcagccgcgatacgaagacgatccggcagacgagcttgacccggctgactttgccgaatatcagcccgaggatgaccttctggataaaaagtcgcccgtcgagctgaaccccgacgccccggcgagcgcggcggatgcgccgcaggataacgagtcgctgtgggcggcgatagtcgaaaatgccgaggagtcgctcccacgcggagtgatcccgatactgacaaaccctgtgcagactcgctgcaccgtgagctacgatacgctcgcgctcgaggtagtgcccggatttttctataatgcagtgaataatcaggcggttctcatgcgcctgcgcgaggcggcaaacgccgtcacggggcgcagccttaaaataacgatctcggagcttcgcgaggataacgataagcccaaaagggacatcgaggagcttcggaaattcaaagaaacacgtttcgtataatattttaggaggaattttaatatggcaaaaggcggattccgcggcggaatgggcggcggcaatatgatgaagcaggctcagaagatgcaggaagagttcatgaagatgcagcaggagcttgagagcaaggagttcacctccactgtcggcggcggcgcagtcaaggcgaccatgatcggcacacgcgcactcaagagcattgagatcgatccctcggccgtcgatcccgacgatgtagagatgcttcaggatatgatcgttgctgcggtcaacgaagctatcacgcagagcgagaacgcaaccaacgaggcaatgagcaagctcacccccatgggcttcccgttctgaaaatgaaaacctcgcgccttcaaaagtgggcgcgaggtttttgtgaataaaagcataataaaaaggctcgcaaaccgatgttttcgagcctttttggtgcgcgaggcgggacttgaacccgcacgcccggagtgagcactagaacctgaatctagcgagtctgccaattccaccactcgcgcatttaagtgcctgataataatagcattaccggccctcgttgtcaagaaaattctttcgccgggcgtttaatattttgtgaagggcgtaaattctatagcaacaattaattttgccgggttaaatgcaaaaatgtgttgcaatttgacggcgggtattgtaatataaatacagttcttataccataccaagaactatttaggttactatgataaggtttagtacaccttagagctctgacgcctcgcttttgcgaggcgttatctctttatattgcccaaaatacaaatatagcgtataattatggcataaattacaaaggaggcacagttatgcgcccttatgcgatcggacttgatattggcataacctctgtaggctgggcggcgttggcgcttgatgccgacgaaaacccgtgcggcatcattgatctcggaagcagaatattttatgcagccgagcatccgcaaaccggagaatcacttgctgccccaagaagggaggcacgcagcgcaagaagacgcctgcgccgccatcggcacagaaacgagcgtatcaggagcttgatgctcgaggaacaactgatatctcaagacgagcttgaggtgctttttgacggccgacttgaagacatttatgctttgcgtgtaaaagcgcttgatgagattgtcagccgaaccgattttgcaagaatattattacacatatcacaaaggcgcggatttaagtccaaccgcaagaacccgaccacaaaggaggacggcattttgttggcggctgtcaatgagaacaagcagcgcatgagcgagcacggctatcgcaccgtcggcgagatgtttttgctcgatgagacgtttaaagcccataagcgcaataagggcggtaattatatcacaactgtagcaagagatatggttgccgacgaagtgaggtcgattttttccgcgcagcgtgagcttggcgcgagctttgcaagcgaagaatttgaggagcgctatctcgaaatactgctcagtcagcggtcttttgacgaaggccccggagggaacagcccctatggcggcagccagatcgaacggatggttggacgctgtacatttttccccaatgagccgagagcggcaaaggcaacctattcgtttgagtactttacgctcctgcaaaaagtaaatcacattcgtatagtcgaaaacggagttgcctcaaagctgacagacgagcagcggagaataataattgagcttgctcatacgaccaaagacgtttcctatgcgaagatacgcaaagcgctgaagctttcggacaagcagctgtttaatatccgatactcggataattcgccgaccgaggacagcgagaagaaggaaaagctcggcattatgaaggcatatcaccagatgcgcagcgccattgaccgtgtttcgaaaggccggttcgcgatgatgcctcgagcacagcgaaatgctataggcacggcgctgtcattatacaaaacttcggacaagataagaaaacatttgtctgatgccgggctcgaggaagttgatattgatgcggcggactcgatcgggagcttttctaaattcggacacatatccgtaaaggcctgcgatatgcttattccgtttcttgagcagggcatgaactacaatgaggcttgtgccgccgcaggacttaattttaagggacacgatgcaggcgaaaagtcgaagctgctccacccgaaagaggaagattatgaggatataacaagcccagtcgtccgcagggcaatagctcaaacgataaaagtgatcaacgccataatccgcaaggaaggatgcagcccgacattcattaacattgagcttgcaagagaaatggcgaaggacttccgggaacggaatcgtattaaaaaggaaaatgacgataatcgcgcaaaaaacgagcggttgctggagcgcataaggacagaatacggcaaaaacaaccctaccggactcgatctcgtaaagctgcgcctgtatgaggagcagagcggcgtctgcatgtattcactcaagcaaatgtcgctggaaaaactgtttgagccaaactatgccgaggtcgatcatatcgttccgtacagcatcagctttgatgacagccgtaaaaacaaagttcttgtacttacagaggaaaatcgaaataaaggcaacaggctgccgctgcaatatctcaaaggccggcgcagggaggatttcatcgtttgggtcaacaacagtgttaaagactacagaaagcgcaggcttctgctcaaagagactctgaccgacgaagaccttgccggcttcaaggagcgaaacctgcaggacaccaaaacgatgtcgcgatttcttctgaattacattgcagataatctcgaatttgcggaatcaacgcgcggccgcaagaagaaagtcaccgctgtcaacggcgctgtgaccgcctatatgcgcaaaagatggggcataacaaaaatcagggaggacggagattgccaccatgcagttgacgccgttgtcattgcctgcacgaccgatgcaatgatccggcaagtgtcacgctatgcccaattccgcgaatgcgagtatatgcagaccgagtccggcagcgtggctgtagataccggtaccggagaggttcttcgtaccttcccgtatccatggccggatttcagaaaagagcttgaagcccgactcgcaaacgaccctgcgaaggtgataaacgacctgcatctgccgttttatatgtccgcaggacgaccactgccggaaccggtcttcgtttcgcgtatgcccagacgcaaggtcacgggtgctgctcacaaagatacgataaaaagtgccagagagcttgataacggctatttgatagtcaagcgtccgcttacggatctgaagctgaaaaacggcgaaatcgaaaactattacaatccgcagagcgacaaatgcctttatgatgcgctcaaaaacgcgctcattgagcacggcggagatgctaaaaaagcctttgcaggcgaattccgcaagccgaagagagatggaacaccgggcccgatcgtaaagaaagtaaaactgcttgagccgacaactatgtgtgttcccgttcacggcggaaaaggcgctgcagataacgattccatggtcagagtcgatgtgttcctttctggaggcaaatattatcttgtgccgatctatgttgctgacactctgaagccggagctgccaaacaaagctgttacgcgcggcaagaagtactcagagtggctcgaaatggctgacgaggatttcatcttctctctatatccgaatgatctgatctgtacgacaagcaaaaatggcataacgctcagtgtatgccggaaggacagcactctgccgccgactgttgagagtaaatcgttcatgctgtattatcgcggcacaaacatctcaacaggaggcatttcatgcatcacccacgataatgcttatgaaattggcggtctcggcgtaaaaacgcttgaaaagcttgaaaaatacacagtggatgttctcggagagtatcacaaggtcggaaaagaagtaagacagccgttcaacataaaaaggaggaaagcatgcccttccgaaatgttatgatcgaaagcccggcgcacatatctcttagaaacaggcagcttataatcagaaccgacagcgagcacagcttggctgttgaggatatttctgcgcttctgctcgaaagcagagcgtcaaccatcacagcagccgctttgtcctatcttgggcaaagcggctgcgccgtttttgtttgcgatgaaaagcatatgccctgcgccgtgctcgaaccgttttcgcagcatagcagagcgctgggtgtgctcaaagctcagcttgaggcaacagagccgcttaaaaagcggctttggcaaagcattgtaacggcaaaaatcgcaaatcaggcggcttgcctgagcttatgcggaaatgccggtgaagccgctgctttaaagcgcatgtccgaaaatgtcagatccggagatacggataatgttgaagctttggccgcgcaaagatatttcccggctttgttttactccgggttttcaagaggcaatgactgcgcgcttaatgccgcgctcaactacggctatgcaataatccgcggcagcgttgcaaggcacctggctgtatatggctttgttcctgcgctcggcctgcatcacaagagtggcctgaacagcttcaatcttgcggacgatgttatggaggctttccgtccggtcgttgacctgcttgtgtgctcgtttatcactgaggacgacaccgagcttacgcagcagatgaaaagaatgctgtttaacgtcctgaaccttgacatcatctccggaggtcagcaccacagcgtggcatatgctgttgagcggcttgttcacagcctttcacgttcgctttttgacggcaaggcgcactgtgcctacctgagctgatagatattcagcagcataaatatgaataagtttatgagaatacttgtcttttttgacctcccggtcaaaacaaaaaaagagtggcgcgaggccactcaattcagaaattttctgctcaatgacggatatcatatgatccagtattccgtatatgcgcgcgtgtgcaacggcatggacgccgttgccaagcatcgagcgcggcttaagcagcatctgccgtgcaacggttcaatacgtatgctcgttataaccgaaaagcagtttgaagcaattgagatacttatcggaaaattaactgaagcggatgatagctttcagtgcgagcaattatcgattttttgataaaaaaactccgccttatccattgataaagcggagttttctcgatagtctattataccataccaagaactatcagggaactataacatcgcccatgcgtcggtttcgcccgagcactcgcacagaccgcattcaacaagaaatgcatgcactatttcgtgtcgtacgacctttttaacgtaggcatccatgtcatacagattaccctgtatttcacgttcgatcacaatttcgtgcgttgtccaatcgcaatagccgtagcagtcgcgcagacgttcatcgtcttttagggtatgttcgataatcgtccaattggcacctaagatgttaattgtcactctgctgtctcctttttggcatgaaaaaagcaccgtttttaacgatgcttctatcttatcattgctaatcttcgattatttcccaacggccgccttcgctgctaccgtcaagcggtgcgggatttgtcattgaatataaataatcttcgccactgtcatcaattactctgtaaaatccatcttcttctgtggcttcgtatattttcccgtccgttaggctatcaacgccgaaagactctccaacataacgcaatttcatttctttttctccgtcctgtttttcaatttaacatcatgctgtatgccatcatcacgttcataccaatgaacatcgaaaacatactttgcgctggttatttttcccgcttgttttctccattcatcggcagaaccaccgtagttactaacaagacgtttaatatcgccgatagcctcgtcgctacccttacccgctatagtcgtaatttttgaaaactttgcgttttggggtataaaattcttttcccctttccactcataacgcagtttgttttgcaaataccttgcattcgtagacattataccacttttcttagatttttcaagcggtttaacgctttttgcaagtccttattataccataccaagaactatcaggggaataaaattcaaaaaaaggatcaaacttttgtatcagttgaggaaatctctgagctttttgcttctgctggggtggcggagcttgcgcagcgccttggcctcgatctggcggatacgctcacgggtgacgttgaactccttgccgacctcctcgagggtacgggtgcggccgtcaactatgccgaagcgcagctcgagcacctttttctcgcgcggcgtgagtgtgtcgagcacctccatgagctgttccttgagcagcgagaagcttgccgcctcgctcggctcggatgcgtcctcgtctgggatgaagtcgcccaggtgggagtcctcctcctctccgataggcgtttcgagcgaaaccggctcctgcgcgatcttgagtatctcgcgcaccttttcaacgggcatgcccatctcggcggctatttcctcggcgctggggtcgtggccaagctcctgaagcagctggcgcgatacgcggatgaccttgtttatcgtctcgaccatgtggacgggaatgcggatggttctggcctggtcggcgatggcgcgcgtgatcgcctgacggatccaccacgtcgcgtaggtcgagaacttgtatcccttggtgtagtcgaacttttcaactgcctttataaggccgaggttgccctcctgaatgaggtcaaggaacagcatgccgcggccgacatagcgctttgcgatcgaaacgaccaggcgcaggtttgcctctgtcatgcggcgctttgcctcctcgtcgccatggctcattcttatcgcaagctcgacctcctcctcggcggtcaaaagcggaaccttgccgatctccttgagaaacatgcgaacggggtcgtcggtgctgtagctgtcatcgaccttaacgtcggccatttcctcctcggtgacctcttcgatctcgttaagctcctcgatttcgggcatgtcgatgtcgtcaaggatcgtgactgcgtcgtcgtcgctgatgtcgatctctatcttgctggcttcgagggcgtcgtaaaacttcgcgatagagtcggcgtcaacgcccttttcctcgagcgctgcgatttcttttgtggtgatcttgccggctttcttcgccttttccatgagctcgttgaggatatcctcggtggttttcgcctctgccgcttcctcgacgggcttttcctcggcggccttggtgcggcgcgtgctttttttcttcggagccgattttgcggcgtctgccgcaagcagctcgtcggttgcgcgctcgagatcctgcgtggtcatggtttcaatgtctttatccatagttttacccctcatatcctttggtttctttaagtctgtttgcaagtttgcgaaggtccccgcccgactgcttcagctcgtgccgggagcggatcctttctatgtaatcggcaagcgccttgtcaccgtttcgcagtgcctccggtttttgcagaaccgaggccaaaagcgccgcctcctgcggaagcagcaccgcgctcatcgaggccatgctgattatttcgccgttttcaaattttgatttgagcacggaatatatccgcgccagcgccggcgacgagaagatctccggcggcgggagctccttgccgcggcagatgccctgatcgagatacagaagccttatgatgccctcctcggcggcggcggattcgggatcttcatagtgcagctcctttgccttgggctgaaactgccgctcgggatgcgcggcgctttttgcgtcggtgcgctgggccgtgcgcacaaggcgcttgcgccttcgctcgacctcctgcgcgacaacgtcgctggcaacaccggccattgacgcaacgcgcatcgcgtagacctgacgctccacgctgcccggcaggtgcgcgaccatatccgaggcttccttcaaaaacgcgaccttctgctcgtcgatgctcaggtcgtatttatccgtcacgttttgcagctgatagtcgatgtggttctccgacttgtctatcagatttcggaacgcatctgcgcccttggtctttatatactcgtccggatcctttgcaccgctcatcgacagcaccttgaccttaagatcgagcttttcaagaagcccgatggcgcgctgcgaggcttttttgcctgcgccgtcgttatcgtaagcgatgatgacctcgttcgtgtaatgcgagatcagccgcgcctgctcgggcgtgagcgacgtgcccagcgacgcgaccgcgccgtcaaagccggcctgatgcatcatcacgacgtcaacgttgccctcagcaagtattatatgtccgctcttcgactttttagccagattaagcgcaaaaagattgcggcttttgttgaacaccatcgtttccgggctgttcatatacttcggctcgccgtcgccgagtattctgccggaaaagccgataaaatcgcccctgacgtcgatgacggggaacatgagccggttgcggaaagtgtcgtagtgtccgccgtttttgcccttgcggacaagtccggcgtcgaacatctcatactccgagtagccgagcgccttcatggcgtttatgaggctgtcccatgtgtccggcgcgtagccgaggccgaagcgctttgccgtatgcggcgttatctgacgccgcgccatgtagtcaagcgcaggcttgccctcgggcttgctgagacatgagtagaaaaatctcgccgcgtcgcggtttaagtccagaagccggcggcgttttttagcctcgcggctatcctcctgctcgggcattgtcatgccaacgcgctttgccaggaactcaacggcctcagggaagctgagattttctatctccattatgaaatttataacgcctccgcccttgccgcagccgaagcagtggtatatctgcctgtccggcgacacggaaaacgacggcgttttttcgctgtggaacgggcacaggccgaactggttcgagccggagcgcttcgttaagcgcacatactcgcccacgacgtctactatatcgtttttttcaacaagctcctgaaggaagctctccggtatagccattacccatcctttcttttagtggcgcattgacgcacctacggatacatttatctctggcagcccggtgtcgaaacaacggaggaaaccatgacgtttcgcgtaacgcaagtgcgctgctggattttttgccgcgcccctgtagggaacagacttgcctgttccgttttttttagaggcgctttagcgctgtacctatacatatattgcggcagccaggttcggaacagcggagaaaaccgcgtttgcctcgtgctgcgttcgtgcgctgctgaatttttcaccgcacctgattggctccactgttaaggggagcaggcagctttgctgccgaggggttgaattaaatccgtgcgcttgcgcacacattaattattcatcattcactattcattattaattctatttgaccgtccacgacatggggataaatatctcgctgtatttttccatggcgtagccgtcggtcatgccggagatatagtcgcaaacggcacgcgaaacgccctcgcggcttgcgataagctgcatctcgtccggcattttatccggatgcttgaggtaatagtcaaaaagcgagccgatgatgccgtcaaccttgctctcctcgcccttggcgatcggattggtgtacacgtccgaatacatgaaggcgtggaagaaatcgaccgcctcctgcatgtaatcgctcatttgaatttttccgccgccgctgttttcaatgaggtcgagcatgatagaattaatcctctcactgttgcgctcgccgcagcgcgtgcggatcatgtcgggaacgtcctctgcgcggagtattccggcgcggatggtgtcgtcaaggtcatgatttatgtacgctatgcggtcagcaaggcgaacgacggtcgcctcggtcgtgtcgtccggcgcgccgtgcgtgtgatgcaggatgcccatgcgcgtttcatagcacaggttaagcccccggccgtcgcgctcgaggatatcgacaacgcgcagcgactgctcatagtgcttgaagccctcttcgtatattttgttgagcgcgcgctcaccggcgtgaccaaacggcgtgtgtcccagatcgtgacccagcgccattgcctcggtaagatcctcgtttaagtccagcgcccttgctatggttcgcgcaaggcgcgatacctcaagcgtgtgcgtaagccgcgttctgtagtggtcgccctccggacgcagatacacctgagttttgtgctttaatctgcggaaggacttggagtgcgttattctgtcaacgtcgcgctggaagcaggtgcgtatctcgcactccggctccggtgtgcgccggccctttgagtcctcggctctgacgccgaactcgccgacgagcgttcgctcgatcatctcgcgcttttctctcggacacgccatgcatttccctccaatcaaaaggcatcaaattttctttcaatactttatacgacgcaaattcgcatttccctgcaatttattttaaattttctcgaaaaaattttcggaggtacggctgtacccccgaaaaagttattttattctgaccggcataagctcctcgccgacagtctgcgcgctgcacgctccggcgctcagctccgtaacgcgcgcggaaaaagcctcggcgttattctccggcagcagcagcgaaagcagcacgtccgcgccgtagtcaacgttctgcacagccccgtcaagcgaaaggcactccgttttcatgcgctcgagaagcgaatacgggcagccaacctcgagcttcacccagcggcgcacggcggcgatcccggccgcgtccagcgcgtccttcgcgcttttcgtgtatgcgcgcagcagtccgcccgttccgagcagaactccgccgaaataccgcgtgacgacgcacacgacgttttcaacgccctcgcgtttgaacacttcgagcatcggcagtcctgccgtgccctgcggctcgccgtcgtcggagtagcgcacggcgccatcgcggattatatagcaccagcagttgtgccgtgcgtcatagtgctttttcttcatctcgtttatgaagtcgcgcgcggcgtcctcggtttcgacaaatcgcacatggccgagaaagctcgaacgcttttcgacaaattcagcctcgccgctgccggcaggcacgaaatactcgctcaatcctcccagtcctccttgggctcggtgtaattgggtatataccgctttaccttgccgaaaacctcgggcggaaccgtgacctcggccttgatgccgtcgtcgagatattcaaggctcgtcaccgcggcctcgcggtttaaaagatccatgattccggcatcggaatacggtatgcgcagagtgaccttgtggttgccgcggtcgagcagagccgacaggcgctgcaccagctcctgtacgccctcgccgctttttgccgaaaggcagacaacgtcctcgccgtgcggcagtatgccgaggtaggcgtcgcacttgttgaaaacgcggatgcacggcgtctgctcggctccaagctggcagataagctcgtcaacgacgcgcgcctgctcctcccagtcggggtttgaaatgtctatgacatgcagcagaacatcggcgtagctcagctcctcgagcgttgccttgaacgcctcgaccagatggtgcggaagcttgcggataaagccgacggtgtcggatatgagcacctcggtcacttcatcgatgcgcagcttgcgcgttgtggtgtcgagcgtgtcgaaaagacggtcatttgccggtatgccggcatcggtcaggcagtttaaaagagttgactttccggcgtttgtgtagccgacgagcgcaacgacgggaacgtcgtttttctcgcgcttgcggcgttgggtcgagcgcaccttgcgcacggcggcaagctcctcttcaagcttttgtatcttcctgcggatatggcggcggtcggtctcgagctgagtttcgccggggccgcgcgttccgatgggcgatgagccgccggaggccgtctggcgcacaaggtgcgtccacatgcccgtcaggcgcggcagcaggtatttgtactgcgcaagctctacctgaagctgaccctcgcgcgtctgtgcgcgctgggcgaaaatatcgaggataagccccgagcggtcgagcaccttgaccccaagctcctcgccgaggactcgcatctgcgacggtgacagctcgttgtcgaaaacggcaaggtcgcagttgttcatttctataaattccttcagctcggcaaccttaccgtcgccgatgaagctgcgcggatcgggagtcgggcggttttgaatcatcatgccgacggcctgaccgcctgccgtttcgacaagcgcggcaagctcctgcatcgagatctcgcttgagcgctccgactgctccatcgccgccgccgcaagtccggccagcaccgcacgctcgatttttatatcgttagtctctattgttatcagtccttatttttgatttacattatattataccaaatccgccgccgcttgtcacgaaaatatgaaaaaggctctctttcgggagagccttgtgcttgtataagatcgtttatttgcctccggacgcgcgatagaggaaggtcacgacctgtgcgcgcgtgcagccttcgttcggtgaaaagcgcccggcgcttgtgccattggttatgccctcggtgcttgcccaaataacagcgtcatggcagaacgagccggaggaaacatcggaaaaattgcatgcgccgcttaccttgggcgagcctgccgagcggtacaggaacgtgactatctgtccgcgcgtgcagggtgtgaatggtgaaaagctagtgctgctcgttccctttgttatgccgcgctcgaccgcccattgcacagcttcatagaaaatgtcgccgggctttacgtcggcaaagctcacggccgccttggcctcaggctgcccggccgcgcgccagagaaacatcactatctggtatcgcgagcagacgtcatttggagagaaagtatttttccccgtgccgtttgttatgccgttttccaccgcccaccgcacggcgtcgaagtaaaacgcgccgggcttaacatcgtcaaatttcggcacggcttccgcacccttcgtgccgcagaccgagcacacgccgccgaaaaatttgtgccctgctgccgtaacggtcttgccgatctgtgtcatgtctccgcagcgcatgcagataagatcgcccgtgtagccgctttcggtgcatgtcggcgctttgacgcgcgcaggctggggatcgtgcccgagagcgaatatgacgctgccttgcttgaacaccttgccgcagacggtgcatacctcgtcgccggtgtagccgcccgtcaggcagcctgcggctttggcgttttgcagctgcgttttgtgtccgacggcgctgacataatcctttgtgtagcactcgccgcaggagcaggcgtaggtcgtaaatccctcggtcaggcaggtgggctttgtgacgatggggataaaatcgtgcttgtgcgggatgtccttgttcggatcgagtatgccgcagcggacgcatatgccgcccttgtagctgtgcccgagcggcggcgtgtagctgtcctcgcgcttatcgccgcaggcgcacagatgcacggtgcagccgcgctcggtgcatgtcggagggataacggtgtcggtgtatttgtgctcgtgatctgtgcgggtaaagctcttttcggcattgtcgagcgcgttgttgccggtttctttcgtgacctggctccagtccgtgtcgc

SEQ ID NO: 2744 - DNA, 23273 bp, synthetic construct
  source 1..23273: mol_type = other DNA
  misc_feature 1..23273: note = Synthetic
agtggatgcatccggtgaagaagatacagaacggaagggagattcatgaccggaagcagagagataattaaatccgcgctggagtcgatgctctacgtctgggggcggccgctcccggcgaaagacgcggctaaggtgttcggtctgacggaagaggagacggttcagctctttctggatctgcagaaggagtatgagaaccgtgacagcggcatccgcatccggagaatccgcagctcctttcagttcattacagcgccggagaacgcggaatttgtccgcagactctgcacgccggtgaaggagaagcggctttcccaggcttccttagaagtgctggccgtgatcgcctatctgcagccggtgacccgcggacggatcgaccagatccgcggcgtcaagtgcgatcgggtcgtggagggcctgatcgataagggactggtcgagagccgcgggcgttcctcaggggtggggcgtccgatcctatacggaacgacagacaagtttctggagcagctcgggctggaaagcctggacgatctgccggagatatctgaagagggtattctgagacaggagagggaagaagatcgtattcagaatgagggattggagacaaaaatgaatgagcaggggaatgtaattatggtcggcatgccgtcatgcggaaaaagcacggtgggcgccgctctggctgaggcatccgggaagaagttcctggacgcagatgatgtcatcgaaaagcaggagggaagaagccttcaggaaattatcgatgcagacggaaacgactacttttcaaaggcagagcgccgggcacttctttcgattgatacgcagaatacggtcattgcgacgggaggaagcgcgatctttgcagaagacgcgatcgagcgtctgagaaagaccgggaaagtcgtctatatccggattcaggaatccacagtagagaaacgtctggataatctggacagccgcggcgtgacgatggaagaaggacagacccttgcggatctgtatacgctcaggacaccctactacgagaagcatgcagacatcaccgttgacggagacggaagagaaattgcggatgtagttgcggaaatccgtaaaaagctgtagagtataacacgccggtaaaatttgacaacagcgcgcagtaccggtaaaatatgaataaatatatcttatcaacagaaaggcgtgattatcatgaagagaattaaaacgatccagacaagagatctgaacaagagcattgcagacggcggctgcggagagtgccagacttcatgccagagtgcatgcaagacttcctgcggcgttgcgaaccagaagtgtgagaagagcctgtaatgattcatcagtacaagctgaacggatacaacattgttctggacgtaaacagcggttctgtacattgcgtggatgatgtcgcttacgacatcatccagcttttttgtgaagcaaaagatcgcggagaagagccggaccggtcctctgtcagggaaaagattctggcaaaatacaatgacagggacgatgttacgcctgaggacattgaccagacgatgtcggatatcgacgagctggaaaaggaaaagaagctgtttgcgaaggatatctgggagccgagtgcaggcgttctgaaagagcgccatacggaagtcaaggcactctgccttcatgtcgcgcatacctgcaacctgaactgctcctattgctttgcgagccagggaagattccacggtgaacgcgcaatcatgagcctggagaccgcaaaacaggcaatcgactggctggtagccaattccggagaccattacaatctggaagtcgacttcttcggcggtgagccgcttctgaactgggatgtagtcaagcagactgtcgcttacgcgcgttctcttgaaaaggaacatcacaagaatttccgcttcactctgactaccaatggtgttggaatcaacgatgacgtcatcgactttaccaataaagagatgaacaatgtcgtcctgagcctggacggcagaaaagaagtgcatgaccacctgagaaaattcatcgacggacgcggaagttacgacgtcgttgttccaaagttccagaaactggtgaaagccagaggagacaaggaatactatatccgcggaacctttacgcataataacgtggacttcacagaggacctgttccacatggcagacctgggatttgaccgtctgtccatcgagccggtcgtctgttctccggatgagccttacgcgctgaccgaggaagacctcccggagatttttcaccagtatgagatcctggcaaaatggctgatggagagagaaaaagccggaaagccggtcgttttctatcactacatgctggatctccagggcgggccatgcatctataagagaatttccggatgcggatccggaactgagtactatgcggttaccccgtggggggatctgttcccgtgccaccagttcgtcggagacgagcagttcaagatgggcgatatctggcacggcatcacgcgtgaggacatcaaggacgatttcaagatgtgcaatgtctacgccagagaagaatgcagaacatgctgggcgcgtctgtactgctccggcggatgcgcggccaacgcctaccacggaaccggcagcattaaaggcgtctatgattacagctgcaagatcttcagaaagcgtatggaatgcgcggttatgatccaggtggcaaaagcacttggagacctggagcctgacgcagaataactggatatacacaatcctgcacagggcggcggcgtttgccgccgcctcttctaccataaggagagatttccatgagaatcaataaatacatcgcagaagcgggactcgcaagcagaagaaaggcggatgagctgatccgccagggcaaggtaaaagttaacggagccgtcctcacacatccgggatacgacgtgcaggacagcgatgaagtcatcgtctgcggccagccgctgcagcacagagagcagactaaggtctactacatgctgaacaagccgccggggttcatcacctccgtgcatgacgataagggaagaccgaccgtcatggatctcatgcaggaggtgcaggaacgtatctatccggtaggccgcctggattttcagacttcaggcctgctcttcctgaccaacgacggagattttgcctaccgcctgactcacccgaagcatgaagtcggaaagacttacgtgctccgcgcagaaggcagcctgagccgccgtcagctcaaccttctgagaaacggcgtgaacatcggcggcttcaagacttcaccggcccaggtccgcgtcctgaagtgcaataaacactccaccgttctggaaatgacgattcatgaaggaaagaaccgccagatccgccgcatgctggaagccgtcggaagccacgtgctggaacttgaacgcatcgcgtatggaaacatcgttctgggtcacctgaagcagggaagatgccggaaactcagcccgtcagaagtcgcctatctgatgcagaaggcgtaaaatcccagaatccgcatttaccaattatcagaaaacgaaaagaaattacgcagaaaggaggatggcatgaagaataagaagaactttaccgttctggaaggtggactttctcatccggaagaaaagccggagaaatcttaccgaccgtccggcaccctgtacatggaccgcagtgcactggaatttcagcacgcctggattaccgacacccgtctgatgggggttgtgtgtctgggcatcagctggaggatcatcgccgggacccatgatgaatttctgcagtatttctacttcgatgccgtagaatacggatttgaccgcttcgattatctgatggatccgggagatgaggaaaaacaggatctggaggcgtcctacattggaggcctgggcggttccaagctcgccgtcagcgagcgggaagccgtgcatctggtccaccagtacaccgatttcaaccacagaaagcagatcagccttccggacggtcagcccatgtaccagttcattcttctgacaaaagataatctgacaaggatggaaagccgcctgctcctggaaaaatcctgtatcaaaccgagaagccgcgtagaagcagtcaactacttcctcatgcgctataccgaccgggactgggacgccgtctccgtcctgaccgacggagacatcagccatgacctgctctccgaatacggtcacatgggcgtcttcagcaatcacacagaagacagcagggaagatccgaacgctctggactgccggacgatcgtctcagaatctgacgattcggaagttttctacctgctgatgagtacctttaaattcaaaggcctgagcagaaaaatctcggaattcatcgtccgggataagatggaaatttccgaccaggaagcctacctgaatcttcttcataaagagtacgtcatggtgttcgattataccggaccgctggaaagtttcggacgccagtccagccggcttttaaagcgcgccatgatcgtgcaggaagatgaaggcacaacttacatgctctaccgtccgaataatgaccacgccctgaagagcgactttcatctttatgacgacctgatcggtatctattacatgggaaacatccgtcagctcgtgatttccagcaacacgccgatggacgcaaaaacactggaatttgacctgctgacctcgccagtcgcaaaatatctgaaactgaaagaaaatctgctcttcagcgagcccgtcatgaataactttttgatgagcggaatggcggatttcgaggattttctggatctgatccgggagtaagaaaaatttcccagacaaaaagaaataagcaaggagtgcatgatgacggaacgcttgtatcagaaaaacgtataccagaagacctgcgccgcgcagctgatggagattgcagagggccggcatggcagcgccttaatccttgaccagactgtgttttgtccagaaggagggggccagggaagcgaccggggaagcgctgtcaccgatgacggaaaaaagctggaaatcaccgatgtgcaggaagaagatggacgtctgcttcattactttaaagcagaggacggtgcagagctgaaaaccggaagcagtctgcagcttcagctggactgggacctgcgatttgaccatatgcagcggcacgccggcgaacacatcttgtccggagcgcttcaccgcctgttcggagccttcaatcagggctttcacatgggggaagacggcatgaccatcgatgcggcattccgcccggaaggagaagtgacccggatggcagatctttcctctttcccggagtattccagggtaacctgggaaatggctcttgaggcggaacgcgaggccaaccgcgtgatctggctggatgcaccgattcaggtcagctatttcaagacccgtgaagaggcagaagctatgccgcttcgtaaaatgctgaatttcaatgaggatatttctgtagtgacggtgggagatacggagcatcccctggactgctgcccctgctgcggaactcatcccgattcttccggtcaggtgggcctgattaaggtctacaaggtcgagcagaaccgcgggcggaccagaatttactttgacgcgggaaagcgggcgctggaaaactacgagcggcagtacgatgtgctgacccaggctggggagcggctgtctgccggggagcgggacctgatggagaagctggaccgcctcatgcagaaagaggacgagcttcataatgaagtttatcagctgcgccaggcgagagtgaacgccgctgcagaggagatccggcagaatcttcatccgggtctggtgaaggagctgaatgacctctcggatgatgaaatcctgaggatccagaagaaactcaggaaagccgtcagcggagtgattttccttgtgcagcctgcggagcaggcggttttccttttgtccgatggaaaggggacaaaaaatgactgtgcggcgatggtaagagaactcgcgcggccgcttggcggaaagggcggcgggaagccgcagagtgccagagtcatgttcgatgaccgtgaggccatggaaaaatttctgaagggcgcggcagaattcgctgagttagacaaatagcggcggttgtatattgcgccggccggaagatttaatataatagaagcaataaatccttatcgagagcggctgagggaataggcccgatgaagcccggcaacctgttacggggaatcgtacaaggtgccaaatcctacaggagcaggaccctcctgaaagatgaggaaaggtttgaagatcaatccttttctcgtatggaaaaggatttttttttacaagatacttatgcaaactgaagggagttagcagaaatgaagagattatttacctctgagtctgtaacagaaggacatcctgataaaatctgcgatcaggtttctgacgcgattctggacgcgctgattgcgcaggatccggatagccgtgtagcatgcgagacaaccacaactacaggctatgttatggttatgggagaaatcagcaccaagggatatgtagacattccgtccacagtaagaggagtcctgaaggacatcggatacgaccgcgcaaaatacggattcgactgtgagacatgcgcagtactgtccgcgatcgacgagcagtcctccgatatcgctatgggcgttgatgaggctgaggaatacaaggagtcttccgataaggatgatctggataagatcggagcaggagaccagggaatgatgttcggctatgcctgcaacgagacaccggagtacatgccgatgccgatcgagatggcgcacaagctggcacgccgcctgaccgaagtcagaaagaacggcacgctggactatctgagaccggacggaaagacgcaggttactgtagaatatgatgacgacaaggttaagcgcgtagacaccgttctggtttccacacagcacagccctgacgtcacacaggcacagattaagaaggacatcatcgagcacgtcatcaagccgatcattccggcagagtatctggatgacaagacccgtttcatcgtcaacccgacaggccgtttcgtaatcggcggaccgcagggcgactccggactgaccggccgcaagatcatcgttgatacctacggcggatatgcccgtcacggtggcggcgcattctccggaaaggatcctacaaaggtagaccgttctgcatgctatgctgcaagatgggttgccaagaacctggttgccgcaggactggctgaccgctgcgaactgcaggttgcctacgcaatcggcgttgctgagccggtttccatttctgtaaactccttcggaacaggaaagaaagacgatgaagagctggctgagatcgtaaagagacatttcgatctgagaccgggcgcaatcatcagagatctggacctgaagagaccgatctaccgccagacagcagcatacggccacttcggaagaaccgacatcgacgttccatgggagcacctggataaggtcgaggagctcaaggcagaactgtaagagctgccttcggcatgcccgtgttccgagttctgtgcggacaggggcagagcttcgcatagcggaggaaaggcagttgaaactgctgcattctgcataaacagggctgaagacatatatgaaaataaacggcattctgcgggatgtcgtttttttctgtataacggggggcggatacctgccagctgcagcagttctctttttcgatcagatttttatgtagtgcagcttctttttcgcaggagaccgcgagtgctttcattcacatcgcagctgcagcagaaactatcgcatcagttttatcctttgttcaacccgatcggacagagagtagactattatctcagcagagacagaagatgaccggtttttctcctattaatatcgtacagaatacctgaaagtggggtgttcagcctggaaaggtgaatttcattataaaagccttggtaaaagtcacgaaaaaacggttcttataccaaaccaaaatttttttggtaagatagaatggtaagcgtgatgtgtaccaaaaaatgtatcttaaataatataaattaagagacgaattacctgttggttataatgatgcgtagcaatgtataaacaatcaagtaaaaatgaacgagcataacggaagctactgccgatcaggcaaaaagcaactctgagtttattatgtcggaatagatcgataaatatgctggtaataatggcagaatttgctctgatatatcagaccagatagcgcctgtgataataggtattatgtaaaaaagtatacttccggtagattttaccaaagtatacagtgtacttggtaaaatttgcgatttaaatggaagcgtaccaataattcctggtaaaatatacctttagctaagatattccgctgctagtgtctgtataaatgatgaataacgtgaaatgaatgcacacttgcagacaatacaaggactttgggatacagtatactaaagttcattcctctggacggtgggcagacaattgaagagaatggtgctcagagcggaatattgttgatttactcagcggagactgcttttccctcaaagagatcagcatctatgaaaaaacatggtacaatttcagatggtcgtgcatttacaaaatatcgtattgtctcttatctgcagctgagcatccgcgcagtctgatgataaatgggccgcgaatatcacaaatattaaggaatagaggagtttatctatgtcaaagaaaaccgcaatgtttctggtcgcgctgacgtccgccttctgggggctgtcgtttacggcatccaatctgctgctgaagaccatggacccgatcatgattctggaagtacgctggacgatcgcgtccgtgatcttcggcgggatgatcgccgcgggaaaactgagaatcagtttcaggaaaacaggcgtgaaggccctgcttctggcggcatttctggagccttgctgttattccattttcgagacctacgggctttccctgacatcgccttccgtcagttcaattttcatcgccacgattccctgtatgtcattgattcagggcgtgctgttctttcaccggaaggcagagctgaaaaagattatcgccattgctctggcttttctgggggtcgctgccgcgacggtgctggcgcctggatttcagctcggaggacgggcatccggatatcttctcatgatcggcgcagtctttaccggcggtctctattcccatgccagcagcgcggcaagcgcagattacgagtcggcggcggtgactgctatgatggcctttgaaggcatggtttggttccatttgatcggttttctgaaaggcgatggcttgcaggcatggaaaaccgccttcagcacaccgaaaaatgctgctgccattctgttcctgggaatctgctgctcggccgtctgctacctagcctataacaaacttctggcctatctggagccttctgcggtcaacaacctgtccggaagcaccacgaccatcgtcggagtcgctgcggggattgttctggccggtgattcctggggcttgtacacgatcgcggggctggcgctgaccctggcgggcgtctggctgacgagcagggatcttcaggagaaaggagctgcttgcagagattgtttgcgggaatgaaaaataggatgattgtttgggatatatttacatatgatgcattaattttaaatttaatgattattataaaataaagagttgacaaataggatggtaaactataatataaaagagatctttatttataccataccaaggaaataaaggttccgatagtaaggcttcctgaataaggaatgccgcacgaagagtggcgtctctcaggaggcgtcactctttgtttttatgaaaggacagtgtcatgtatagaatcggattggatattggtattgcgtcagtcggatgggctgtgcttgaaaccaattctgatgggaatccaatgagaattatagatctcgggagctatgtttttgatgctgctgaagacccaaagaccggcgcatcattggcaaaaccaaggagagatgcacgaggcgcaagacgacgtctgcgcagacataaatttcgactgcagagaataaaaaaacatatcgtgagatacggcattctcagcagagacgagctggagcatctctatgatgttccgggcgaagatatttatagaatacgtgtggaagcattggatcgggcactggacgatcaggaatttgctcgattactgattcatcttgcacagcgcagaggattcagatccaatcgcagagttgacgcgaaagatcaggatgaaggaaaactattgtctgctgtcaatgagaatgccaggctgatgaaagagcgtgggtacagaactgtcggggagatgctgtataaagacccgaaattttccactgctaaaagaaacaaagaagagtcttattccaatacagtttcgcggtcacagatggaagatgaagtacgaagaatctttgaggctcagagaaagtgtggaaatcagaaagcttcggaagaattggaaaaagagtatttggatatctacctcagtcagagatcttttgaagaaggtccgggaggaaatgcaggtgattactgtccgtacagcggcaaccagattgaaaaaatggttggacattgtacttttgaacctgatgagaaacgtgcagtaaaggctagctatacctttgaacgggcaaatttattgcagaatattaataaaatgcagctcatagacgagaatggagagatgtaccctttaaatgaggaacagaggcacgctcttgttgaaagggcacatcagaccgcaagtctggactacagcaagatcagaaaaacgctgaatctgaaagaaacagagagattcgcgtatgttgattataatcagaagagtacgattgaaaatgctgagaaaaaacagaaattcgagtatctaaagcattatcatgaactcagaaaggccctgaactctgttgaaaaagacttgatccagaaatgcccggttcaagtcagggatgagattggaacgatcctaacttattataaaacagatctaaagatcagagcagctttagataaaattgaggatccgtttttgacagaagaggttaaggatgccgttatggggatgtctggctgttcaggtgtcggctcgctgtcgctgaaagcgttaaataatatcatgccgtatttagaacagggtatgatgtacgataaagcagcagaggctgccggatataatttccgtggtcacgatcgatacaataagggaatgtatcttccgactctgtctgaggatgacgacataagaaatccggttgtacgccgtgctgtttcgcagacgatcaaagtcgtcaatgcaatcattaagaagtacggcaagccggttgctataaacgtggaactggcaagagagacagccaggactttcgaagatcgtcaaaagattctaaaacaacaaaagaaaaacagagaggcaaatcagaagactaaacgattacttcaggaggagttccatctgttgtcaccaagtcatttagatattcttaaagaccggctgtttaaggaacaggatggaatctgcctgtattccggagaaaagatagacaggacaaggctgtttgaagatgggtatgtccagattgatcatatcgtgccgtacagtatcagctgggatgattcctattcaaataaagtcctggtaatgacgagagagaatcagcagaaaggtaacagactgccgatggaatatctgaacggcaaaaagcaggatgaattttgcgtgcgtgtcgagcggcagatccgggacctgcggaagaaaactaacctgctgatgaaatctattccagcggataaaaaggaaagtttcaaggatcgcaatctgaatgataccaaatatatctgccggtttatgctgaattatttaaatgaccatctactatttgatcagtcggtagatatggggaaaagggtaaccgctctgaatggaagtgttacagcatatcttcgcaaacgatggggattaaataaagttcgcggaaacggcgataaacatcatgctctggatgctgttgtcatcggatgtataaacaattctttgattatgcgggtgacccaatattttaagcacagagagaacttcctgtttgagccggaacagcatgtacagaaaaaagctgaagttccgagcccgtggccaaatttcagagaagaagtagaattcaggatggcagacaatccgaaagccttctatgacaggctttcgactaagatttcgctgaccaattacagtgaagaggaacttgaacaggttaaacctatatttgtgtcgcgcatgaaggtaaagaaaaagaccgggtcggcaaatgatgcaacgatcagaggtctgaaggtattggaagatggtcagatggtcgcgatatcgaaggttcctctttcgacacttagattggacaagaatggtgaaattaaggattattatcacaaagaggatgatcagcttctctataacgcactaaaagatagattaaaagagtatggaggaagtggggaaaaggcatttacggagcctttctataagccgaaggcaaatggtgatcagggccctctggttaggaaggtgaaaactgctaaaaaaatcacaaatggtgttgttctgaatcatggagagggaattgccagcaatggcagtatgctgagagcagatttttaccggaagaatggaaagtactacgccgtgccggtgtatgtcaaggatatggtgaaagatcatttgccggacagagcagtgactctaaagcatccatacgaccaatgggataagatggacgacaatgattttctattttcattatatccgaatgatgttgtatatataaaatttaatgtgaaaaataacaaatatcaggagcttcatttggttaataaagacagtacattgcccgagaagaaagaatttagggaattacacggatactacaagagttttgatatagcgacaaattcaattaaaataatcacggatgataactgttattacggtaaaggtatcggaataaaaactcttccagagataaaaaaatgtgcggtagatgtattgggaaatctgattcctgttgcacgagaaacaagaaagcacaggtaatctgatgggatacagacatttaatcatcgcttctccaggaaaactttctgtaagaaggggtcaattaatgatttctggaacacaggattcatcctatccgatggaagatgttgacagtttgctgatcgagaatcagcaaactgtcatttcagccgctgcgctggatgctctggcggatgcgggagtggctgttttcatctgcaatggaaaacatatgccatcagcagttgtgcttccataccagcattacagcagaaaactttctgtgcttgaattacagatcaatacaagcaggccgcggtataaaaacatctggcagcagattatcaaaaggaaaattctgaatcaggcagaggtactccgcatttgtaaaaaagaagtggaatcaaacaatatgctgaaattggtgtctgacgttaaatccggagaccgtacaaatgttgaaggccaggctgcggcatactattttatgtcgatgtttaccgatgaatttcacaggcatcatgatgattttcttaatgcggtattggattatgggtatgcaatactaagaggcgaaattgccagaacattggcgttatacgggttcgaaccttcactaggtatattccatcatagtcatctgaacagatttaatcttgcagatgatcttatcgaagtatatcgtccggttgtcgatttatatgcgtctaaattagcggaggcttcagatgagatggatttgacaccggggataaaaagagatcttgtcgggctgttaaatgcagatgtttttcaggagaagcaatgtcaaccgctatcgtatgcaatagagcgtaccgttcagagttatatggcggtattgtcgggaaaagaaaaggaggtaaggctttgcagcattttgccgctgaagctgcacggctatgaataaactgatgcgtatgatcgtattttttgatttaccgacgaacacaaaatctgaaagaaaggcagctcataaattcagagagtttttgctgaaggatggatactatatgcttcagtattcagtttacgcccggatctgcaatgggtatgattctgtgcgtacacatacgagaagagtcaaacagaatgttccgcaagagggatccatcaggttgctgaccattacggaaaagcaatatgagaaaatgacgattatcctcggtgaaaaaaggcaggacgaagaaccaatagaatccaatttaaccatcgtaatttaaagtgaaaaccccttgagaacgttgcttctcaaggggtttcagctccaatattataccataccaagaaaatagagggaccgataactccgggcgaagatgaatacaagatatgcgattataccataccaagaaaatagagggaccgataacgaatggttcatacttcggctggcatacagattataccataccaagaaaatagagggaccgataacagaaaaaataccctcgttatcatccatgcaattataccataccaagaaaatagagggaccgataagtgagaaagctatggatgaaaatgactacggattataccataccaagaaaatagagggaccgataactataaaagcggaaataaatttataatttctattataccataccaagaaaatagagggaccgataacatgctttccactgcattagggagcgtgttattataccataccaagaaaatagagggaccgataactgacttcatgagtgttaataaccgtccataattataccataccaagaaaatagagggaccgataacagtaacaggtcgatgtattacatcgatccaattataccataccaagaaaatagagggaccgataaccaatctcttcatgtcatgccggtagctgacattataccataccaagaaaatagagggaccgataacagcagacaaggccgcgagggaaaacgcagaattataccataccaagaaaatagagggaccgataactcgtactctggaaccgttggaacgactacgattataccataccaagaaaatagagggaccgataactttgtttttccattcatgatatgtcatagtattataccataccaagaaaatagagggaccgataactatatcagacgtgtggaataaaatcatgtaattataccataccaagaaaatagagggaccgatagagtaaatttcctttgggttttaaccattgcaattattccatgctaaaaacagaagcttcctgtatgattcaaatatagggactcgacagaaagcaggtgaaagaaaagatacctcaatgtaatataaggtttgctgacccaccacagttcgcgaaaccattacaagacagagatgtatctgaaatgaagtctaacacacagaacacaaagattgcagcaatcacggaaaaaactttgatcattggcatcgatgtagggagtgaaacacacttcgcacgggcattcaactggcggggatatgaattctccagaaagccgctggaattcagcaatacagagtaaggggggagtgacgaaagaagaagctcatcagggaaacgtccgccgaaaggtgctggtgagcgggaactggagtcagcaaacaacaaagaatgagccagtagtcggcgggaattttgtccataaggcacgaccctgtaaaggagctaagctgacaccctggttatggccaggcggaacgaaggaagtgaggacccgcgggaaaccgaaggtgatcctggtagatacgggaggtgcgctgccatagagggaagggatatacaacggccatgaatatcggaacacatatacttttgatcgtatatataccgtgcgtttctattcatttcagcctgattttctgatattgcagggaacagagttgtgcacaatcaaaagaaactcctatttgtgttctgaaatccgagtcgtatcagacatgcgagtatgttgtatacacaaacagactcgttttcccggcaaaccgctttccgttatgaagttgttttcccggcaaaccgttttccggtgtggagtttttagcagtaaatcgccttaagaccaggccgttttcctttttgtcaacccaaatccactttgccaaacaaaattcacgaaatataaataaaaaacttgtatcctaaacacaactctgttattattaatcataaattggatgctaatttgtaacttgataacaaaggtacgaagcgtctgcagtgccggacgctttttacgttgaaatgcttatgttttgggaggaaaactgatgggagttaaagtactgaagtttggaggttcttcagtggctgacggaatccagctaaagaagctgaaggagatcgtcgaagctgatccggatcgaagatatgttgtggtttctgcaccgggaaagcggttcagcggtgataacaaggtcacggaccttttatatctgtgtaagacggaaattgacaaccacattccgtatgatcaggtattccaggtcattatcgaccgttacagcgctgtaaaactgaatctcggcattgatgtcgacctgaagagccgctatgaggaaattcgcaagaatatcgaggccggatgctcggttgactaccttgcaagccgcggtgaattcctgtctgcggtactggttgccgcatatctgggatatgactttgtcgacacagccggactcattcagtttgactcccgtggaagacttcttccggaagaaaccaatgaggcactgaaggctgaacttgccaaacatgagcgcgcagttctgcctggcttctacggcacgcagaagggcacggacaaggtccgcgtcttctcaagaggtggttctgatgtaaccggttctctggttgcccgcgctgtagatgcagatgtttacgagaactggaccgatgtgtccggtttcctgatggccgatccgcgcattgtggaaaatccgaagccgatcgaccagatcacttatgtcgagcttcgagagctgtcctatatgggggccagcgttctgcatgaggacgcggtgttcccggtcagaggcgcgaacattccgatcaacatcagaaacaccaacaagcctgaggatccgggcacaatgatttccacaagccggccggaaaacacggaccgcattctcagcggtattgcgggaagtaaggacttcaccgttattgcaatctataaaaatatgctgaacaaggaagtcggctttatccgccgcatcctgaccattctcgaggatatggatgtcagctttgagcatatcccgaccggaatcgacacggtttccgtcgtcatttccaatgatcagctgccggagggaaagctggacgatgttctggacgcgctgcagcgccaggttaatccggacagcatcactgttcatgacgacatcgcgctgatcgccgtcgtaggtgtcggcatgagccgccgtctgggaacatctgcgagactgttcaccgcccttgcagaggccggcgtcaacgtccgcatgatcgaccagggatcttctgagatcaacatcatcatcggcgtactgaatgaagactttgagaaggccatccgcgccatctataacgccttcaattccgaccgcgatgacgttctgaagaaaactctgtccagtcttcactaaatttgaaccatacccataaccaattctgccggaagtttctgcggcaggcttttaaacagcctgccggggaagcttccggcttttccgttgtaaaatattttcctgttctcttgacaaaatctacgcgcaaggatatacttgtcaatgctaattattaacaatgttaagtattaacagtgtaaaatctgaacgctgttaaataaaaaacagcggatgtgctaaacggcatccgtctgtatcaggaaaagcgtggatgaagaatttccgcgggaaaggagtaagaatggaagaactggaacgtgaatttatccgttcctgcatgcagtttcataaagtgaaaatgtatgaactggttccggacttaaaccggggagaattgatggttatgggaggtaccgcccgtcttcagtgccggaatccggagcataaagtgcgcatgtccgatctgcttgcgggttcccgcatgacggctccaggcctttcacgcgttctcagaggtctggaaaagaagggcctgatggagcgcacgcaggatccgaatgaccgccgcgtgacgctggtcagctttacagagaaaggaaaaaataaatggtatggggaccatgaaattctccatcgtttctgttccgagctgatccgaagaatcggagaagaccagattcgcgagattatccgcctgaatgatgaaatataccagacggcggatgaaatttatcatgaacagcttgcagaaatgaagaagaaacagcagaaagccggagaaaagaaatagccggcggaacaattgggattaaagaaaggtattgaatgcgataaacattcaggaggcagtcagagttgagatatttaatcaagaatttaaaaccctactggccggtggtcatccttctggtggtcctactggccgtacagggattcagcgagatgtccatgccgcagtacacgcagaacatcatcgatacaggaatccagaaccggggtgtagagcacatccttccgacaaaggtaaaacagcaagagtacaatgaagcgcagatgttcatgacttcggctgagaaaaaagcctggaaatctgcctatcagaaagaaggaaacaagtacgtccttcatgcatctgaaagcagactggacaggctggacgaccagcttctggagccgatcgtcctgacctaccagctcggccacatttcaccggcccagtataagaagatggtcaggcgtcagcttaaggcagccgcagccgcccaggaaaaggccatgaaaaaggctgcatcttccggcatgagcgccgggcagatcgctgacatgcagaagtccgcccaggccggagcccaggcacagagcacttcttccctgcagacggatccatccgctctcctgaagaagctggactccatgtccgttaaggaaatcgcggatgccgcaggcatggatgtccgcattttccatgcaaagaatcagaacggaaagtcgaaaacttatgtcgacattcgtggagccatgcagaagatgattgacagcggccagatgagcagcacgcagattcatcagatgcagaagcagattaagaagaccatcgacaccgtcggcccgaagacactgaagtccatgggctaccgttacgcctacgatgcagaaaaggacgccggagttcatgtgaacgccgtccagatctcttatctgtggagcgcgggaaagaagatgttcctgatggcgctgctgatgctcgcagctgccgttgccgtttcctatctcgcatccagagtcggtgccggtgtgggacgcgatctgcgtgacaaggtcttccggaacgtcattggatactccaatgcagagctggataaattccagacttcttcgctgatcacccgtgccaccaacgatgtgcagcaggtccagcaggtcaccaccatgatgctgcgcatggtgctttacgcgccggtgctgggtgtctggggaattatcaaggtttaccagactcatgccaacatgagctgggtaattctccttggagttgccgtcattatcggttttgtcctgaccctgatggcgattgccatgccgaagttcaagatcatgcagaaactggtggacaagctgaacggcgtatcccgtgagattctgaccggactcatggttatccgcgccttcggccgtcagaagacagaagaagagcgtttcgaccaggccaatgtcgacctgaagcgcacccagctgtttacaaaccgtgtcatgaccttcatgatgccgtccatgatgctgattatgaacgctctgtccatcctcatcacctgggttgcctcatccagagtcgattccggaaccctgcaggtcggcgcgatgaccgccttcatcacatacgccatgatcatcgtttccgcgtttatgatcatcaccgcgatgtccatcattctgccgagagccggtgtcgctgcccagagaatcgatgaagtcgcgacaacagtttcctctattcaggacaaaaagaacccggaagttctggaaggcggcaagggagaagttgtcttctctcacgtagactttcagtatccgggtgcagaggctaacgtcctgtctgacatcgactttaccgcagagccgggaaaggtcaccgcgattatcggcggaaccggatccggaaagagcacactgatcaacctgatcccgagattctacgatgttacgggcggaaagattctggtggacggaaaagacgtccgcgacgtcacgatgaagtcgctgcgagacgaaatcggattcgtccagcagaaaggcattctcttctccggaacgattgccggaaacatccgctttggaaacgcagatgccagcgatgaagaggtaaagcgtgcggctgagattgctcaggcggatgacttcatcatggataaggaggaaaagtacgacagctatgtctctcagggcggaaacaacgtatccggaggacagaagcagagactttccatcgcccgcgcgattgcgaagaagccgaagatcctgattttcgatgacagtttttccgcgctggacatgaagacggacgcaaagctcagagaaatcctggagcaggaagagcacgacaccactagaattatcgttgcgcagagaatcagtacaattcttcatgcagaccagattctggttatggatgaaggaaaaatcgtcggcaagggaacgcatcagcagctgatgaagtcctgtgatgtatacagacagattgcggaatcccagctgtctgagaaagaactggaggagatggcataatggcagagaataataatcggatgccgcgcagaaactccggaggcatgcggggaccgcacggtcctggcgccatgggcgcggtggagaaaccgaagaacttcagaaaatcaattaaggaacttctggcctatatcggccgctataaatttggtgtgattgccgtcatgattctggcggcgggatccacggtattcaatgtcgccggccctaaggtcatgggccacgcgaccacagaactggcagacggcctgatgagaaaggttgcgggaaccggcagcatcgactttggcaagatcggccagatcctgctgttcaccctggctctgtatctgatcagctctgcactgaacttcattcagggctggattatgaccggcatcacgcagaaggtcgtttaccgcatgcgtaaagaaatctcagagaagatcaaccgcatgccgatgaaatattttgaaagccggccgatcggagaggtgctgtccagaatcaccaacgatgtggacaccttgggtaccggactgaaccagagcatcaccatgatcatttccgcggtcgcaaccatcatcggcgtcattgtcatgatgctgaccatttccccgctgatgaccctgatcgccctgattatgatcccggtatctgcgcttctgatggccgctgtcatcaagatgtcgcagaaatactttaaacagcagcaggcttccctgggcgtcatcaacggccaggtagaggaggacttctccggtcagcaggtcatcaaggctttcaatcgagagaagcagaccattgcggagttttctcagacgaatgatgagctttacgtttccgcctggaaatcccagttcttctccggagccatgatgccgctgatgaactttgtcggctatctggcctatgcaggcgttgccattgccggcggcatgctggccatccgcaatatcatcgggatcggtgatattcaggccttcattcagtacgtccgcaatctgacccagccgatggcgcagatttcccaggtcatgaaccaggtccagtccatgacggcggcttccgagcgtgtgttccagctgctgaatgaggacgagactgacctgcaggaggatgctccgcttccgctggaggatgtgaagggcgctgtagagttcgatcacgtacagttcggttatgatccggagcaggtgattatccatgatttctcggcaaaggttgaacctggccagacagtagccattgtaggccctacgggtgccggaaagacgaccatggtcaagctgctgatgcgtttctatgatgtgaataagggacagatccttctggacggacaggatatccggaccttcagccgcctggacctgagaaagtatttctccatggttctgcaggacacatggctcttctccggaacgatccgggagaatatccgctacggccgtctggacgcaacggatgaagaggttgaagctgcggcaaaagccgcgcacgcggatcatttcattcgtacactgccgggaggctacgatatggttctgaatgaagaagcatccaacatctctcagggtcagaaacagctgctgaccatcgcgagagcgatgctggcagaccgtaagattctgattctggacgaggcgacttcttccgttgacacccgtacggaaaaacagattcagagtgcaatgaaccgcctgatgcagggccgcacgagctttgtcatcgcccatcgtttatctacgattaaagatgcggatatgattctggtgatgaatcacggtgacattgtggagcagggtacgcatgatgaactgctggcgaagaacggtgcttacgcagatctgtataattctcagttcgcaggggaagaagaatagaagcaggaaaaaatctgaaaatatgatcgtgatgcggagagaatccgcaggggagaagcaggagaatgccgggaagacagagccggggtcctcttgctttttgttttttgtccagtggaaaatccggtgatttccagaccttcactctgcggacataaaaatgccttgtccaatgcacaagcgctacgttttcattattggaaaaatagtatataataaacaataaagtcttattttcactgtgtgcatctgcacggaatggg

SEQ ID NO: 2745 - DNA, 23264 bp, synthetic construct
  source 1..23264: mol_type = other DNA
  misc_feature 1..23264: note = Synthetic
acgcgagcatgagcaccgcgttcggcgatgatttcccggcggactgcgcggaggcggaaaagcgcatgatgaagggcgagctccccgcctatcgctgcgaagccagcgcctattgcagagagggccgcgcggagggcatcctcatcgggggtaatctcgccactctcgccgcctcgctggataccgcgtatgacagcacggcactggatcggccgttcattctctttctggaagagaccggcgaaaacatgcagcacatacaccgctttctcaccatactcaagcaccggggcatactcgaccgggccgcggggatcgtcttcggcgagtggataggcctgccgacggacgggctgggcaactacggcgcggcgagaggccgcctgtttgaatcggcggcggatatgatctcccggcagtttctctccgatctggatataccggtcgccttcggttttcccgcggggcacggggacgtcaattatccccttctgatgggcgcggaggcgatcctcgacgtctcggcggagagctataccctgtcctgggccgcgccgcaggttgaagaggaagaaaagccggcggacacgccgccttccccaaccccataacaaaagacaaaggagccagaacatgaagaaaagcgccattcaattgacaaccgtgcttctcacgctggtgctgctgatggcggtgctcatcctttacggtgtgaagaaagacaagtccgaatccgcctcgcccgcgctcaccccggccgggacggccgcgccgactgtgccccgcagacaggtcggcgagcgctatgacagggtcatcacgattgagggtatggaggagacggtccactacgagcagatcagaaacgacacggtcggcatcgagatgggctacgagtatgaaaacttcaggcggcgcagcgagccgggccgcgaatgctttatctcggactgggacgatcccgacaatcccgagaactatcttgaggtgacaagcagcccggacagcgccgagaccgtcgccgcggccattgccgagacgctttcgcgggactacgagatctaccgggatgatgcgttcatgcttgaaggcgcgggccgctgcatacgcatcgacgcctccgcggacaagggcggtctgaccatgccggatcacctgcagctcgtgtatatcattcccgctcccgacggctgccgcatcgcgacggagcactacttcattgtggaatccgagggctttggcaaccgcttccgcaacatgatgcacaccctgacggtcatcgacaggcagggataagaggcagccgcggctgacatgatcgccgaacagaatgaataacacggaatcgtttggaggagagccatgattaagaaaagaataagcgccgtactcgccatgctgatctgcctgtctttgcttacgggtacggcagcctttgcggcggagaacgtcaaagtgaaagagccctttgcctatgaacacgatcccagggataaccctaccgccatgcgggacatcgtggtcaacccggacgcggtctacggcttctctccgagcaaggcggaagattccacactcaaggattatgcggatctcttcgactggacggacgcggaacaggttgccgccggacgggagcagcgtcaggcgtatcatgacagtctggaagagctgtatgagatgatcctggaaatgacgcttgcggacaaggacatcgagagtattgcccgcgccgtgagtcaacgccgcaacgagctgcgcctggaggcctacaaggacgatcccgagggtctggcgaccgttaaaaagcggaacctggaaacctacggcaacgagctcggccccacgcaggattctctgtatgacaaatacggctcctgggaaaccgtcctgctcaaggcgctgggaaccaacgccgggatggacgcctgcctgggcttctatgatgaatactattatctctactttcttgacacggagacagacgagcccgtttcagacggcaaataagggtactggaggaaattctatgaaacagctcttgaaaaacgcgaagctctatgacggcacgggcgcgcagccttttgtcggcgacgtgctgatcgacggcgaccgcatcgcaaaggtcggccccgctctcgcggacgaggccgacgtcgtgtatgatctcagcggcaagtcgctctcccccggttttatcgacggccactcgcacaacgactggttcgcgatcaagaaggagccgctgccctattttgagccctttatccgccagggtatcgccacctttgtggccggcaactgcggcgtctcgaccatcggctttgagccggactcgccccatgcggacaagctgggcggcggcctgtttacctatcaggatacgacaggcaggtacggcacgctggatgagtttttcgcggccgttgaccggaacatgccctgcaacctgtccgttctcgccggtcactgctccgcccgcgccgccgtctccggttttgccaaccggaagctgacgcccgaggaggaggccgggatgctggccattatggagaaggctttgcagcagggcgcggcgggcctctccctcggcatgatgtacgagccggggctctacgccgacgtggaggagcagcgcaaggtcgccgagctctgcgtcaagtacaataaaccactgacggtccatccccgggcggagtccaaggtctccatggcctatccccagctctttgggcgttcccatctcctgcgcgcctttgacgagctggtggagatttccaagggtacgccgctcaaactccattactcccacgcgatcttcgtgggccgcagctccttcaaggacaaggcggagctgctgcgtctaatggacgagctgcgcaaaaccggcacggatgtgacctttgacatctacaacgagtgcctgggcgtgtcggtgatcacggtcatccttccgggctggtatcagggcatgagcgttgaggagaagcgaaagcccttcaaccggctcaagctggcggcgctggtcaaggccacgagcctgctgctgggcttcggcttcaaggatattgtggtggcctatattgggccgggttatgagcgctttgagggcaagtccgtccaccagatcgccaaagaggagggcatgagcgacctaaacgcctacctcatgctctgcgaggcatctgacttcaagggtcgggtcaacatgggcccgtattccacaaaggagatcatctccgactttgagcatgacgggcactgcctgtacatgacggacgcctgggtggaggatcacggcgtgcagaaccccgcgatctacgattgctaccccaagttcctgcgcgactccctgctgggtacgggtgacaccatgcccaacacggtccgccgcatgaccggcgcgatcgccgaccgcttcatgctcccggagaggggctatctgaaggagggctatttcgcggatctgaccgtgtttgacgagaacatgctccgcgcgggcgtgcccgaccgggaggagcccttcggtattgagaagctcttcatcaacggcacgctggtgctggacggcggcaagctcaacgagcaagccctgaaaaccaccggccgcgccatccgggtgaaataattccataacgcaaggcccacagtgaggacagtttcactgtgggccttgcgttattccgctttgatccccgccagcgcgaggaacttcttttcgttcaggatctcatgcgtgataaacttcccgtcccgaaacagggagaaatttgtcaccggcgagggggcgttctgtgccttctccctcgtgtcgatgtggactgccttcagcggcaccctgtattcctccgcgacggcagtgaggcgaggcacccagtagtaggtgaaggggcactgatcggaatagtacagcacaaagccgctgtcttccactcgtggatgcttcgcgcaagccttgaactttggcggctccgccccttctttaaggggcaggacccagagctgtatgccgctgtcggactcgtccgcgacccggaagcccttgtacgcgagatacttcgggtcggccaggaagcccttcttttttgcagaggacaggatggtcaatcctttacgcccctgctctttcgcgtctcgtatgcactcgcccagcagatcgcttgaatagccgtggcccttgagcgagcccgacacccacaggcagttgatgtgcgtatacccctccgcgtccagcggctgccaggcgttttcggcgggcatgtactcgatgaagcacttcccgcgcagctcgctgcggtagaagaccaggccctctttgaagcgcgctttcagccattcctttttctgtgcgctctggttattcgacatggcgcagcagatatgctctctgtcgatgttttcctccgtgatacggatatagcccatgctgaaaccttctttcaaatgacctgccatcaccgcaggctgttgatctctctttgcagattttccagaaagcgccccgcgtgggccccgtccatctgcgtgtggtggaactggaacgagacgggcagcgtgcagcgcagcagcccttttcggtaccggccccagatcagaaaggggttgttgaaaattccgctgttcatgccgaccgcgccgtcaagttccgtctcgataatcgctgaggtgccaatcaccatgcacccgtcggagaggtcgcggtccgtgcagttctcggcgacctgcgcggtgtgctgcaagtagtcccggttgaaaacgtccagatcgtctgcgtacagaatatcgcaggagctgacttcccctctcctgttcttcacaatggtgttgaccgcaagggactcataccgcatcagcctgccgcccaccgggagcagatagaactctttgaccggcacagcggctctcccgatgcaccagcacagcagcatgttgaatttgagacccttccgcttgctgactctgaccagattggtgacgtccagggttttgaaaaacgttaccatcgggttcggcgccttcatccagaacgcgaaggccgcagccctcgttgtgtcctgcgggtttacttcctttgccacgcgctcaccctccccatatggcgagggcgcagcccgccgcggcgaagacgagtccgcctatgattttctctttcatcccggcactgtcctttcattcaagcaaagcgacacttttttattcttcgtttagagggacgtccccttttgcgatcttctcccacgaaaagcccgggatcagatcccgcgcggcgacgggggcgtcgctgtccgccaggccgcagagatgcgcgaggcggccgaccacttcctccggccggtattcctgccgcaatacctgggtgctgagactgccgaggcgcttggagagcttgcccgccccgccggtgagcagcggacagtggcagtagtccggcgcggtcccgcccagggtttcgatcagccacttctgccgcggcgcggaggagagcagatcgcgcccgcgcaccacgcgcgtcacgcccatgagcatgtcgtccacgctcaccgcgagctgataggcaaacaccccgtcggcccgtctcacgatgaagtccccgagctcccgcgccgggttctgggtgaacgccccgtagtggccgtcgttaaccgtgatggcctcgtccgggctgcggagcttccaggccgggggcttgccgccgcgcagcagaacttccctctcatccctgctcagacgggcgcagcggcagccgctgtcgtgctccttctcccccgggtgcggagcggaggcggcggccaggcgttcgctccgggtacaccagcagggatagacgaggtcgcggtctttcaattgttgaaaataggtatcgtagacagcgccgcgctttgactgagcgtagtccgggtccggccagccccggtcccagtcgagacccagccatcgcagatcgtccgccatggcctcggcgtagacccttttggagcgcgcgggatccaggtcctccatgcggaagaccatctccccgccgagggcgcggcagtccagccacgccagcagcatggccagcagattgccgaggtgcatgtagcccgagggactgggcgcgaagcgtccgacggtgctcatctgtcctccgcgaggatcaggggcgtgccgtcgcagagaagctcgccgttctcgaccgtgacgaggttgccgccgatgtggttttcgtatgtcccgtcggggagcttgaccttgacacgggcgttttccccgttgagagagaagacgccgacacagtgcttttcggggccgaagcgctccaaaaccgcgatgcggcgctgatcgtcggccgtaccccagaagtgatcctccccggtgaagagggtcttcttgatcgccgccagcttcttcatcagcggcatgagggagcggcccgtctcgcgctcgataggctcgcgctcaaagaggctgggcacatgggtgtcggcccactcctgcccggcatagatcatggtggtgcccttgaggaaatagagcatggctgtccagttgaccagggcctccatatccgtaacaacggaggcgatgcgcggctggtcgtggttttccaggcaacgcagcttgttgtaattgtcggggtacagggcctcctggaggttcagcagattgacgtactccgacagggggcggcggccgcgcaccatctcgtcgaagacctcgcggatgtcgtaggaatattccatgtcgaaagcctcatagccttcggtgtcgcgcatggcggagaagccgagtctgcgggcttcgcagttgaagctgaggtgcacggtctcggccagccagatgcagtcgggccggacctccttcacggccttcctcgcttccctccagaagctgagggggacaagactcgccacgtcgcagcggaagccgtccacgatggaggcccaatagcgcagggactcgatctggtagtcccagagcgcgcggttggcgtagtcaaggtcaatgacgtcggcccagtcgccgtagcggttgccgggcctgccctcggcgtcgtggtagaaaaactccgggtgctcagcatagagcacggagtcgggcgaggtgtggttgtacaccacgtcgatgatgaccttcatcccccgcgcgtgaatttcgtccaccagcgccttgaagtcgtccagcgtcccataggcggggtttaccgtgcggtagtcgcggtttgcgtaggggcagccgagactccccttccgcccctcgaccccgatggggtggatgggcatgaaccagacaatgtccgtcccgagggagcggatgcggtccaggtcggggatgacggcccgaaaagtcccctcgggcgtatgggcgcggacatagatggaatacagcacctgcgtctgcaggctgcggtcggtatcgtaagccatggataaaacctccggtcgttttttgttttatcatatcacaaatcggataaggtgcaagagcgagatcgcacgataagcaatccggacgcgcgggcgaagccgcagagacgaaagcacataatactgtttttcgttaaaacggctcgttttaacgaaaaggcatcgcgcaaggcgcgctgccggttttgtgccctcgggcacaaaacacgtctcataggtctccgacgtgcctttggcactataaaacggctttaagccgttttatgggagaccagtataaacatgtgcaggtaggcgtcgaacagcgcgaggcaggcgtcgcggtccaggcagatcaggtaatcctcaaactgctctctgccgccgaagagcgtgtcaaatttctcgtcccgaaagccgatcatctcattgtcctcgatggtgcagccgtagtagacccggtcgatattggcccacaggcaggcgcaaaggcacatggggcatggctcgcccgtggtatacagctcacagccggagaggtcgaaggtctccagcctctgtccggcgtcccgaatcgcggagacctcgccgtggcaggtgggatcattgttcaaaaccacctgattgtgtccctgcccgacgatttctccgtccttcacgatcacgctgccgaaggggccgccgtgctgcttgctgatcccgtccatggcctcgtggattgcaaggcgcatgtactcattctccgcaaggagagacgggtcccttacgggctcggcctccgccgcctcggcaaaggcgaccgaagaaaacagaaggagaactgccagcaggcaggataacagaattgctgttcgtttcttgattttcatgttttttcctcccgtacagtcctaagatttgtatgagaaacgggcgttctttaccggatattctcgatccggatcacattggtgttgccgctctcgccgctggtgttgccgccggtcatcacgacggtgtcccccgcctcgagattcagaacgcgcttggcctcccgcagggcgaagaagttcagcacgtccatgctggggaactgctcggtcagcagcgggaggacgccccagctcagcgccagcttgtaccaggcgcgctccccggtggcgagacccacgatggtgatgggcgcgcggaagcgggagaccatgcggacggtcatgccgctgatggaggtgacgacgatggccttggcgtcaagatcgatggccatggtgcaggccgcgtgggagatggcgtcgacgcggttgcggatggtgaactcgttgttgtggaagagtcggcggtagtcgatgtgccgctcggtctcctcggcgatctcacccatgacgcgcagagcgtccacggggtacttgcccgcggcggactcgcccgagagcatgacggcgctggttccgtcatagacggcgttggccacgtcgctgatctcggcacgggtggggcgggggttggtgatcatgctctcgagcatttcggtcgcggtgatgacgcgcttgccgagcatacggcatttggtgatgaggtacttctggatggcgggcagctcggtaaacggcacctccacgccgaggtcgccgcgggccaccatgataccctcgcaggcggagcagatttcgtcgatgttgtccacgcccgactggttctcgatcttggcgatgacgtcgatgtccccgccgccgtttgcggcgaggaaggtcttgaggtccaccacgtcctgcttgcaggagacgaaggacgccgcgacaaagtccacgccgttgcggatgccgaagagcagatcctcgcggtcctggtcgctcatgtacgcctggcgcatgaccttgccggggaagctcatgctcttgcggtcggagaggacgccgccggtgacgacggtgcagcggatctcggtgccctcgatggccttgacctcgaagatcacaaggccgttgttgacgagcacccggtcgcccgcgttcagatcgtcggccagtcccttgtagctgacggagacgatggtctcgtcgcccaccacgtcgcgggtggtgaaggtgaagtccgcgccgtcggcgagcgtgatcttcccgtcgcggaaggtcttgatgcggtactcggggcccttggtgtcgagcataatcgcgatgggcagacccagctccgcgcgcacggccttgatcatgtcgatcttcttctggtgctcctcatgggtgccgtgggagaagttgagccgggcgacgttcaggccctgaaggcacatggcccggaaaacggcggggtcttcgctggacggtccgatggtgcagatgatcttggtctttctcatgttcgtactcctttattcaaattcggcgttctgtctttgctttgctttcagtataccatccttttcctcccgccgcaatgcgaaaatggatgaagctgtctttgatacgatttgaaaattggcaaaactcattgacaaggtacgaataaatggtataatagcatcgttctttataccataccaagaacgaagcaggttactatgataaggtagtataccgcagagctccaacgcctcgcttttgcggggcgttgtctctttatataaaggaggaaacgccatgcttccgtatgcgatcggccttgatataggaatcagctccgtcggctgggcgtctgtcgccctggacgaggaggacaagccctgcgggatcatcgggatgggctcgcgcatttttgacgcggcggaacagcccaaaaccggggactccctcgccgcgccgcgcagagccgcaaggagcgcgcggagacggctccgccgccgcaggcaccgcaacgagagaatccgggcgctgatgctgcgcgaaggtctgctcagcgaggcagagcttgcggcgctgtttgacggccggcttgaggacatctgcgccctgcgtgtccgcgcgctggacgaggcggtcacaaacgatgagctcgcgcgtatcctgctgcatctctcccagcggcgcggcttccgctccaaccggaagacagcggcgactcaggaggacggcgagctgctggcggcagtcagtgcgaaccgtgccctgatgcaggagcgcggctaccgtaccgtggccgagatgctgctgagggacgagcgttatcgtgatcaccggcgcaacaagggcggcgcgtatatcgccaccgtcgggcgcgacatggtggaggacgaggtgcggcagattttcgcggcccagcgcgctcttggcagcaccgccgcgagcgagacgctggagacggcctatctggaaatactgctcagccagcgctcctttgacgcgggccccggtgagccgagcccatacgcgggcgggcagatcgagcgcatgatcggccgctgcacctttgagccggacgagccgcgcgcagcaagggcgacctactcctttgagtatttctccctgctggaagcggtcaatcacatccgcctgacggaagcgggcgaaagcgtcccgctcacgaaggagcagcgggagaagctgatcgcgcttgcccaccgcacagccgatctcagctatgcgaaaatcagaaaagagctcggcgtcccggagtcgcagcgcttcaacatggtgacctacggaaaaaccgacagtgcggacgaggcggagaaaaagacgaagctcaaacagctccgcgcctatcaccagatgcgcgcggcgtttgaaaaggccgcgaagggcagctttgtcctgctgacgaaggagcagcgcaacgccgtcgggcagacgctctccatctacaaaaccagtgacaacatccgcccgagactgcgcgaggcaggacttacggaggcggagatcgacgtcgccgaggggctgagcttcagcaaattcggccacctgtccgtgaaagcctgcgacaaaatcattccctttctggaacagggcatgaaatacagtgaagcctgcgtggcggcgggctacgccttccgcgggcatgaggggcaggacaagcagcgcctccttcctccgctggacaatgacgcgaaggacacgatcacaagcccggttgtgctgcgggcggtctcccagacgatcaaggtcgtcaacgcgatcatccgggaacgcggcggcagccccacctttatcaacattgagcttgcccgcgagatggcgaaggatttcagcgagcgcagccagatcaagcgcgagcaggacagcaaccgcgcgaggaacgagcgcatgatggagcgcatcaaaaccgagtacggcaagagctcgccgacggggctcgatcttgtcaagctcaagctctacgaggagcaggcgggcgtgtgcgcctattctctcaagcagatgtctctggagcatcttttcgaccccaattacgccgaaatcgaccacatcatcccctacagcatcagctttgacgacgggtacaaaaacaaggtgctcgtcctggcgaaggagaaccgggacaagggaaaccgcctcccgctggaatatctgaacggaaagcggcgcgaggatttcattgtctgggtcaacagctcggtgcgcgactggcgaaagaagcaaaacctgctgaaagagcatgtcacgccggaggacgaggccaaattcaaggagcgaaatttgcaggacacgaagaccgcctcgcgctttctgctcaactacattgcggacaacctcgcctttgctccgttccaaaccgaacggaagaagcgcgtcaccgccgtcaacggcagcgtgacggcctatctgcgcaagcgctggggcattgcgaaggtgcgcgccaacggcgatctgcaccacgcggtggacgcgctggtcattgcctgcaccaccgacggtctgatccagaaggtcagccgctacgcgtgttatcaggagaaccggtacagcgaggcgggcggcgttatcgtcgattccgccacgggtgaagtcgtcgcgcagtttcccgagccctggccccgttttcgccacgagctggaggcgcgtctgagcgacgatcccgcgcgggccgtgctggggctgggccttgcgcactacatgacgggcgagatcaggccgcgcccgctcttcgtctcgcgtatgccgcggcgaaaggtcacgggcgcggcgcacaaggagacggtcaagagcccgcgggcgctggacgagggccagcttgtgacaaagactccgctgagcgcgctcaagctcggcaaagacggtgagattccggggtactacaagcccgagagcgaccgcctgctgtatgaggccctgaaagcgcggctgcggcagttcggcggcgacggcaagaaagcctttgccgagcccttccacaagccgaagcacgacgggacgcccggccccgtcgtcaccaaggtcaagctctgcgaaccggccaccctcagcgtcccggtccacggcggtctcggcgcggcgaacaacgacagcatggtgcgcatcgacgtgttccatgtggagggcgacgggtactacttcgtccccatctacattgccgacaccttaaagctggagctgccaaataaggcgtgcgtaaaaataaagaaaatttcagaatggaaacatatgaaaccacaagattttatgttttctttatatcctaatgatttatttaggattgtgagcaaaaaagggattacactgaatcttgtaagcaaggaaagtactcttccaactagtgtaaatgtatctgatacgttgctgtattttgtaagtgctggtattgcaagtgcatgtttaacatgtcgaaaccatgacaacacctatcaaattgaaagtctcggcatcaagacgcttgagaagttggaaaagtatacggtagatgttctgggcaatgttcatagggtagagaaagagcctcgcatgtctttctcgcagaaaggagactgaacatggcgttccggaatgtggtgatcgaaagcccggctcatgcaaataactgactgtgttttttccatgcgaaaacccgcccggaccattgatccgggcgggttttcggttcgtctattataccataccaagaacgaacagggaactataacacggctacccgtcttacacctaccgcatgaattataccataccaagaacgaacagggaactataactgagtgaagcaaagcgggcgctgttggatgattataccataccaagaacgaacagggaactataacccggactaccccaagcagttcgacagccgcattataccataccaagaacgaacagggaactataacccggtcgtttcaagcccgacctgaaacatcattataccataccaagaacgaacagggaactataactatgccaacggtctggcaacgggcctgacgattataccataccaagaacgaacagggaactataaccaaaccagcaacgctacctctacaacctggattataccataccaagaacgaacagggaactataacaagctcactggctggccgtcgtatgttgccgattataccataccaagaacgaacagggaactatcgttcagccctgcggccaggcggcgacgaagggttgctcgtaggggacatccttctgcgcgcaggcgccctcgcgccacatctcaaagaatcggctgtaggggaaggtgtagtagccgtcctgatagtggtcggtgacgtcgtaggggtcggccaggatcagcacgtcgtcatcggggttgtcgttgccgcactcgtccagaccgatcacgacctgccagtgtccggtccagtccacccagtccaccatgaccggaacgcccgcgtccagcttttcgatcagccaggcctccgcctcctcgaggctgtcaaagcgcggattgacatcggcgtgggcgtctacattccagccgaggtctgtatagaagtcagccagtccctcgacgctggtccctgtgaccaggtcaatgtgcaccagatcgccgatctggagctcgtcataatcgtccacgccataatagtgcaggaccatcagagcgctggccgcgccgcaggagtactccgtggtctgctggtaggtgtcaaaatggctgaggatatgcagcgtatcgccgctttccatattgtaatagtcgttgatcacatagtagcgcgaatggggatggtccagctcaccgccgtaggagtccgcgccgtcctcgtccattgtcgtgggatagtcctccggataggggatcatgtgcttctccggctcctcggccctggcgttcaggccggtgaacagcaggggcaggatcatcatcaccacaagcatggcggccatgacgcggataaagagctttctctgttttgggttcacggcagtctctccctcaatagaacgtcgcgacggcctgctcgggcgcttcgcagtcctcatggctgatgtaggtcagcacggggcccttgcgcccgtaggccatggagaacttgaaattgatcttcgcggtgaggatcatccagccctcgtccgtcacgctgtcggccttgtcccagttgcagaccagggccgcaaactggatatcctcgacacagcaggtcatgacatggcggccgatgacgaaggtcttgggcggcagcctctttctcttgagcgccttggccttgaagcggacggtcttgccctcgtactttttgggctcctcgctcatgtcgcggtaccagagggcgtaatcgtcgtcgccgatctcaatcacgggggcgttcacgtcgaagggcagcgggtcctcgatatcgtcgtagaccacgttgccgtccggggcctcgtaggcgatgtccgcccggcgggacgcgccgcgcacgatcttgtgaaaggccatcttgtccatggccggggtgaagcggttgaaaaccacgagctcgcagctcttgagcttgtcgaagacgaggtttcgcatgttggtgttgtaggtcaggaaggtggccgcgtccgcgaacatgaactcctgatagaccatccagctctccggcatggcggaatagagcgcgtccagcatccacatgccgttatactcgatgaccacgcgctcacacctggtctccttagcgaagcggacgaggttttcctgcgtcagctcgctctgatcctcgatcacgcggatcttgacggacttgtcggcaaactggtcgggggcgtattcctcctcgccctcctcgcagaccagcagcagcgtgcgctccccgttgcagaagcgcttgtcctccagggtctcctggatgaactttgtcttgccggcctccaaaaagccggtgaagaggtagacgggcatgtcccgcccggtgttgttagccaaggttgaacagctccttcagggcagtttcgttgagcttcgagccgatcacgcagaagcgtccggtcacggccgcctggccgcggcgcaggtcgatctcgccggggacgtagtcgaagtacagccactcgctctcgccggagtccacgatgcccttcgcgcgcagaaccgcgccgaagcgggcctcgtcctcaagctgaccgaggatggcgcgcaggctctcctccgtgaacttcttcggggtctccatgccccagctctggaagatctcgtcggcgtggtgatggtgatgatggtggtgatgctcgtgttcgtcgtcatcatcgtcgtggtgatggtggcactcgcactccggatcgtcgcattcctcgccgtcgtggtgatggtgatggtggtgatgctcgtgttcgtcgtcatcgtcgtcgtggtggtggcactcgcactccggatcgtcgcactcctcgccgtcctcatggtggtgatgatggtgctcgtgctcgtcatcatcatcgtcgtggtggtgatggtggcactcgcactccgggtcgtcgcactcgtcctcatcgtggtggtgatgatggtgatgctcgtgctccatctcctccagctcgtgcctgaggccgttcttgtccatggcctcaaggatctgcgtgccgctgagctgctcccaggccgtggtgatgagaccggcctcgctgttgagggctttgaggatttccaccgcttcggcggtcttctcgggcttgacagtgccggtgcggctgaggacgatgaggtcggcgttcgcgacctggtcgttgaagaactcgccgaagttgcgcgcgtacatcttggccttgcccgcgtccacgacggtgacctttgcgccgatgtgcgcgccctccacgcgctcaaccgcggcggcgacgtcggacagcttgccgacgcccgagggctcgatgaggatgcggtcgggggcgtagtcgtccatgaccttcttgagggccttggtaaagtcgcccaccagggtgcagcagatgcagccggagttcatctccgtgatctgcacgcccgcgtcctgcagagcttgcggatgagcgtggttttccccgcgccgagaaagccggagaaaatgtctattcttgtcatggtttcaaaaacttccttccatgtatatttcactgaaatgtaattatagcacctttgtcaatgccccggccgtgcaaaagccggggcaaaacgccccggctcgcaaacatttaccgtttattcacaaaggtgcttatcccttgatggcatagcccgagagattgaagagcgactcgtccaccgctgtgtccatgacgtgaatggtgtagaaggtctcccccagttcgggcatcatcaccggcgcgcccgacaggatgtggacgagctttccatccccgtcaaagtagtaagccgtctcgggtgtgtagtcctgggccgggaagacctccacgctgtaggatacgccgtcgacctcccgcgtctcctcggtgcagtccgtccgcatggccgactgatagagggtcttgtaacagtcatccagcaggagcacgttgtcctgcagcaggctcagcgagatggagagtacagcgctgccccgcttctcgtccgggtaaagattatagcaggttccgtccacaaaggcggtggccgagcgctgctcgtacccgctcacttttgttgtgcgcagggagaagagcttgtcccctttggcgtgtacgtcgaagattgaggttgaatccatgtaatcggaatgatattcatagctgaggtgggcgcccttctccgtgtcgatgctgcggaaaacctgccagagcttcgtatccggcgcgtgaacactgatcttgaggcccgtcgtgtccacgccctcgcgggcaaagtagagatagaagcccgcgctcatctccatctcgatgacatccttgtctattctggcctccagcggatatccctcgtcattatagagcaagaggacgtcgtccttcacttcccatttggcgacaggctcgtccgtgccggacatagaaaacacgccggtgccgtcctgattcaggctcagctttccttcaaggcccatgctctcgggcggcttctgttcgcccatgatctcaagcgtgaagagcctgtaatccccctgcggagctgcagcgccgagcatgcacagtgaaatcagcagaactgctgccgccacgattgcggtgatgtgtctcatattttctcctttccgccgcttgcgcggcctgtacgcacgccgtcaacctcttttcctttcaaaacgagtctgctccatcagctctgtgcgccgcgcctttctcctgaatcgcaggccggagatgacaagcataatcccgacaagcagaaagctgatgaaaacatcgaccgggacggtaaggctgtattcactcacccggaagacctccttgacctcgatcttgtcgccgatctgcggcatctgggattcgctgctccgtttgacgcggaccttcgctgcctccttctgattgccctcattgtccgtataactcacggtaacggattcgttgtagcgtcgttttgagccggaccccgtgagttggcgagtggtataggtgtcggtgatctctgtgatgtcggccgtgtaatgtgggatgcgtatgctgaccagcatggtcagcagtcccgccgccataaacagcagccccagccacatggcgaccatagcgcccttcttccggtcgggcatgaatatgcacctccgaagcatgtatttttacatatgatccctttatgtcaaaagaatatcacatttttggtcggttgtaaaggataacttctctcgtgcgacagagtataaatgagattgccgcaccggtgacctgcgtcatcggtgcggcaatttgttgttttgttatcgcaaaaatccattgatgatctgctcctcggcttcggcttccgtgaggccgagggtcatgagcttgatgatctgatcgcccgcgatcttgccaatggcggcctcgtggacgagggcggagtcgatattgttggcctcgagctcggggatggcgaggaccttggcgtcatccatgatgatcgcgtcgcattcggtatggccggtggagagggcgttgcccacgatgcgggagcgatagatctgatagcttctctccttggcgacggagcgggagaccacatcggcgctggaattttcgccgttgagttcgacggtgtactcgctctcggcgcgctgctcgccatgggtgagaaggcgctcatgcacgacgaggcgggcgccggtttcgagctttgccacggtatcgcgctttgtgtcgtccacgcccttgatctgaaccatctccatctcgacgctgctgccctcgccgatatagacctcggtgcgggggttcataatgcgcttgccctgaccgtcgcccgcgccgtagtgcttttcgacgtacttgagcttgcagtttttgccgatgtggaagcagtgcacgccgtcatgggcggagtcctgatcgccgcagttgtggatgccgcagcccgcgatgatgagcacgtcgcagtcgtcgccgacgaagaagtcgttgtagacgacctccttcatcccgctctgggagaggacgacggggatatggacgctctcattcttcgtgccgggcttgatgcggatgtcgatgccgggcttgtcggtcttggatgtgatctcaatgttggcagtggagttgcggcccgcggcctcgccgttggcgcggatgttgtaagccccctccggaaccttgtgcaggtccgcgatctcggccagaagctgcttttgaatctcactgagcacggcttacgcccccttccagaatacggttgcaggtgacggggacggtgctcttcataagctctggcagcatctcgtcccggctgccctggccgctgacccgaccgtcggcaatgaggatgatggagtccgcgatctccagaatgcgctcctgatgggagatgatgaggatggaggcgtggctgcgcttctgcatattctcaaacacctggatcaggctctggaagctccagaggtcgatgcccgcctccggctcgtcaaagacggagagggtggtgccgcgggcgatgacggtggcgatctcgatgcgcttcatctcgccgccggagaggctggcgttgacctcacggttgatgtagtcacgcgcgcagaggccgaccgcggagaggtactcgcaggcgtcgctgacggagagctgcttgccagaggccaggcgcagaaggtccaccacgtggatgcccttgaagcgcacgggctgctggagggcaaagctgatgccgagcttcgcgcgctccgtgatgccgagctcggtgatgtcccggccgtccagaaggatgcggccggagcggggcttctcgatgcccatgatgaggcgggccagcgtggacttgccgccgccgttgggcccggtgatgacgacaaacttctcgtccgggacgacaaagctcacgtccttgataatctctttcgcgctgtcctggctttcgacgccaaaacagacgttcttcagttcaagcatacggttctgtacctttctggtgaagtctggtgtaacgcctggatattatagcatattttgtggaaagcacaagactttagagtttggagtgtggagagttgagagtggagttatggagtgcctgcggcacattttaaaatccgtccgcgaagcggacacctcagctccactcttcactctccactctccactcttatctcagcctttcgcggtggtgagatacagggtgtagtcgatgttgtcgccggggtagaaatagggctgggtgtagccctcgttcatgtaaatggtatagtcgccgtagcggccctcggtggggacgtattcccagtcggcgggcagctccacggtctcgcggcgcacgtgcgggccgccgtcataccagtcctcccacaccagcgtcacatggcgcagcggtctgtcccagccgtcgaggaaggggaaggcgggcggctgctcgtcataggtgaaggtgttgacgatggggtcaaaggtctcgtcgatctggtggcgcatctcgcgcagaaccagcgtcccgcggtcgaacgcgacatcctggagccagtcgccgacgaaggtgaagtgggtgcggatgagatcgtcctccacgctgtcgagcaggatgatggacgcgccctccagatattcggagatgtactcgtcgcgctcgtccaggttccccgcggccgggtcgaagccggagaccacggcacgcatcttcccgtccgcgcagcgctggtactcaaagtaacagccgcggtactggccgctgacatagttgtcgtttccgcgcaggatgcagagagtgccgtcccgctcaaagatccagagcggcatcccgtcgtcgtaggtgttgcggatcttcacggccgggtagagggagaggatgtttttcagagaattggccgcgatcagcccatcccagtcgaagtccagcgccgcatccagggcggggccgggatcgggcgaaacggcgttgcgcaggctgtaggcaaaggcgctcttcggcgcgcggtttcgcatgaagctgagctcatagcgccgctcggcggtggagttcagcgcgtagtactgccgcagcgtgacgacggccgtcggggccgcgtcggcttcgagctcccattccatggtctggcccagcagctcctccatgcgggcgatatgctccgggaagctgtagcagaccgtcccgtcagagccccgcaggacgcggatgccgtgcgccgcctccagccactcgacggacatgacctcctcatcccggttgccgagagagcgctggaagtcgcgcacctcgtcctcggtgagcatgctgaccatctgcgtgcggtagagccaggcgacataccagccggtggcgtcccagagaaaatcggggtcagacggggtgacgccgttaaaatagttcccctcgtggaaggccatggccacggcgaaagcctggccctcgatcagctccgcaaaggcgggttcttcggcggcgggctcttcctcaaactcgagcgcggcggtctcctcaagctcggcaggttcaggcgtcggttcgggagtcggttcgggcgtcggctcgggtgtaggctcgggtgtaggctcaggtgtcggctcaggcgttggttctggcgtcggctcgggtgtaggctccggtgtgggtgcggcggtcacggccggcgtcggggtcggcgcggctgtcggggcgctgcaggacgtgagcagaccgagcagcagcgtcaccagaagcaggatcgaaagcagttttttcatgggaacctcctttgtcgttcatattcagagtgttgaagtgtccggcaagttatgataaaatacagtatctttcgacgaagcaggcatgtgttttttgctttgcattcaaggaggaactatgaacagaatggtatccaaaatcgccgtgtgtctggcgctggtgatcttcgcggtgttctcctttgggcccgccgcgtccaccctgtccgacccggagcgctacacggcctataccgcatccctcgacgacaagaccgagaccgtcttaaagctgatggcggcatccactgtgacctcggcggggctgtccgcgatccccggcgacacggccacaccgattgccgagaagctggcggatttttcggagtattttctgctgattctctgcgtgctctacgcggagaaatatctgctgtgcatcatcccgctgggggtgctcaaggccctggtgccgctctcgtgcgcgctgtttgtcgcggggcgtttctggaatccccgctttatggaccgccacggtcttaagctgtttctggcaagcctcgcgctgttgtgcgtcatcccgctgagcattcagacctcggatctcatctacgccacctatcagcagtccatcgacagcgccctcagctcggccgaggagctgtccgacgagaccgccgcccttgccgaggtggaggagacaaacgtgctgtcctcgctgctgaacaaactgacggatacgaaggagagtctgacggagcaggcctccgcggttctcaaccgctttgtggagtccctcgctgtgatgatcgtgacctcctgcgtaatcccgattctggtgctgctctttttcgtctggcttgtcaggcagttcacgggcattgatttccgcgacctgcgcgactttcgcccgcgcccgcgcggggacgatcagtccgcgtcatcctgagtgctgcgaaggatcttcccgttacattcagtataacccctttatccggttttttctactgctttctgtgaattagaagggaggcgccgcatctggaagcgctcagaggactgacaaactggcgtctcaccgtgagacgggaggcggacggtataacgatcctgcgggcggtgagctgcgaccggcgcgccgtactgccggaggagcttttcggtctgccggtgacggcgctctccgaccgcgccctcgcctgcggggccgcagcggttccgggcgaggaagtcgtgatcctcggcggcgcggagtctgaggactgggacaaccggaacatcacggagctgacccttccccggacactccggcacatcggggattacgcct

SEQ ID NO: 2746 - DNA, 23264 bp, synthetic construct
  source 1..23264: mol_type = other DNA
  misc_feature 1..23264: note = Synthetic
aagttcggctcgtgcgggggatcgcagggctcgcactggaacgcgctgacgcggccgtggaactcggtgagggatacggggttgaaggttgcgatgagcttctgcatattctgagtttcctcagtggtctggaaggagttatcgcggttgaggtcatagccgttggatgcctcacgggtgatgtaggagcgtccctcgacattttcctcgggaacgaggatgaagaacacatcgtcgagcagctcgtttatagtggtggtaacggtctcctgagtgtagtacttgtcgagatctacaacgccggaggacctgttgcctgccttgagccagccaatgtaggtcgccttatcggctacgagctcgggaatagccatgctctgagcttccttctcggactcgaactgggtcttgccttcctcggtgaagccggtgaggttattgtagctgagctttccgtcgccgtttgcggcgtttacgagcatccacgcgaagtccatgatgccgtcagtcgcggcgacctcgtttgcgtgtatgttcgagtacattacaggaacctttatatcgtcatatttacccgcctcgatgtctgcgagggtctgggtaggctgcgtttccgccttctcagtgaactcgagccacttctgaacggaagcgctgtcctttgcaatgataaggtagggcatatcaagcgcgtcatatatctcgcccgaggacttgcccatggaatacttctgaacgaaaatgccgctgtcggctgccgcagctaccatatcgtcgagctcggtgtatatctcgtccatggtgtggaagctgtcatagggaactatcttcaccgcgacggagccgagcacattgccgcttgcatccttcgcaacgaggttgaagtagccgcacacatcgaggtaagagccgccttcgccgtgaggggcgctgttgtcggcatccgactgaccggtgtgccagttgtagctgtagaagtaaccgttggtgctgaactcggcaacgaggctcttctgaccgttttcgtcgctcacgctggtattgactttgttaaacagctgagtcttattatcggcgcagagccatgtgtcaaccgcgccgccctcagtctggttggggaagagctctttgctgacataagtcttggagctgtccttttcaagcgaccatgtgaccgacgcagggtcaacatcgccgcttaccggtattgtcgctttgtagtcacgcccttcagcgagggagatgacatccttgcctccggagagattttcaaagcttgcgcttgccgggtctgccgacgccgttaccggcaccagcgaaacgatcatcataatgacaagcagcatggaaactaatttagtaaaattggtgtttgtcttcgccttttgcatttttcctaccttgtcgcctttctgttttattcattgacagtggctattatacatttttattcacaaatatgcaatagtttttgaataaaattcatgttgtaaatctgtacaaacattggcttcgtatattgccgcaattgtataaatgcaacaaccaagcgcatatatgcacgaaaggcctgcaaaattcagcattttgcaggtctttattcatatctattcgattatagcagctatatgtcgcgtgaatgattatccaaagaatgatccagcggatattacgccgaaggttgcgagcatcacaataagcccagcaacggcaacgcccatggcgatagccggaagcgcgcttttaaggcgcatatcaagaagcgaggcaacaagcgcgcccgtccatgcgccggtacccggcagcggtatggcaacgaggatgaacaatccccaaaagctgtacttatgcaccgtttccgctttttcggcgcccttgcgctcgagaaacgaggtgaatttatcgaggatatggtgctttttcatccactgtattatgtgacgggtcagcagaatgagaaacggcacgggcagcatattgcccacaaagcccgctccgaacgacagccacgggtcgagtcctgccgcaatgccgacgggtatcgctccgcgtatttcaaggattgggagcattcctataacgagggtcttgagtatgtcgtaaagcattaatgtctccgttgtcagtagttctgcatggcctcgcggcaatagtggttaaatcggcgctcccgctcaagggtagagctgtccatgtgccctgggtatacctcatagtcgccggaaagcgcgcagagctttttgagcgacgccatttcggcgttcatatcgccgccgggcagatccgttctgccgcagcttccgcgaaacagcgtatcgccggtgaacagagcgttttcgcagataaggctcacgccgccgggggtgtgccccggagttgcaagcaccctgaaggtcagtcccgcctcggtgataacatcgccgtcgtcatatgtctttccgccctcgggcagcttgaagagcattccgctcatgccgaccctgtagccctcgtcgcgctcgtttatataaacggtgcagccggtctcggcggcgatctcgcccaccgcgccgacatgatcaaagtgaccgtgggtgagcattatcgctctgcatttgagcttattgctctcgatgtaatccattatggtgttgctctcgtcgccggggtctatgacaacgcactcgagcgtttcctcgtttataacgacatagcagtttgtctcaagctgtccgacgggtatggttttaatgttcatgctcacagctcccttgtatcaagaattatggtcacgggtccgtcgtttacggactcgaccttcattttcgcgccgaactcgccggtaccgacctcgaagccgcggctgcggcattcggctatgaccttttcgtaaagcgggatcgccgtttctggtcgggctgccttggaaaacccggggcggcgcgacttgcagtcggcaaacagcgtaaactggctgattatcagcagctgcgcgcccgcgtccatggggttgacattcattttatcgtcggcgtcctcaaatatgcgcagaccgcatatcttgtccgctatctttagcgcttccttctcgccgtcgtcggcgtgcactccgagcagcacgagaaagcccttgcctatgctgctttttaccttaccgtctatggcaacggacgcgctgtccactcgtgtcagtacggctctcatttcttacctccgtttctgtttacctcgacaactccgggcagagaattgagcttgttcattacagccttcagctcgtcaagtccccttgtctccagagttatattcactattgatttatcgcccgtatcgcgcgcgtttatggtgcgcacctttgtgttgagggtgttgaatatcgacgcaatgtccattataagtccgctgcgctcgcgcgagacaacggttatagccgttgagtagctctcctttatctcgtccgcccagcttacatttatccagcgcccgatgtcctcgggcttgaattcgcgccgcgcatagtttgcacagtcggtacggtggattgaaacgccctgcccgcgggttatatagccgacgatatcgtcgcccggtatgggcgtgcagcagcgggagaatttgataaggcagttatccagcccctctacaagaacgccgtgcacgggcttgacccgcttctgagccatctgctcgcgcctttcggctgcctcggtgaccttttcgagaacggtcttcttgccggaaacatggtgcagacgggcaagctcgtccttcatgcggttcacggctctcgttgcagccatgccgccgtagcctatggcggcgtacatatcgtcaaggctagtgtacgagacctttttcagaagctgcggcagaatctcctcgtcgcttatatcctcaagccgcagccccttgtttttcagctccgactcgaacatggcacggccgcgctcgatgttctcctcgcggcgctccttcttgaaccattgctttatctttgtgcgcgcggagccgctttttgcgatattgagccaatcgcggctcggtccggcggcgtttttcgaggttctgacctcaactatgtcgccgttttgcagcacatagtcgaagttcactatcctgccgtttacagaggcgccgatcatgctgttgccgatggcggagtggatgctgtacgcaaagtcgatgggcgtagcacccgccggaaggtttatgacatcgcccttcggcgagaacacgaacacctcgtcggcaaacatatctatcttgagattgtggaaaaagtctgttgcgtccgactcctgctgactctcaagcagtcgccttacccacgcaaatttctcctcatcgcccgtttttataacggtatcggcattgtcgcctatcttatacttccagtgcgccgcaatgccgtactctgcggtgcggtgcatttcccatgtgcggatctgcacctcgaacggtatgccctcggagccgatgaccgttgtgtgaacgctctggtacatattcggcttgggcgtggatatatagtccttaaatctgccgggaacgggcttgaacatatcgtgaatgatgcccagcacattgtagcagtctggtatggtatctacgataacgcggaaagcgcacaggtcaaatataccattgatatcgagcttctgcgcgtacatttttctgtatatactgtaaatgtgctttatacggctcgttacggtgacatccagcccctcttcctcaaggcgctgcttcatctttgtctcaacgctcgacatgaagcttttgagggtgtccatgcgctcgttcaatgtgtcggttatctccttgtatcccgccggatcaaggtacataagtgcaaggtcctccagctcccacttcgctctctgcataccgagacggtgggcgatgggagcgtatatctccatcgtttcgagcgatttctgccgctgcttttcctcggtctgatacgccatggtgcgcatattgtgcagccggtcggctatctttatgaggataacgcgtatatccttcgccattgccatgagcattttgcggaggttttccatctgctcgtcttccttgctcgtgtactgcacgcgcgtgagcttggtaacgccctcgacgatgttcgcaacggactctccgaactggcgggcaatgtcgccgtgcgtgagctgggtatcctctatgacatcgtgcagcagagctgcaactatagagtcctcgtcaagccccatgtcaacggcaatatccgccgacgcgacgcagtgcgtgacatacggtgagccgtcctttctgagctgaccggaatgggcgagctttgccatgtggtaagccgcctctattctgcccatatccatttccatgccgctgtcatctatcttcttgcgcagcgcatcgaacatttcatccggatcaagtattttcttttcaatgtctgccattacgaccgtctcgctttcaagcgttttataagctccgagctttcaagattgaccttcgcgcagcccgtgactatccttgctccgaaaacggagccgggggctgccatacgcagaagccccaactcgcacagcactctcaggcagatgcagaaccgctcgggctccaccccgtgcgggcattgccgtatgaccccgtcgaggtcagctgccaccgtgccgccgagagactggagcctgcgccatgattttatgaacgcacctctgtcggggcaatagcacgacgcctcggctaccggcatatcggtcaatatcttttcgcacagcggtctcgggtcatgcgcctttaccgccgttacctgaagctgcacgctgcggcgcagcctgaactcgtttatctgcggagtaaaggctatgtctatcctgtcgcccgcgcgcagccccagctcagcctcgctgtgcgagaaaaacacgcactcgaagcttgcgcccctgaagctgatgctcaggcgcaggtgctttcccccgccgatcggcgttacccgctcaagccttgctccgcttatgcaaagcatgggcttggggtttccgctcccatagggctcaagcctgcccagggcggcaacaccctccatatcaagtatgtccggatcggtcacctcaatatcacagttgagcgtcggaagctcgctgggcttattcttttcataatattcgttaaaggcattgcagaactgcctgagcttgtccctctttatattgagtcccgccgcgagcgcgtgaccgccgaagccctcgagatactccgagcacgccgaaagcgcgtcaaagaggttgaacccgccatagctgcggcatgagccctttcccttttcgccgtcgagacatatcataacggtcggcttggagtactgctcggcaagctttgacgccgctatgccgataacgccctgatgccatttttcgctggcaagcactatcggggtagatggcattttgccgtccatcatgccggaggcatcgtcccatatctccgtttcaaggtgctggcggcggcggtttagctcgcacagcttatccgcaagggtgttcgcctcgtccgcgtcgccggtcatgagcagtctgcccgcgacggacacctctccgagtctgccggcggcgttcaggcgcggtgcaagcgtaaagcctatcgtggacgacgacattttccgctccgacgcacctgattcgcgcagcagtgcctcaagtcccgggcgggaggtatgctcaagcatggcaagtccgcgccgcacgatgtatctgttctcgcccgtgagcggcacgacatccgccaccgttccgatggcggcaaggtcggcataccgcgcaaccacgcgctcactctcgttctcaacggcgcacacgagcttgagcgcaacgcccacaccggcaagttccttgttcggatacctgcactcatcctgcttggggtcgatgaccgcgatggcatcgggtatcgtctgctccctgcactcgtggtggtcggttatgatgaggtcaacaccgatcttacgcgcaaactctgcctcggcagccgcagttatgccgcagtcaacgcttatgataaggctgacgcccttggcgtgcaggctctcgatggccgcgtcgtttatgccgtagccctcgtctattctgtcggggatgtacggatagcatctgagtccgcggctgcgcagccagtcggtcagcaggcaggtcgaggttatgccatcgacatcatagtcgccgtacaccgcaacggtctcccccgccgagatcgcgcgccttatgcgcggcaccgccttgtccatgtcctttaaaagcatggggtctgcaagcagctccgcgccgccatcaagaaagcttttcgcctcgtcaaggctcgctatcccacgaacgctgagcatttttgcaagcagcggcgcatatccggcaccgaggaaaagcctttcagcttccggcgccttctcttcaattttccatttactgtaatccattaacaaacactacttcaatatatttttatagttgaatataataacacacttttttgtttatgtaaatgaaaaagccagcctttcggctggctttggggatttatatcagcccctgaacaaggatgattattataaggcttgtatacctctcttttttaggctcttttcacatgaaagggtatgataacaaatttctttcatttacgcaagagctcagaagctttttctaaaacattgacattcctatcccccgatgctaaaattagaaagctaacgcacctgccggtgtggtggaatggtagacacggcggacttaaaatcctctgatgcttgcgtcgtgccggttcgagtccggccaccggcaccatcgtcgtcgcaagctttgtatcgcttgcgacgattttttataaacgacatatttcgctcatgccaccggcaccgccgcaattttagcagaattgcggcggcatttttctatgcgataaaactgtgtatacccttaccaagcgtcggtctctaattccattcaaaaaatattatagcctgcttcaggacttttttaagactatggaggaaatattctctcctgccgcggagaaatacgagcgggcgagaaaaagcgccttgaccgaggatattatccgcgccataaatgtggaggagggtatctattttcgtctgctcaccgagcactacgacgaatgcaccctctttttcagccgcagcgacggaagctccgccgagacgatgctcaaggagcttatggaccgcaaagcaagacagaccattgattttttctccgaggtctacggcaaagcgccaaacgaggactctatccggctgctgatggggtcgcagttctggtatttcaggcagcttctcaacgagcacctcgatgaggacagaatgttcgcctgcctgagatcgatcctcgatttcttcaatgccggctggcggcaattgtgcgacgcacttaaataagaagcctaaagtttttcgggcggtactcccgcccgtttcttggcgcagccagttaggcgctgctaactggtaagaaagagacagtcatgatagattttgaatttaaatattcggaagaaagctttccggtgcttcggcagacctcgggaagcattccgagcgggcgctgcgtagtgctctgcggcaaggacacggacgggctcggcatcggtgaggtcggcgagcttgcggcataatgcacatcggaggaacataaatgaataagacttctgagtcaaagcgttccgccgtcctcggcggttttgaggcggtctttgagtgcctcgtaatccgcaaagggtttctttgccgcttcaatgtcgcgtccattttcggcgagtatggcatctatagtctcttttgtcagcgcctgttctccgattttgaaattctgcaaaaattctgttttcatggttctcctttacggcgtaggcgttttaggaggtcgccagctcccgccgccgcgcattattaggtcggcgcgtagaccaaatggatatgaaaaaagcaacctcgcgtttccgcttagctgcttcaatcaattaagttgttatggggcttacctttcttcaatgatttcgatgtcagataagcaaaagccaatcaagccatcagatgtccgcaccgcgatttcctccgcgcctgtttcactatcaatcgcggatgtatacgccgttacattgccgcaccactttttgccgtctacatctactatagatacatctcggccgaagtaatcatataggtttgtcattttgttttctcccttgctgttggtacaacatgcgtaccagatttactataatgtatataagcgcggtttgttggtgtctcttcttgggtttgcggatcaatacttatgcctatttctctgtctactgtaatgatctccctattcataaatttacctttacttgatcttacaatttcccctgttccggcataccggctcacaatatcctgcaattctgcgttacttaccgtgatgtagcttcgtcctaaaacatacccttcactgtttttaatgtgccgtgcttgcttttcagggttaactatcagcttttcagattcagatcgtatctgcttgcgtattggcaaatcgcgcatataagccttgatattctgattttcgcttcctgcattatacatcgaatttgcagcatttgcaattcttttatagttcgcacttgccgtgcttgcctgcggtcaaagcccgcgacttcggcgcgctctgtctgcgttcgaagtccggcggctttggaaaaaccattatactcctgccggagcatttgcagtttggtttggtcggtttcgagcttttccgcatcaccggtcagagtttaaagtaaaaaaattcttgcaatttgtcaattcctgttgtaatatggatacagttcttataccataccaagaactatttaggttactatgataaggtagtacaccgaagagctctaacgcctcgcttttgcggggcgttatctctttcttgccaaaacttgaaatatagtgtaaaatggtggcataacctgtaaaggaggcttttctatgcatccatacgcgataggactcgacatcggtataacctccgtcggctgggcagcacttgctctcgacggctccgaaaacccctgcggcattctcggaatgggctcaagaatttttgatgccgccgagcagccgaagaccggagagtcgcttgccgcaccccgaagggacgcacgcggctcaagacggcgcttgcgccgtcatcgccacagaaacgaacgcattaaaagtcttatgctcgccgaggagctggtatcccccgacgagttgtcatccctgttttgcggtcagctcgaggacatttatgctctgcgtgttaaagctctcgactgcgccgtcagccgcactgagtttgcgagaatattactgcacatatctcagcggcgcggttttaaatcaaatcgcaaaaatccatcgacgaaggaagatggagagctgctcaaagctgtcagcgaaaacaagcagcgcatggaagctaacggataccgcacggtcggcgagatgcttctgcgcgacgagatgttcaaagatcacaagcgcaacaagggcggcaactacataacgacagttacacgagatatggtcgccgacgaggtcaaggctatattcgccgcgcagcgcagcttcggctccgtatttgctggcgaaaagcttgaaagcagctatcttggaattctgcttagtcagcgctctttcgacgaaggtccgggcggaaacagtccttatggcggcagccagatagagcgaatggtcggacgctgcactttcttccccgatgagccccgcgccgcaaaagcgacatactcattcgagcgcttttcgctccttgagaaggtcaaccacattcgcataatcacaaacggcaaagccgaaaagctgacagcgcagcagcgcaatctgataatcgaccttgcgcacagctcaaaggatgtctcctacgccaagatcagaaaaaccttggaactttccgacgggcagcttttcaacattcgctattcaggcgatgcctcgcccgaagaaacggagaagaaagaaaagctcggctcactgaaggcctaccatcagatgcgcagtgccttcaacaaagtgtcaaacggatatttttccatgctgccgcgcgagcagctcaacgccatcggcactgcgctgtctctctataaaacctcggaaaagataaccgcctatcttgaagatgccggcctccgcaaggacgatatttctattgcggattccattggcaatttctccggattcggtcatatatccgtaaaggcctgcgatatgatcatcccgttccttgagcagggcatgaactacaatgaagcctgcgccgctgccggaatagactttaaggcgcacggggtcggcgaaaagtcgcacttcctccatcccacggaggacgattatgcggacataacgagcccagttgtacgcagagcaatatctcaaaccataaaggtcctgaatgcaattatccgcaaagagggctgcagccccacattcataaacatcgagcttgcgcgtgaaatggcaaaagacttctctgagcgcaacaagctcaaaaaggaaaacgacgaaaaccgcaggcagaacgagaagcgcctcgatcgcataaaaaacgaatacggtaagaacaatcccaccggtcttgaccttgtaaagctccgtttgtatgaggagcagagcggcgtttgtatgtattccctcaagcaaatgtcggtcgagaagctgttttctccgaattatgccgaggtcgatcacatcatcccctacagcatcagctttgacgacagccttaagaataaagtgcttgtactcacggaggaaaaccgaaacaagggcaatcggctcccgctccagtacctcaccggtcagcgcagagaagactttatcgtgtgggtaaacaacaatgtcaaaaactacaaaaagcgcaggatcctgctgaaggaaacgctcaccgaggaagatgaagccggatttaaagaaagaaatcttcaggacacgaagaccatgtcgaggttcctgctgaactacattgccgacaacctcgaatttgccgaatctgtccgcggccgcaagaagaaagtcactgcggtaaacggagccgttacctcatatatgagaaaaagatggggcataacgaaaatccgcgagaacggagaccttcaccacgcagtggacgcagtcgttatcgcctgcacgaccgatggcatgatacagcaggtctctcgatacgcgaaataccgcgaatgccggtatatgcacacggattcgtgcagcatagcagttgatcccgataccggcgaggtgcttcaccagttcccgtacccctggcaggatttcaggaaggaactcgaagcccgactcggcagagatccggcgagaataataaacgatctgcgcctgccgttttatatgtcaagcggggcgcccctgcccgaaccgctttttgtttcaagaatgcccaagcgcaaggtgaccggagcagcgcataaggacaccgtgaaaagcgcaaagcttctcgacaacgggtatttggtggtaaaacgacctatcaccgatctaaagctcaaaaacggcgagatcgagaattactatgaaccgcagagcgacaggctgctgtacgaggcgttgaaaaccgcgcttatcgagcatgacggagacgcgaaaaaggcatttgccaatggcttccgcaagcctaagagcgacggtacagccggtccgatagtaaaaaaggtcaagctatatgagccgaccaccctgaatgtttccgtacacggcggcaaaggcgcggcggataacgattccatggtgagagtcgatgttttcctctccggcggaaaatactatctcgttccgatatatgtcgccgatacgctcaagcccacgctgccgagcaaagctattaccgcttcgaaaccatattccgaatggcacgaaatgtccgacgaagacttcattttctccttgtaccctaacgaccttatttgcgcgaccagcaaaaagggtctcaagctgagccttgttaacaaagacagcactcttccgccgtctgtcgagggaaagtcgttcatgctgtactacataagaactaacatctctaatggtggaattaaggcaataacccacgataattcgtatgagatcggaggcctcggcatcaaaacacttgaaaagcttgaaaagtacacggtagatgtgctcggggaatatcacaaagttggaaaggaagtaagacagccgttcaacataaaaagggggtaatcatgccttttcgcaatatagtcatagagagcactgctcatatatctcttaaaaacaggcagctcatagtaaaaaccgacagcgagcacagcttggctgtcgaggatatttctgcgcttctcattgaaagcagagcttcaacgataaccacagccgctttgtcctatcttgggcagagcggctgtgccgtttttatgtgcgacgagaagcatatgccctgcgccgtgctcgagccgttttcacagcacagcagagccctttcggttttgaaagcgcagctcgatgcgagtgagcccctgaagaagcgtctttggcaaagcatcgttgtcgcaaaaatagtcaatcaggcgatttgtctggagctgtgcgggaacagcggcgatgccgaatgtctgcgccgcatggcagagaatgtaaagtctggcgatccggataatgtcgaggcttcggcggctcagcgctacttccccgcgctgttttctccggagttttcgagaggcagcgaatgcgtcaccaatgcggctttgaattacggctacgcgatcatccgcggcagcgttgcacggcacctcgcagtatatggttttgttcccgcgctcggtctgcaccacaaaagcgcactcaacagctttaacctcgccgacgacattatggaaccgtttcgccccgctgttgacctgctggtctgctcactgatagctcccgacgataccgaactcacaccgaagctaaagcgttcgctcttcaacgcactgaacctcgatatagtctccggagcaagtcatcacagcgtttcttacgcaattgagcggctcgtccatagtctgtcccgctccatggctgacggcaaggctgcactttgcctgcccgagctgacagcgctgaagcagcacaagtatgaataagtttatgaggatcatggtatttttcgatctccccgtcaagacgaaaaaagagcggcgcgaagccactcaattcagaaattttcttctcaatgacgggtatcatatgatccagtactctgtctatgcccgcgtttgcaacggcttggacgccgtggcaaagcacagagcgaggataaagcgaaatctgccgtgcaacggctctatcagaatgcttgtaataacagaaaagcagtttgaagccatagatattctgctcggaaaattaaccgaagcggacgacagttttcagtgcgaacaattatcgattttttagtaaaaaacaccgccttatccattgataaagcggtgtttctttgatagcctattataccataccaagaactatcagggaactataacgaaaacagtacgcactttgcggatgtgcttattataccataccaagaactatcagggaactataactaacaagcgagggtgcaacctttgggagcaattataccataccaagaactatcagggaactataacctctgggcgatgattacttagtggtatatgattataccataccaagaactatcagggaactataacagtacggcgatcatacttttagacctcattattataccataccaagaactatcagggaactataactctaaaaaagttatgcctgcgcgttcgtttattataccataccaagaactatcagggaactataactgttgatcgtgttcttcaggtcaatagcagattataccataccaagaactatcagggaactataacgcgcagcctaataatgatgctgctcttcgcattataccataccaagaactatcagggaactataaccgggagttttccatcaggtaaatcgtcgcgattataccataccaagaactatcagggaactataacaccggcgtcaaccagatcggtaagcagattattataccataccaagaactatcagggaactataacattctaaaacgaataaaaaagtaccgaaaaaatccctccatcaggtgatggagggagtgatttttatatgagcttatatctgcttgagctggcagtatctctggaggatggctgccatctcggcgcgggtcgcggtcctatcgggaccgaagctgccgtcgggatagccggagactattccgctgaggtatgcccaaaggacggcgtcgcgtgcccacgatgctatcgaggaggcgtcggtgaagttgagcgcaccgcttgccgcggggcttgccttctcatagcggaagagcatagttaccagctgcgcacgggttatattcgcatcgggcgcaaactccgttgtgctcacgccgtccgtgacgcccttattgtacgcccaaacgaccgcgtcatacgcccaatggcggctgcttatatccgtaaacggtacacgcataccctcgaccgacggttcaccggctatgcggtagagcacgagcgcgaacattgcgcgggtcatggtcgcatcgggcgcaaacttgtctgcggaaactccgaccatgagctcatgctgccagacatactctacattgccgcggtaccatgccgtttcaggaacatccacaaacgggaacggcacgaactcgccgcactcgctgcacttgatgccgacgaaattatgtccctttgcctttacgggctcggacttgctgagcacttcattgcaggtgctgcaatggctgccctcggtgcgtccgtccttggtgcaggtgggctcaacggcttcgatgtcaacgaccttggtgtggccgcttgcggggatgacctctgccgcgacgagctcggtcttgcatacgctgcatatcgtctgtgcggtgctgccgtcggtcgtgcaggtaggtgcgacggcgggcgtaccctcaacgggggtgtgcgccttcatgggcactaccttctggtgctcgacaacttccctgcacacggagcaggtgagctcggcagtcagaccggtggcggtgcaggttgcctcgacagcagccttggtctcaacgggagtgtgaccctttgcggggataactacatcgtttgcgttggtctgggtattgcagtccttatcgaggaagagctttccgcaggtggggcactcgtagtaagcgacattgcccgcctcggtgcaggtggcgtctatgccgcgcacgaacttgaggctgttgtgggtgcaatcgctgaacggagttaccgtaagggtggccttatcggtgacatagaacaccttgtcgcttatgctgtagataacgcagacaaagcttctgccgtcatcgcgcatggtggtgtttgcgatgttcagggtctcgccgttgccgagcgagctgccgagcagacgggttatgagggtgagaacatcaagcttttcaaagttatcgctgttgagatccttgagcgtatccggctcgagccacatatacttatacgaaacgccctggagctgctcgagaaggctgagctttaccttgacgctgaaggtagccgtttcggtctcggtcacggtgacattattcggtcccgttacatcgagatcattgccgaacaggccggaaatgaccttgagcagagtgtacggatcgatgtttttgagtatatcgccgacatctacgccgccgtcgatgagaccctttatgatctcaacaagcttgtcaacatcgaccttgtcaaggatggcgcttatggtctcgttatcgtcgccgaggccctttattatctcgattatcttatcgacatcaagtccggcaacgacatcgcttatgtcaatgtcgcccgctacgagcgcctttataaccgcgatgagttgatcggtgtcgagctttccgagtatttcggctatagcctcgttatcgccgacgagacccttgatgacctcgactatcttatcggtatcgagacccgcgactatgtcgcttatgtccacatcaccggcaatgagtccctttataacggctacgagccggtcggtgtcgagctttccgagtatctcggctatggccttgttatctccgacgagacccttgatgacctcgactatcttatcggtatcgagacccgcgatgacatcgcttatatccgcatcgccggaaacgagagcctttatgaccgccgcgagcttctcggcatcgagcttatcgagcactgcatttatcgcgtcgttatctcccgcgaggttctttatgagctcggctatctgctcggcatccatgccgtcaacgatctggccgatgtctatgtttcccgcaacgaggtccttgatcaccgccgctatcgcggtgacatcgatcttgtcgaggacgggagctatatctatcttatcctttatgagctctccgaagagctttgcaagctgctcataatcgagatttttgattatctcgccgagcttgccagaggtgtctcccccgtttataaggtccttcacggtgtcgataacaccctgaaggtcggtgccggcatcccccgtgccgtcgccgtcggcaatggcatagaccggcagcatcgtaaacacgagcaccagcaccattaccatactgatgatgcgtcttttcatatagttcctccttaatccactcaggcgtcgcccaaaagtgacaatacatcaacagtgattatacagaaatattacaatcagtgcaacaatatttatacaaaaagcttaaaaacggcaaattgaccagttgcagagtaaaacttttgtgcagtatttggaatagctgactcactgccgtgccgcactttgtcgaaactcctgcggcacatcgtaaagcgactcgtgctcgcttatggcaaccgcgcgcaggtcaaagctgccgccggtgagacaccactcatatgttgctccgaccgctatgcggatgccgagcgtgacaatatcctcggcgcggtttttgttgcggataagcccctggcgctggcagttcgtgatgagctttgcaaaccactcgttaaaagagttaaaaagcttaaaaagtcccacgggcttttgcagctcaagcgataaaagcgttccggtgagctcgggaccgaactccatggcaagcgacaggtacctgtcatacagcgcccagatgcgctcgagatcatttttcgcatttataaactccgcgaacaccgcctgctgatcgtccttgagattgcgtatgagatgcgttattatcttctctttgccggcaaagaggctgtaaaacgctgatatttcaacggcttcttgactcggacatgtgtgttaatttattatcgtttcagatacatttcagggaggatacacgccatgagctatgaaatgctgctctcgccgatgaagatcggcacaatgacagtcaaaaaccgcaccgtaatgaccgctgccgagttcagcctcggtcagacagacggaacgcccacggagaaactgatggactactacgaagagcgtatccccctgcccgctttttgccgtcggcaaggcgctcatgaccgtattcccctttgttaggacgatatactggaagctcgagcttggcaaattaaagaggtttttaaagaaaataggcaaataatgcttgaaattacctccacatatggtatgatgtgagtataacaaggctgtgagcttgaaagtaccggatccgatcatgtaaaggagctgatattatgagtaaaagtctcaagcgcccatggtgggcgtacgctatcctgttttgcctgtgcggtctcagcatagccgcaagagccatcgacgaaggagggactctccttccggtgaactcgctttacggagggtggtatcttatcgtcttgccgatccttgccgcggcggttgtgttcgccgcgagccgcagatgcgggaaattcgacatcgtatcactgcttgtttttgaagttctgctcgttctctggttctttattccggacgcgatccgactcggcggattttacgctccggcggaaatgccgctcggactcgggatccttgtgatctctctgccggcagtcggagcactcgtcctcagcggcatagcctatgccgtaagcaagaaatagcaacaaataaacctaaagctctcggatcaatgatccgagagctttctgcatatttcttttccgtagaggacggggtgttccctgccctttagggtgtcgtcaaagagctgctgcggcaggtcgagcacgccgtttttaaacagcagaacgatggtcgagccgccgaagcggaacattcccttttcctcgccgcggcttattaccgccgcctcgtggtagttatctatcttgccgacgagacacgcgccgacctctatctgcacgaccgtgccgaaattttctgtatacagcatacagtactcgcgcgtgttctgcttgaacaccggatgcttgcgcacggcgatcggctgcaccggatggtatttgccctgaatgtgccagttgcggctcttgaagccgttatctatgtagcaatagcgatggtaattctcaacgccgagcctgagcacgaggcacacgccgttcatatactcctcggcaatggatgctcctcctacaaggtcatcgacattgtaatagctgttttttatcgagaacaccgaatcgccgcttatgcggtaagccgaaaggctgccgtcgcacggtgagatgagcacatcgggatccatgttcacgggccgcgcctcgggctttatcctgcgggtgaagaaatcattgaagcagcggtaatcggtcttttcataatcgctgaggtctatgccgtttgcgcgcacaaagtggtctatgcgccttacggaaaggcgcgtgtccatatattcgcctatcaccgccgtgagtatcgggtttgtcattacgcagcgagcgggccagccgaggtgcttgaaatagcagcagcgcagacctatcgtcattttcttagatgtcatttttcccaccgttttttatctttcttattataagtaccgcgagcatcagaacgccgcagcaaagtatggtcgcataaaagcttatcccgcggcttaaaagctcgatgctgacagggtcgcgcacgagctgaccgaagccgctgagcagaatgtaatcggcaacgccgacagctccgggcaccggcactgcattcgagccgagaacggcaaaggtctgcaccgagaacgccttgaatgcctccgcaggtgcgccgcctaccgcaaggaacacgcacaccgaaacgaggatgaccgacaggcgctgcgccatgttgcatagaaacacctttatgagcagtcccgtttcctttctgagcagaacgccgcactccttgtactgctttatcatgtccaacagctttttatactgctcgtcatagtccttgactatcctcagcttgcacaaaagccgcagtccccagcggcagacgctgaggatgagcgcatcgttaaagatgcacatgatgaatacaaatatgaatatcacctgaacgacaacgccaaacgcaatgaatatcttcggcgcaatgctcatcctcaggagtataccggggtaaacgacgcagcacactgcgcttatgagcagtatcgataccgtatacataacgaggtttaacagcagcgcaatggcagacaccgccgctggggtaccgtggcgcatcatgaatatgagcgccgcaggctgtccgccggtggctgagggggttatggctgagaagaaaatatccgtcgccgagaaaagtatcccctttccggctgagaacggatgtccgaaaaagcggcaggtgcactgaagtcccagtccctcaaaatagacaaatccgaacgcgcacagtgcagcaagcactatccacatcgggtccgccccgtcaagaaaatgctcaaagcgatgccacgaaaagccctttgagcacgatgttactaccttgacggttattgcggatattgccgccagaagcaatatccacagcagattgtttttaacactactcttcattgatcacaaatgtgcggcagcccgctccattcttatatttcccacacaacttttgattatatcacaccgcttgtaagcggtaaagcagtttgacaaaatctaaaccaatgtacggtttttcaccgttaaactgtatgatttgcattagcacagtcagtatacacatacaagtatggtttgtcaaccgctttaccttttttaatcgttgacaaaaatgagtgtgttggaatataatttttccattaaccccccgataggccgcagcgccggtctcgggcgaaaggtggatctgaaatgagtaatgttatcgaaatgttcggctcaatggtgtttaacgactgcgttatgcaggcgcgcctccccaagcaggcatacaagcaggtccaacgctcgataaagctcggcgaaaggctcgacagggaaactgccgaggtcgttgcaaatgcgatgaaggattgggctatcgaaaagggcgcaacgcattttacgcactggttccagcccatgaccggcataaccgccgaaaagcacgacagctttatctccccggcagataacggcagaattattatggaattttcaggcaaggagctcatacagggcgagccggatgcctcgagcttccccaccggcggtctgagagccacatttgaggctcgcggctacaccgcgtgggaccccacatcatatgcgtttataaaggacggcgttctctgcataccgaccgcattctgctcatacggcggcgaggcgctggacaagaaaacgcccctgctgcgctccatggaggcgctgaaccgtcaggggctgcgcgttctcaggctgttcggcaacaccgatgtcacctccgtaaagacgaccgtgggtcccgagcaggagtattttctcatagacaagagcgtttacgaaaagcgccgcgacctcatgtacaccggcagaacgcttttcggcgccatgccgcccaagggtcaggagcttgacgatcattactacggcacaataaagccccgcgtcgccgcgttcatggcggagcttgacgaggagctgtggaagctcggtgttctcgcgaaaacggagcacaacgaggtcgctcccgctcagcacgagcttgcgcccatttatacgaccacaaacatcgcagccgaccacaatcagataaccatggagctcatgcaaaagcttgcccgcaagtacgacatggtgtgtctgctgcatgaaaagccctttgccggcgttaacggctcgggcaagcacaacaactggtccatgaccaccgacacgggtttaaacctgctcgagccgggcgaaactccgtatgagaacgcccagttcctgctgatgctgtgcgcggttttgcaggcggtggacgattatcaggatatgctgcgcatctctgttgcaagcgcggcgaacgatcaccgtctcggcgctgcggaagcgcctccggcgatcatctcggtgttcctcggcgaggagcttgaggagatactcgaagcaatagaaaatgacacgccctacggcggcaaggaaaaggagcagataaaggtcggcgttcatgttctgccgaagtttgcgcgcgataccaccgaccgcaaccgcacctcgccctttgcattcaccggcaacaagtttgagttccgcatgctcggctcctctgcatccatttcgggcgcgaatgtcgttctcaacaccgccgttgccgagtcgctgcgcaaatacgccgactttcttgagacagcggataattttgaatcaagcctgcacgagcttataaaaagcgttatcaaaaaacacaagcgcattatatttaacggcaacggctacggcgatgaatggatcagagaagctgcgaaccgcggactcaaaaacttccgcacaacggtagactgcgttccgtattacctcgatataaagaatgtcgatctcttcgcgcgccaccgcgtgtattccgagatagagctcgcggcgcgttataaaatgaagctggataactactgcaaggtcatccgcatagaggcgctgaccatgcgagagatggtgtggaaggagatcctccccgccgtgagcgcttactcaaagcagctttgcgacacggcgctggcaaaggctcagctcggcgcggacgcaagctttgaagcttcgcagtgcaa

SEQ ID NO: 2747 - DNA, 23264 bp, synthetic construct
  source 1..23264: mol_type = other DNA
  misc_feature 1..23264: note = Synthetic
cagagccaaaagctcatcgcccacaaagccgaaaaacagaccgagaacgaccaaaaccgcaaagcggtggtttttggtgagaaacagggtgacgcccgcaatgccgatgcagcacacggtggcaagacccttgaggatcgtcgctttcagatgctcctccgcttccatcgctttgatgaaatagcaggcggcaacggggcaaagcacggcaaaaagaattatcagaacatactgcatagggcacctcacagagagtattttttgctgtattcttcgtaatacccgtcgaagccgtggttatgggcttcggcgagactgcttatatattcgtgggtgtcgaaggaatcggactcaagctctatcatggcgacggcaatgtttgagcagtggtcgccgacacgctcgtagttcgtgagcaggtcggtgaacacgaagccgtgtgacagggtgcagacgccctgctgaaggcgctcgatgtggtgcgacttcatctcgtcgcagaggttgtcgataagctcctcaagcggctcgacacggtaggcaagctcaaggtcattttcgacaaacgccttgaccgcaatggtgatgatctccgtaacggcggcggtcagcaccgcaagctcccgtgacgcaggctcggagaagcggatgtgcttttcgtgtatctccttggcgcactcggcgatgttgagggagtggtcgcttatacgctcgtagtcgtttatggtgtggaggtacttgctcacgttctcccgctgctcacggttaagctcttttccggtgaccgccatgaggtatgtgccgatcttgtcctcgtatcggtcgattatatcctccgtgtgcgagacgtgatcgaaaccgtcgtcggagtagtttttcagaagcgcaaatgaggcgaaaagattggattttgccttttccgccatggagtttacggtgatacggctctgctcgacggcaagggcggggtgcgcaaggaagcgctcctcaagtctgtccatatcacgcagcgcctcggcgtcgctctcgttatccttgatgaggaactttccgagcctttcaagctgcggaatgaagggcgcaagcagaatgacgattataaagcggaacacggtgttcaaaagcgcaaggctcaccgagctcatggtcatggacatgaaggaaaagtcaaagatcgcatttgcggtgtagaaaattatgctgaacagcacaacgccgaggaggtcgacgagcagatacgaaagagcggtgcgcttgccgttgctgcttgcaccgagggcggagagcaggacggggaccgatgcaccgatggcgatgcccatgatgatgggcagtgcggtgtcaaatcggacggcgcccgttatggagagcgcctgaaggataccgaccgctgcggaggcgctctgtatcacgctggtgaacactataccgagaaggattccgaggaggggatttgaaaatgcggtgagcatatcaataaagacctggcttgagcgaagccccgatacggcgccgctcatggcgtttatgccgaacatcagaaccgcaaagccgagcataatgttgccgacgtgctttttggtgctgctgccggagaacatacgcagcatggtgccgatgacggcgatgatggcggtgagcgtatcggtcgagataagctccagccagccggtggcgtctccgccgccgacgtcggaaaggcagatgatccagcccgtgatgctggtaccgattatggcgcccatgacgacgccgatcgcctgtctgaccttcatcatgccggagtttacaaagccgaccaccatgaccgaggtcgcagacgaggactggataacggcggtgacgccggtaccgagaagtatgcctttcaagggagtgcttgaaaggcggtacaaaataagctcaagcttattgcccgcaacgagctttaacccgtctcccataagcgccataccgaacaggaacagcgcaacgccgctcagcagctcaaaaacgttagaaatccccaatgcttttccctctgttgttgtataagttgagcagaacccataaatgctcaacataaatgtatattaaaacacgcacaaaatcaagaagcagttttcgtttctcccatacagacagtttgccgagttcgaatttgtcggtttttgtttactgtgccgcaattttgtgttagaatataaacactattcacaggaggacggctggatgtgtattaaggataaagagaagctcgacaagtggatcgcaagcgtcgttgcggcgacggggaaggtgctgtctttccttgaaaacgcctcgatgaagcttgaccctctcgtcaaggtgccgtttgtgggagacagcatcgcacaggcgcaggacatagtttatatgctgaacgattattacaggggaaattacaagcgtgtgccgtttacggcgattatcggggcggcgcttatcgttgcctatcttgcaagcccctatgacctcatacccgacaacgtgcctatcctcggctttgtggacgatgcgctcatcataaatgtcgtcgtgagtctttgccttgaccgtgagcttgaggagtacaggcgttggaggagcgaaaacaatgaaatacggcagctcgcttaaagtcggtatcgccttcgggcttatgctcggactgctgacattgggaataaggctcagctccggagacacgcttgtgcagctcctgccgcaggcgctcgcaaccgccgtgttcggcggtcttgcgatggggctttacatgaggtcgcacaattcgaggatgagcgcagaggtcgccgccttcggaaagtcgcttcgtgaaaacgaaaaggtcctgcttgaggacgctgccggacactaccgctccggcgaatgcgttgcgggcagactgtggctcaccgagacggggctttacttctgctcccatgccggaaccttaaacagccacaccatgtttgtgccgacgggcgaatttaaaagcgttgtgccgacgaagatcgccgggataacgaacggctttctgctcgaaacggaaaacgcaagcgagtgctttgcgatcagcagagccgcaaaatggatagaagagatcaaaaaagtcaccgactgatgttagaaatagtattagcggcggctttttgctaaaaatacgaagggcggagcagtctgctcaaaggaggaaaaacaatgaagatacgttttaccgaaaccgtgcttcgggacgcaaaccagtcgctcattgcgacgagaatgccctacgacagctttgagccgatcctgtcggcgatggattctgcgggcttttactccgtggaatgctggggcggtgccacctttgacgtgtgcctgcgctatctcggcgaggacccgtgggagcgcctgagaaagatccgggcgaagatgccgaataccaagctgcaaatgctgcttcggggtcagaatatactcggctaccgccattatcccgacgatatagtgcgcagattcgtccgtgcctccgtcagaaacggcatcgacattatccgcattttcgatgcattaaacgaccctgtgaacatccgtgttgcacttgaggagacgttaaagtgcggagccgaggcttccgccgccatatcgtacaccacaagccccgtgcatacgctcgacaagtacgttgagcttgtgcgtgagtttaagagcatgggcgcttcgacgatatgcataaaggacatggcgggcatactctcgccgaagaatgcctatgagcttgtgtcggcgataaaggatgcggtcgatcttcccgttgcggtgcatacgcactgcacgacgggtcttgcctttatgacctgcttaaaggccgccgaagcgggagccgacatcatcgacaccgcaatatcgccgttttccggcggcacctcgcagcctgcgaccgagacgcttgactacgccctgcgtgagcttggctgggaaagcggcctgaacaccgaggtcttaaacaaaatggcgaccttctttaagggcatacgcagcgatgccctgaaggacgggacgctcaatcccatctccatggcgacggatactcagtgcctgagctatcagatacccggcggaatgctgtcaaatcttttgagccagctcaaaatgatgaataagctctcgaagtttgacgaggcgctcgaagagacgccgagggtgcgccgtgagctgggatatcctccgctcgtcacgccgacgagtcagatggtcggcacgcaggcggtgcagaacgtgcttgcgggcgagcgctacaagaacgtcggcagcgaggtaaaagcctactgccggggcgaatacggcactcctcccgctccgatcgacgaggcggtgcggagaaaaatactcggcgacgaacagccgataagcggcagatacgccgacaccctgccgacggacaccttcgagaaggcgcagaagtatctcggcgataccgcccgctgcgaggaggacgtgctgagctatatcgcattcccgcaggtggcggaggactttttcaaaaaacgcagcgagcttgaggagaaaaaggttcgctacacgataagcaagatctgaggaggtgcgccgtggtaagcttatttaaaatgcccctcggcgatgcggtgctgaccgccgttttgggctatgccgtcgtgttcttggggctgctgtttctgatgctcgtcatatccgcaatgggaaagctcatgtcgaagaaaaagcccgcaccggcagctcagcctctgccggaggaaagacaggcgaccgctcccggctctgccggagagctgaagctttacgacaccgacccgaaggatgccgccatgataatggctatcgtggcggacagtctcggaaagcctttaaatgaactgcgcttcatttccatcaaggaggttcgtgacgaatgaaatacagagttaccttaaataacagagtgtacgaggtcgaggtggaggagggcagcgccgtcctgctcaacgagtacgaggcggcctctcccgctcccgctgcggtgtcggctcccgctcccaagcaggagagcgctcccgcacccgctccgtcgggagacggcaatgcggtcaaggctcccatgccgggcaatatactgaaaatttccgtcaccgtcgggcagaaggtctccgagggcgagacgctgctcgtgcttgaggcgatgaagatggaaaacgaggtgactgccgacagaagcggcaccgtcaccggcataatcgcagcaaaggggcagacggtggagacgggcgatcctcttgtcgtgatctcttaaaggagggcgcttatggacattttggaaacccttcgcaatcttgcactcgaatcgggctttgcggcgttcttcacgacggacggcggttggaaaaacctcgttatgatactcattgcctttgtgctgctgtacctcggcatcgcaaagaaatttgagccgctgctgctgtgcggcatcgccttcggctgcctgcttacgaatctcagctacttcgtcgggcagggcgacaatgcgatgtatcacccggagctgtggacggcgtttatcgacgaggcaagcccctactatcacagctacggtcacattctcgcaaacggcggactgcttgacttcttctatatcggcgttaaggcggggatatacccctcgctcattttcctcggcatcggcgcaatgaccgacttcggaccgctgcttgcaaatcccaaaagcctgcttttgggcgcttcggcgcagctcggcgtgttcgtggcgtttttgggtgcgatccttttgaacttttacggcggcgaggcggcgtcgatcggcataatcggcggtgccgacggtcccacggcgatattcacggcgtcgaagcttgcgccgtggctcttgggacccattgcaattgcggcgtattcgtatatggcgctcatacccttcatccagcctccgcttatgaagcttatgaccaccgagaaaatgcgcagcgtcaagatggagcagaccagagaggtcagcaaaaaggagaagatcgttttcccgatcctcgttgcgaccgtcgttattctgcttctgccctcgacggcgccgctgatcggctgcctcatgctcggcaacctgttccgtgagtgcggcgttaccgacagactgtccgacacggcgcagaatgcgctcatgaacatcgtcaccatcttccttgcgacctcggtcggtgcgaccatggttgcgcagagcttcctcaattgggagacgctgaagataatcgcactcggtcttgcggcgtttgcggtgtcgaccgtcggcggacttttgggcggcagagtcatgtacaggctctccggcggaaagatcaatccgcttattggttctgcgggcgtgtccgccgtgccgatggcggcaagagtcgctcaggacgtgggcaagaagtacaacaagtcaaactacctgctcatgcacgcaatgggacccaacgtcgccggagtcatcggctcggcgatcgctgcgggcttcctgctctccgtgttcggctgaggataatagatagaatacaaaaaagacaagcgaacggtttccgttcgcttgtcttttttatatggctttgcggcgtttgggtatgaggcgtgcgcactgtcgcagactctgtacggaacctccgacgctttaatataatacaatataatcggaaagccccaaaaaagcaagacggacgggcgcttttccttgtacgtccgcatacaaggcgcaggcgctttcgcccgtattacggaggggaaatttcattgacggaggcagctatgaaaatatatctttcaccctcgcagcagtattataacaaatactcggcgggggacacgaccgaaaaggagcagtgcaaccgcattgcggagcattgcgagagggcgctcatccgctgcggctttgaggtaaagcgtgcggccgcaggcactaagaccgacgacgcaatagcggagtcaaacgcatggggagcgcagcttcacgttcccattcacacgaacgcaggcggcgggaagggctgcgtcgtgttcgtgtcgcagctttccgaggataggctcaggtacgcacaggcggtgtacgacgagctggcggagataaccgtcgccgacgagcgctacggcgttcgcacggcaaggttcgacgagatacgcaagacttcgggcaagtgcatctacgtcgaggcagagttccacgattccgttgagggggcggagtggataatcgaaaacgtcggggagatcggcgaagcgatctgccggggcatctgcaagggcgccgataccgcctacgtccccgaaaactacgagagcgaagcggaaaaggcgaagcgctgggcggtggagaccggacttatacggggctacaaggacggctcctacggctggagcgatgcgctgacccgtgagcagcttgcgatcatcgagtacagaaaagcgaaaggaaacagtgaaaacaatggataaacccgataggatcaccgaacttcgtgcgttcgtaaccgccgcttttgcagcggttacggcgcttataggctgggtgggctggctcgtcgtcatcatgctcgtgtgcatggcgctcgattatctgacggggacttgggcggcgatgtcgaaaaacgagtggagcagcaagaccgcaagagccgggctttggcacaagttgggcgagatatgcgccttgctcgttgcggcgctgtgcgacattgcgctggctcaggtgagcggcagcggcggtattagtctgccctttgagtatacggtgcttgcaacgcccgtcgtggcggtgtggtacatatttacggagcttggcagcatcaccgaaaatgcggcaaagctcggtgcgcccatacccggctggctcaaaaaaacgctgagcagtctgagggatgcggcggacgaaaacggagagaacggaggcaggaaatgacgacggtaaagataagcggggcgacggcttccgcagcggagcgggaggtctacacctccggcacggtgggggcaaccctgcgctttgagtttgacggcgcttgggacgggcttgcaaagacggcggttttccgtttcggaagcgtcacttacgatgtgccggaaagcgagtggacggacggagaatgcgtcatcccgcacgagtgcctggcggtttccggggacgagcttatgtgcggtgtctacggcgtgtcgcaggacggcgagacggtcatccccacggtgtgggtgcgcctcggctatgtgcagagcggagccgatccctccggcgacgagtcgactgctcccacgcttccggtatgggcggcgcttaaaaatgctatcggcgacctcggcgacctcgacaccacggcaaagaatacgctcgttgcggcgataaacgaggcggcgcaaaacggaggcacaagcgtgaccccgctcatcggcacgactgccgagcttacaccgtcgcaggtgcaggatgccgtgcttgcaggcagacccgttgccgtgcaatacaccgacagcacatacggcgtgttgaagtttaataatttcaatatcgctgcctcgcacaacctgctcgcctcggtctctataattaagctgagtggctcatgggtcgtatatgcgctttatggctatacgtcgactcagcagtgggacccgggggttacggtaatggctaccactcctcaagtgaatgacattatagcgacggtgaataccatcagtacaagggtgagcacgatagagaacgcaggctatctcactcttgcgacactcccaaagtacggaggtgaaagcgaatgagcgtgacggtaaagtacaagggtagcgccattgcggagcttaccgagaacggcacaaagaccctcaaaacctccggcaaatactgcgaagcggacatcgtagtcgagaacacaaaggacggcggtacgcaggtgactgacggcatcgtcgttaaagcgagaagtgcggagggctttcccaccgaagccgatgtctacggcgacctttacccctatcagttctcgtatgacggaccatattaccacggaacgatcggatggcgcagcttgagcaagctgaccctgaaaagcggacagaccgtgctgaaggaaggctgctttgcgtatctgccccttgtgcagctgaacggaatcgagggcatcacggcgctggcaaagtcgtgtctcagaaatacaaaattggttgagataaatcttcctaatgccgtgtttggcgatttgccgacgccgttttcggaaaataccgcactgaaaaagctgcattgcccgaagctcacgggaagtcttacggccggaacttatgacttggcgggtgcctgtactgcccttgaagaagcggttctcggctcggttgggcatacggtcacggacaacaactcaatcaattctttcaaaaactgcactcagcgcgggctgagcataacggtgtttaccaatgctgcaaacgtcgataagctgcttgcgaatatccgcaacggtgcaacgaaggcgacgattgttctcaaggcggcggaggacacggagtacaacggcagggtatacgccgccggaacggatataatcagctcatcggtagccggggaggtgacggcatgacaataggcaaggtcataaacaccgtaaacggcacagcgaccgagcgcatcctgctcacggctgacgagggaatggcgctgctctcgccggagggagagcagtggaactgcgtcgccgtggactcaacagacggctggacggagatcacggctcccgctcccgacgatgaggacgaggcagactacatcccccgccacaccgaagggtgagaattaaaaagcacttgtaatttgctgtaagatgctgtaatatacaaatagttcttataccataccaagaactatttaggttactatgataaggtagtaaaccgaagagctctgacgcctcgctttctgcggggcgtcatctctttttgttgcataacatccaaatatggtgtaaaatgtcaacataagcataataacaagggaggcgtttatatgcggtcgtatgctatcgggcttgacatcggcattacctctgtcggatgggcaactcttgctctcgacggcaacgaaaatccctgcgggataatcggaatgggggcaagaatatttgacgcagcggagcaacccaaaacgggcgagtcgcttgcagcgccgagaagggcagctcgcagctcaaggcgtcggctgcgtaggcaccgccacagaaacgagcgcatcaaaaatctgatggtctcaaaaggggtgctgtcttccgatgagcttgaaactctttttgacggcagacttgaggacatctatgcgcttcgggtaaaggcccttgacgggaaggtaagccgtagcgaatttgcaagaatacttctgcatctgtctcaaaggagaggctttaggtccaatcgcaaaaacccgtcgtccaaagaggacggagccttgctcaaagcggtgagcgaaaacgccgaacgtatggaaaagcacggctaccgcaccgtcggcgagatgctcctttgcgacgaggcgttcaagcagcacaaacgcaacaagggcggcaattacctcactaccgtgacgagagatatggttgcggatgaggcaagggcaatatttgccgcacagcgcagcttcggctcggaatacgcaagcgaggaattcgaaaacgaatacctcgaaattctgctgagccaaaggtctttcgatgaaggtcccggcggaaacagcccttacggaggaagccagatcgagcgaatgatcggacgctgcaccttctttcccgaagaacggcgtgctgcaagggcaacatattcgtttgaatacttttcgcttcttcaaaaggtcaatcacatccgcatcgtaacaaacggagccgctgaaaggttgaccgccgagcagcgcaatacggtaattgagcttgcgcacacgacaaaggacctgtcgtatgcgaagatacgcaaagcgctcaagctatccgacgggcagcttttcaacatcagatacagtgacaaagcttcggcagaggacaccgagaagaaggaaaagctcggtgttatgaaggcgtatcatcagatgcgcagcgcatttgagaagcagtcgaaggggcgttttgactttgtaactaccccccagcgcaacgacatcggcaccgcactgtctctgtataagacttcggacaagatcagagagtaccttaaagattcgggctttgacgagatcgacatggatgccgtcgagtccataggcagcttctcaaaattcggacatatatccgtaaaggcctgcgatatgctcatccccttccttgagcggggcatgaattataacgaagcctgcgccgcagcaggactcaatttcaaagcgcatgatacgggagagaaaacacgttttctccaccccacggaggacgactatgaggacataacgagtcctgttgtgcgcagagcgatatcgcagacggtgaaggtcataaacgcaattattcgcaaagaaggcggaagccccacatttataaacattgagcttgcccgtgagatggccaaggactttacggagcgaaacaagctcaaaaaggaaaatgacgaaaacagggcgaagaacgaaaaactgcttgaacggataaggacggagtacggaaaaagcgaccccgcagggctggaccttgtaaagctgcgtctgtatgaggagcagggaggcgtctgtatgtattcactcagacaaatgtcccttgaaaagcttttttcgcccaactatgcggaggtcgatcatatagttccgtacagcaaaagctttgacgacagccgaaagaacaaggtgcttgtgcttacggaggaaaaccgaaacaagggaaacaggctgccgctgcagtatttgaccggacagcgcagggacaattttatcgtctgggtaaacaacaatgtcagggattaccgaaaacgcaggctgctgcttaaggaaacactgacggatgaggatgaactcggattcaaggagcggaatcttcaggacacgaaaaccatgtcgaggttcctgctgaactacatttccgataatcttgagtttgccgagtcaacttgcggacgaaagaaaaaagtcaccgccgtaaacggtgcggtcacggcgtatatgcgcaagcgctggggcataacgaagatccgtgaggacggcgacctgcaccatgcggtcgatgcggtcgtgatagcctgcacgacggacggcatgatacagcgggtgtcaaaatatgcccgactcagagaatgtcgctatatgccgaccgaggagggaagccttgtcattgacgacggcacgggcgaggttctgcaccaattcccgtatccgtggagggatttcagaaaggagcttgaggctcgcattggcacggacccggcaagaacgatcaacgacctgcgcttaccgttctatatgtcgagcgggatgccgcttccggaaccgatcttcgtctcaagaatgccgaagcgcaaggtcacgggcgctgcgcataaggacaccgtaaagagtccgaagaagcttgataagggctgcattgtggtaaaacgcccgctgacggatctgaagctcaaggacggagaaatagagaattactataatcgtcaaagcgaccgtcttctgtatgatgcattgaaaaaagcgcttatagagcatggcggggatgcacataaggcgtttgcgggagaatttcataagcccaagagcgacggtactccgggtccgatcgtgagcaaagtgaagcttttggagccgacgacactcaatgtacccgttcatggcggcgccggcgttgctgacaacgattcgatggtcagggtagacgtctttctgacaaagggcaagtacaaccttgtcccgatatacgttgccgatacgcttaaaccggagctgccgaataaagcgattgcggctcataaaccgtattcggaatggcccgaaatgtcggatgacgattttgtcttctcgctctatcctaatgaccttgtttgtgtgacacacaagaaggggataaagcttacggtcacgaacaaaaacagtacgctgccgccgaccgtcgagggtaaatcgttcatgctgtactacataagcactaatatctccggcgggtcaatcaaggggatcacccatgacaacacttatgagataggcggcctcggcgccaaaacgctggaaaagcttgaaaaatacaccgtagacgtactcggagaatatcacaaagtcggaaaggaagtcagacagccgtttaacatcaaaaggaggtaataatgccgtttcgcaatgttatcattgaaagtccggcgcatatatctctaaagaacaaacagctcataataaagacggacagcgagcatagcttggctgtcgaggatatttctgcgcttctcgtggaaaacagagcgtcaacagtaaccgcagccgctttgtcctatctcggacaaagcggctgcgccgtctttatttgcgatgaaaagcacatgccatgtgccgtgcttgagccgttttctcggcacagcagggcgcttgcggtgctgagacagcagcttgaagcaagcgagccgctgaaaaaacggctttggcagaggcttgtgacagcaaaaataagtaatcaggcacgttgcctgaagctttgcggcaagggggccgatgcggagatcttgtttcgtatggcggactacgactttcagtgtgagcagctttcgattttttggagaaaaacagcgctttatccgttgataaagcgctgtttttccgatagcctattataccataccaagaactatcagggaactataacgctgctcgtagacaggcgggtattgtctgcaattataccataccaagaactatcagggaactataacccggtcacgcggatagtcgctccattgggaattataccataccaagaactatcagggaactataactcatcggccccggctctcaaagcactgaccattataccataccaagaactatcggacaagtgtcatggttcagaaagcaaaaacaaacctccgccgagtggcggaggtttgtttttggcacgccgtaagggattcgaacccctgaccttctggtccgtagccagacgctctatccagctgagctaacggcgcttattgctttgcgcctaagtatattagcacagcggataacaaattgcaagtctttttttgcaaaagcgtctgcattttttgaatttacttactcatactgcttgatacggcgtctactacgtcgcccatcgttttaagggtcttgctgacgacgttctttgcgcccttcttgccgggcatcattatggcgcccgcacagccgccgactgcgataccgagtcccatgccgataaggaaatttgtcttgttcattgtttacacctccgtaatatattatgtccatttttgttttgctacggcggtgaaatatatgttataatatccgttataaaccgatttgaaaaccgaaaggaaattttaaaatgagtgtaaggatccttgccgtgggcgacgtctgcgggcagccgggacttgactgtttaaataccaagctgaaaaaattcaaagccgaaagaaacattgatttctgcgtcgtcaacggcgaaaacgcaaacgtcgtcggcataaccccccgacaggcggatgcaatattcaaggcgggggcggacgttataaccctcggcaaccacacatggacacgcacggagctgcgtccctacctcgacgagcgccgccgcatactgcgccccgcaaactttgcgccacagtgtccggggcggggcatcgacgtctacaagaccgccttcggcgacgtgtgcgtactcagtcttatgggtcgctttacgctcgacaccaacaccgacaacccctttgtcatcgccgacggcttcatggaggagatcagggaaaagatcatcctcgtcgatttccacgccgaaggaacgagcgagaagcgtgcaatgggctttttgcttgacggcagagcgagcgccgtctggggaacgcacacccatgtgcagacctccgacgccgaggtgctgcccaagggcacgggctacatcacggatctcggcatgacgggcgctgttaactccgtcatcggcatcgaccctgagcagtccgtcgggaagtttatgggcgatccgccgaggcgctacgactcgccctccggtcccgcaaagcttgagggctgcatatttgagatcgacccggaaaccgggcgctgtttgagtgcggaggcgatacgactgaaatgaaaaggataaagctgcttcatgccgcagacctgcatctcgactcgccctttgagggactcaccgggagcaaggcggcgcaaaggcgcagggaacagagagagctgctccgctcacttatggagcttgccaagaccgaggaagtgcagctcgtgctgctgtccggcgaccttctcgattccgcatcgccgtaccttgagacctccgaggagcttttgcgggcgctggggagcgtcagtgttcccgtattcatagctccgggaaaccacgacccctacacgccgggttcgccatatgcgaagctgagattcccggaaaacgtacatattttcaaaagtaaccgtattgaatgcgtcgagctgccggagcttaacgcccgtgtgttcggcgctgcgttcacggagcgccacagcgcttccatgctcgcaggctttgagccgcccgcagacgacggtatgcttaacctcatgtgcatacacggggagctgtcacaggactctgactacgatccgataagcgaggcgcagcttatgcgcagcggcatggactacgttgcactcggacacatccacaagggcagcggtctcagaaaggccggaaaaacggcttacgcatggccgggctgtaccgagggcagaggcttcgacgagacgggcgaaaagaacgtctacatcgtcggtataaacggcgacgagtgcaggataaagcccgtgtgcatcgcaaagcgcaggtacgagatactgaacgttgccgcctcggacgatgcactttcggcgataaacgccgtgcttcccaaggacacggaaaacgacgtttaccgcatcgtgctgtccggcgagagcgccgaaagccccgaccttcgggcgctttatgacgcactgagcgggagattctttgcgcttcagctcaaggaccgcacgagacccaaggtcggcgtttgggacagcgccggggaggacagccttcggggtcagttccttctgcgcctaaagagcgcctacgacgctgccgccgacgacggcgaaagggaacgcataatgcaggccgcccgctgggggcttgcggcgctttgcaaccgggaggaggtcgtctgccatgataataaataaggtaagtgcgaccttcgggaagctgtccggcgagagccttgaatttaaggacggactgaacgtcgtctgcgcaccgaacgagtcgggtaaaagcacatggtgcgccttcatccgtgccatgctgtacggcatcgacagctcggagcgccaaaaggcgggctacctgccggataaaacccgctatgccccgtggtcgggagccgccatgcagggaagcatggaggtgaacgtcggcggcagggacatttgcataagcagaacgacgaaacagaaaaactaccccatgcgggagtttagcgcagaatatgcagggacgaacgtcgccgtcgaggggctaaactcggcaaactgcggcgaagcgctcaccggcgtgagccgtgatgttttccgccgcagcgcctttgtggagcaggacggcatcggcgtcagtgcaagtccggagcttgaaaagcgcattgcgaccatagtctccacgggggaggagggctgctcctactccgaggcggacgagcgtctgcgcatttggcttcgcaagcggcgctaccgccgcggcggaatgctgcctgagcttgaggacggaatggacgccgaaaagcggcgtttggaggagctttaccgctttgcggacgagcgggaggcgctgtcggaaaagctttccgagagcctccgccgctgcgacagtcttgagcgggagatgcttgagagccgcaaaacggcgagaaaggacgcactttccgctctgcacgacgcacggagcgagcgcaaggcggcggaggaggactgcaccgctgcgcagcgccgctgtgcggacgcaagagaaaagctctgcgacgatccgctgtacgtcctcgaccccaaaccgacgcaggagagctttgatgccgacactgcggagcttacgaagctttccgccgaggcaaagcgcaaggtgagcgtcctgcccgcagtctgcgtgcttgtgcttgcgctcatctgtgccgccgtcgccgtgatgacggagccgctgctgctcattgcagccggagtgcttgcgctgctttgcgtgctgatctttgtgcggatcggcaaaagaaagcagacggtgcgggagtcgcagagaaagaaaaacgcaattttggaacgctactcggcgcagacgccggaggagatggagcgcagctttttgagctacacggagaagctttccgactgccgcaatgcggaaaaggaccgggaaagcgccgagcagcgcttgcgtgagctgacgagccgccttgaaaagacggaaagcgagacgctgagcatcctcgactttgccgagggcgacagcaccgcagcgtatatcggcagacagcttgcggcggagcgccagctttgcgacagcatatccgcccgcttgaacgagcttaaaggcgccgccgcagcggtcggcgatccgctcgtcatcggctcaagactcatggagatgcaggacgagtatcgggagatcaatgccgagtatgaggcgataagccttgcagtcgagacgcttaaagacgccgatgcggagatacagagcaggttctctcccgcactcggcaagcttgcggcagagtatttctcacgcatgaccggcgggaagtacgacggcctgcttatcaaccgggatttcagcgtcaaggtcagggaaaacggtgcttccgttgcggtcgataccgcatacctcagcgccggcacggaggacctcatgtaccttgcggtgcggcttgcggtgtgcaggcttgcgctgccggagacggcggtgtgtccgctcatcctcgacgatacgctcgcaaacctcgacccggagcgcaccgccgctgcgatgtcgcttctgcgggagatcgcaaaggagcggcaggtcatcctgtttacctgccgagaccccgaataaacgcaaagctcccgcagccgcagctgcgggagctttttgcgccctgtgcgcaaacgcttccgtgtcgaaacttgacaatttgaacgagcgctcctataattgctttggatatttccgcagagaggataagcattatgatgagaacgacttttgaggtcccgatgagaacgggcaactttgaggcggcggtcggcattatcggcgccgaatttgagtcggcgggctttaacaggaagaacgccgagggcggcgttatgtggacgaagggcgacgggcttcttgtgaagcagcagtgcgtaaaagccgtctacaccggacactcggtacagatacagggctggctttacgacaagctcggcggtgagtacgatctgaacggattcgctgcgataacgatgaagaaaaagctgagagcaaggatcgaagcgacctgcgcacggatagactccatggcgctgtgacgagctttacgatgtgaaaaactcctgcaatactctgagtattgcaggagtttttatcactttatgctcactatctcacgcacggtttcgggagagatctttacgaccttacggtcgtagcttataagaccgttgacctcgtcctcaacgtcggaaagctgcgtgtacacggcggcggcaagaccctgctcgtgagcgggacgtatctgcccgccgtagagcctgcgcagcgcctcggtcagcgcctctatcgacttaaatctgcggtagccgaagtcggtctcaccgaagctgtgttcgtcgcagtagtagttgtagccgccgaactcgctcagcagcacggcacgccccaatttatcctgacggtgaacgtatttcttgaagtaaacgtgcaggctcttggtctgaccgatcttctggtcgtgccagccggaggcgtggtctatcgttcgtgtgccgtcaaagtcccggacaagctttgcgatacgggcggcgtcaaactgaccccagccctcgttgaacggtacccacatcgagatgcaggggcagttgtagagctggtgcagcatctcgaaaagctcgacctcgtactgctttctgcccgcctcgtcctctcgggcgaacagcttgtagcgatcgtccttgaggtggatgcccgtcacgagcggggtcgagatgatgacggggttgtactcgccgccgccgtttatcatgtcctgccacacgagcataccgaggcggtcgcagtgatagtaccagcgcatgggttcgatctttatgtgcttgcgcagcatattaaagcccatgtcctttgcggtctgaatgtcgaagatcagcgcctcgtcgctcggtgcggtgtacataccgtcggaccagtagccctgatccaaaagtccgttgtggaaaaagggcttgttgttcagaaacaggcggcttatgccgtccctgtcacgggcgacggagaatttgcgcatcgcaaagtagctgtccaccttgtcctcgccgcagacgacggagaagtcgtagagcttcggtgtgtcgggcgtccaaggctcaaagtccggcaccgggatgcagcagggcagggggtagctcttcccgtcaaatacggcatatgcgtccgatcttccaacagtttcggcaatgatctcaacatgtccggcgtcgaaatcgggcgtaatacgcaggtttttgacgtaacagtccggcacgcactcaagccacacggtctgccatatgccgctttgtgggctgtaccatatgccgccccgctttgtgcgctgcttgcctctggagtgccagctttcgtcgctcacgtcctttacacagacgcaaagctcgtttttgacggaaagcagctcagttatatcgcattcaaacgccgtgtagccgccgacgtgatgcgcagcctccatgccgtttacatacaccgttgcggtctgatccaccgcaccgaagtgcagaatgacccgacccttgtgctgcggcacctcaagctctctgcggtaccagaggtattcgtggggcttaagaattctgcccacgccggacagatcgcactccggggagaaggggacgagtatctttccgtcccacgagtcgggcatggagtccgactccgtgattgcgtaatcccaaacgccgttgagattcacatagccgtccctgacgagctgaggacgggggtattcctgaagcacactgtttttgtcgagtttttcaccccaaacggtaagcatgggcgcacctccgaatttcaataataatttgtccttattttaatatgtatatattacaatactttttgcctttttcaaagacccaatttcaagccgatcggaggagtggacaaattagcccaaaatggcaaaatgacacgcaattgttaactatttatcattcaattgtggcaaaataaacgaaaaattggcgaaaaataggcgcaatccttgtagacacggtagcgggtttatgctatatttaagtttgtcataaaatagagaggtgatgcaaatgccctttaaattccgtggcggcgtacatcccgactacatgaaggcccccaacgagcctgtcatcgtcgtaaccccgccgccccaggtcattgttccgatggcacagcacatcggcgcaccttgccagccgctggtagcggtaggcgactatgtaaccatgggtcagaagatcggcgaaaatcccgcccctgtctctgctccggtacattctccagtctccggcaaggtagtagcaatcgaacccagaccccatcctctgggcgacatgatcccggcagtcgttatcgaaaacgactatcaggataccccgtgtaaggatatggctcccctcaccgaggaagagcttaaggatcccgaagcgataatcgcacgtctgcgtgaagcaggcatcgtcggcatgggcggcgcaatgttccccaccgcattcaagatcaagagcggtctcggcaaggtcgataccctcatcatcaacggtgcggaatgtgagccttaccttaacggcgaccactggaccatgaagcttcatcccgaagagctgcttcggggtatcgagcttgcccgcattgccagcggtctcgacaaggcgtactacggcatcgagaagaataagatggacgccatcgaaattctcaactcaaaggaccccgcaaagtacggcgtcgagatagttcccgaagaggtcaagtacccccagggcgcagagaaaatgcagatcaaggtcatcacgaaccgtgaggtcaagcccggcggactgcccgcaggcgtcggctgcaacgttatcagcacccagaccgcatatgcgatctacaaggcctgctacgaaggcgttccctgctttgagcgtatactcaccgtgggcggctccgcaatagcaaagcccttcaacctgcagtgccgtatcggtactcccttcagatacatagtcgagcagtgcggcggctttgtaaagacccccaagaagatcgtcctcggcggaccgatgatgggtcttatagccaccaatctcgacgccgtgaacatcaagggtacggcagggatccttttcttcaccgaggaagaggacagaacggtcaaaaatcccacctgcatacgctgcggcaagtgcattaccgtatgccccatgggacttgagcccgtttatatgtatgcatacttcaagaagggtgacttcgagaacatgaagaagtaccacattcttgactgcttcgagtgcggcagctgctcctataactgccccggcagaatgccgctgacccactcattcaagaccgcaaagcttctctttgctgccaaggctgcggaggagaaggcaagagcggaagccgctgcaaaggaggccgagaaaaagtgatacagaaagaatatacctttgatgcctcctaccagcctcaggtaaggaccaagaccggcaccaccaatatcatgctcgacgttatcattgcgcttatccccgcaatggctgtcggcgtgtggcagttcggtctcaaagccctgctgctcatcgcagtttccgttgcgtcctgcgttttcttcgagtggggctaccgcaagctcttaaagaaggacaactccatcggcgatctttccgcctgcgtcaccggcgttctgatcgcaatggtcatccccgtgaaagcaccctggtggatacccatcgtcggagctgccttctccatggtcatcgtaaagcagcttttcggcggcctgggaaagaacttcttaaaccccgcacttgccgcaagagccttcctcatggcatcctggcccgtcatcatgaccacttgggcggttcctgccgcactcagcaaggtcgttgacggtaccaccatggcaactccgctcagcatcatgaaggccggcgaggctctgcccgattacttcagctacggcaatatgctcctcggcaccatgcccggctgtatcggtgaagtgagtgctatcgctctcctcatcggcggagcatacctcctcatccgcaaggtgataagctggcgtatccccgtttccttcatcggaacggtcgcagtcatcaccctgatcttcccccgccacggcggattctttgacgtcaactggatgcttcagaacctcctcaccggcggtctgctcctcggcgccatattcatggcaacggattactcctccagccccgtgaccctcaacggccagcttctgtacggcttcggctgcggcgctctcaccgttctgatccgttacttcggcggctaccccgaaggcgtttcctacgccatcctcattatgaacctctgcgcatgggctatcgacaagggaacccgcagccgtcagttcggtgtcagcaaggaagaccttaaggcagccaaaaaggcagcaaaggaggcaaaggcagcatgaaaaagataattaagcttgcactcgtccttttcctcatatccgccatagttgcaggtgttctcggtgtcgttaacgagcttaccaaagacaggatcgctcagatcgcagcgaaaaagaccgctgaggcatatgccgaagtcctcaaagccgaaacctatgacgac

SEQ ID NO: 2748 - DNA, 23264 bp, synthetic construct
  source 1..23264: mol_type = other DNA
  misc_feature 1..23264: note = Synthetic
atatccgcctcacgcggatttcgaagctgcggcacagtaaagccaaagaactcatcatattcattggggaacagaatgtgcagcaggttataaatgtctgtgtaggcgttaggaatcggcgttccggtcagcgccaccacatagcgggcatttcgcgccagctgcagggcattctccgcatattcgccgcggatacgcttgaccttatgtacctcatcgaacaccaggagcgttcccgcatccatcaactgctccaaagcgtccagcacaccgccgactgcctcatagttgaccagaatcagattgcaactaccggcgtcgtattgcagtgccgtgcggcgctgctgctgggtcttgcactgcggtgcgtgaatatttaatacccgcaacggttcaatgcacgcaaaacaggctgtgaactcatccatccacgaaccgaaagcgttctttgggcataccacaacgatgcggtgcatcgccgccttctcccgcagataggcatacatccccagcaccgatgccgttttgccggaacccggcacagaaaaattggcggacttcttcatggcacacataaaaaaggaatcccacatctgctgctcccgcagtttccgtgccatacctgcattcacggtatcgcggtaggcctcaaaacgctcccgcaatttagagtcgcgatcttttaattcgctgcccaaacgggagcgaatttccaagtgcaattcacggctatcgatatacgccctcaacgactccgaaacgaccagttccgtctgacgacgcaccgcctctttttgacacagggtgatgatcttcttgtagtctaaatatgtcagtgctggcttaaaccgcattattccgtcggccacctccgctgcatagcgcttcaacgacaacttataaaagctgctgctcgacaatgcctccagctcttccgaaggcagacgcaatgtcatactgccatcatagtccaacgtccacatttacagattctcccgcaagtctgcgactacctgctccagcctgtccagctggcgggtaaggcggcacaattcgctgtcgttcattttcagcagaatgtttgtgtcgatactctccaaaaatgtggtagctttctctgccaactgaatgggacgattgcgcgtctcggttttctttactttggtcagcgttttctccatggaacgctctagtgcttcacgattctcctcatcggcgcgtacttcctcccggatgacctgtgtattcacatgtcccactgcgggcaggtgttcaagcacgttcgccgccaactccttttgttcctctaagaactcgtcctgataatccgtgccaacgatagatttgatattacggataaagcgggtcatatctcccgcagtctgcatcagaatgttattaaacacgctggccttcaaatcctcagcctcattatccgtccgacacttcttcgtaagcttcaagagttcctccaaggggtaatatacctgcaaatctcgggcgatataaaactgtttgggcgcattgataaactccagaaattccaccataagtttagcaatttccacacgccgattcacatcagtttcggattcgttggtgctggccgcatattccgtcgatgtcagcaaatgtgtttccacgatgtccgtataaattcccaccaatcgatcaatgggattatagtccaccttgctctcttcgccgtgctgaatggaaagctccagcagtttgatctgcttcgcgctgttttcaatattccgatcaaggattacggcctcaaaatagttgaagcgtggatttttggcggacagtcgccgcaggcaggtaaagcggcgatttccgtcaataatccggccatccgccaacaccacaccagcctcccgttgatccaccatttcaatattactttgagtcttgcgaatggcatcgggattgctctccacaatgaactgctcgattatattgttgtactcttcgcgctgggaaatatccggcgcctgccctccgtgctgtgctttatactgactaatccacgttgcaatgcggtcgttctggtcattgtaaaacaaccaatccagtcggattttatagacagggtacgccttagtcaggccatctactgtcaacttgcgggtcattgttgtcctttcaacaacgtgctgctccagtccttctttcagcaagttcatttttatatctcctcaaaataagtatcgtaatctgcgtataccgcacccatgatagcgtcgtaatacaagtcggtctctttcaccaactctacaagcttatctttcgacagcacaatgccaaagtgttcctccagtgtatcccgcagttcatagacgtctgctttctgttcatgctccagcagttccgtcaagaggccccctatgcggactggcgcgtttccccgcatgaacagccgtgtcccgccgattcgctggtaggagaacaattcccgggcctccaacagtacagaaccataaaaccactcgtcaaatcccagatcgtccaacggatgcataaacccatccgcccgcaaggacgctaccgtaaagtactcccctggctcgtaccgctttgccacatcctcgcaataggcccgcaaggtctgttctgttacgccatgttccaccagcctattgatactgacatactgtagcggcgagaattccacgattttgtacactgcccgtaaggagtacaactcgctgttataggccaccacccgctgcagttccttgccgcttccgcgcatatccagcacatcccttgaggtaagaacgctgcggaaatactccaccgcactggcatatgtatcccgcacaatgtagtctgtatacacatgaaagccaatggttttcagtgcataaggggtaagtcgttccgcgtcagcatcgggaaactcccgtaaaaacagattcctcgctctacgcagagaataaaagtcctcggtcagcacgcgccgcatacgctctgtctgatctgccggcaatgtttcgtccggaacggtgtatgtcccattataataatacttttcaatgcatccaaagagatttgccatagcagaggtcgccttaataccgtaggtttcctcatacttagcagcaaaagcctctcctgaaataggcgcgcactgaaacagcaacgctttcacctgcgcatcccgatccacctgccccacctcaatggtgggcatcttaggaaagcgaatcggcatagcatccactggccagatcttcttcagcaaattatgcagttcgtactcatcgtgaatgtcgtattgctccatcagttccggataatcccgaaacaccttcaacgaggaaagctccgtgtcccggtactgctccatgtccaaagtggcaaacaattctgtgtagtcctgcgcgtcgatgttataatacctaaaacgccgccactgattccaaagcacaaaccgactgccattcaatttattctcataggtacggggctccagagccaacctttcttcacctgcaaggcccagatcttccacaacgtttcggtacataatgacaaaatcatcgtatttcgtcagtgtcctacaccgtgtgcggattatatgtcggacaagttcactccgatcacgcttgacacgaataccgtccagggttacataattcttgtacacaactctctccgctgcttttctcagtgcaaccggaatagtctcatctgccaaaatggtttcgtccactggtttcctgtttttctgttttgtcatgctgatagtttccaagtagatataggccgaaggcggttcaccaaaagccaacgaaaagtcctccggtgagaaggcgtaggtatcatatacatatcggtactgatcctcgtgcagccagggacgcttttccaatgccctgccgatgatctgccggacgcgctcccgtgtaacaccatcgaagcacttaccaacctcgtccagcgtttttccttccagtctgcacagaagcatctctttattacgcccatcgggaagactgtttgcatattcccgtaccgtggggtaccttctgcggatcacatcttctccaactgtaatccgtccatcagcttcaagtgcccgcaataattcttccagaatcgccgtgtttctcaaatgcgccgggcattttcctgccagcgcagtccgcatgatttcatttcccttggattccacttgccgcaggatagccgcttttaccgcatctgaaacagtatggcgctcatagagtcgataaaagaaagtctcactctgtgcctgcgggtacgtttcttttgcctccaatatctcccgcagccatgcgctttccgttctgccgtaacacgctgtcatctcttttgcaagttccacacagtattttgcgtcttccgcaggcaattgcatattatccggagtcgccgctatcaatcggtctgtcggcaactccttgactctttccaagatttcttccgccgtctttcgccccatgttcttgatccgcataaggtcctccagcgtcatatccaacagttgcgacgcgtagcgaatgccttcgtgtgcaagacaattctgcgcccgtacagacagaggaagcttctctacaggtacatcctcccacagctgctgggcacttgcattcgttgcttccgtaacctccggaatggccgcccgttctatcaatcggtattcaccctcatgactttgcagttcacgaaccgttgccgtaagctcatcagcagttttctgcccgatattgtgtaagtccaaccaattgtgtttccgtgcataatccaacatatccccgatggtatgcaggccctctcgacgcaggcaattagccgctcgattagaaagcggaagtgcagtaataccatcttctctcgtgatgtaggtcattgtaatcaccctttcctgcatcgtaaaaagcgctttgattatatcgcatttgggcaatttttacaatatgcagtttgcataggcacattttggtgggtgtttcatacatcaaattaaatcctctggagggaaagaagaatttactatcgcagggaaatgctctactgattatgactgctcacctttcctgatcgattgttccggtgatgagccaatgattaaggccgttcagggcgatccggacgatgacgaaggttgttactacgcattttgtgaagctgaatattttgaaataccgaatctgttggaagacgaatcttttcggacgttcaagcaagcggttgacgaagatcttccgctgggtggttttttggatacctcttacgaagaatggtacaccgccgctttgtccggcgaatgagtccgaatcattctgtattgcgcaaataagcgccgcctgccaaatgcaagcggcgcttattttttacataatgatctccgcccggctctcgccggtcttttcttttttcaccacgatctgcttgtctatcttctccttcagttccgctacatgggagataatgcccaccaggcggttgccctctgtcagccccgccagtgtgttatacgctttgctgagggcctcggaatccagtgagccaaaaccctcgtccacaaaaagcgtatccagatggataccggtggacatctgcacctcatcggacaaccccagagccagcgccaaagaagcaagaaatgcttcgccgccggagagcgtattgacgctgcgctcggtcgtgttgatatggtcgatgatgtccagctccaaaccgctttggctcttcttgttgtccgcttcctcgcggcgcttcaggtcgtactgtccgccggacatcttttgcaggcggatattggcccgcgccagaatgcgctcaaaataggtggtctggatatatgtctccagcatcaccctgtccttgccgctcacagagccgtttgccgtgtcggacagggccttcatccacacatacttcttatccagcctctccacctcggcagcttttgcggaaacgccttgcagcgcggtttcgttggcagaaatgcgcgtgtgaacgattttctgctttgccataacgactgttttttgcgcggcgtattcgtccttctttgtccgcagctgtacggtatcgatatcaacgccgccctccagctgcttgtgaagctgctcaatggtgccgcgaacgccggccagattttccttgcattggttatgcgccgtttccgctgtttgcaagttttggcgaagcttatccgattctgcccgcagagcgctgatctccgcctcggcagcggccttgtccggaaaagccagcttgttccggagcgcatggatctgtgcctcgctgctctcagcctttgccgtcaaagacgcgatcttcgccgttttcacagtgattgtttcttccgccgcacgcaagagcagttccttcttcggaagcaggacatccagttcctctcgccgcgccatctttttcgtaagtgccacgatctgcacattcagcccctcgatctgcatggcaagaagattttcctgctcctctgccgcttttgcgccatccgccagcgagatacccggaatcaggctgtccaactccttggcaagtgccccctctgttgtatcgaccattcccttccgcttctgtgcctcgttgctggcctcgttggctcttctctgcgccgtatcatactttgccttggccgcctttacatctgcctcggtcggtgcatcctccgcaagcaccgccagccgcggatgctccacagagccgcagacggggcatgccatgccagcagtcaggccactcgccatgataccggcctgctcccgcaggaacgcacgctccttgacctcgtactcccgcagcaactcagaagaggcctcttccgctttcagataaccttcttgccttttcgctaattctgcctgctcacgcgcaagcccctccatgccagaaaggaaatccacaaactgcttttgccggtctcccagctgctgcagctgcgcggccagtttttccttctcagcgctcacatcggcaagatccttttgttccgtcctcagtcccgtgatctcggtcgtcagatcgtttttctcttttacggcattttcttgcgtcgtctgcgccttggccagctccgcctgcgccgcagcgcgagccgccctgtacgcctccagctcgtcgtaagatggcagcagtagctccgtttccgtgatcctgctttgcatcccctcctgctctggaacagtttcctgtgccgcgctcagcgcatcccttgctatctcaagctgcgctgacagcgctgcttcttcggccacacgttccgcaagcaccgttttcgcggcctcatacgcttctgcctgcgttagctgcgacgtgatctgctccagttccttctccacagcggcaagctcggcttcaagggcaagctccgcttgccgatcctgctccagaagtgcccgaaacagttctattacctccgttacgggcagttccccgtttttggccttctgtgcgtccagcgcgtaaacggaatcctcgtcacaagtcactccattgatatactgccggatgctttggctcgcctgatcccgctgacccctgacctctcccgccttctccttcaactgattttgcagcagcacatagaggtcggttttaaaaatatcccgaaatatctcctgccgttccttggtatccgcttgcagcagctttcggaaatcgccctgtgagatcatggcgatctgagagaactgttcccgcgtcagaccaatgatctcgcggatcgccgcatctacctctccatttttggtgacctgacgcccatcaggataggtcagctccgcgccggcagactctgttgtggttccggtcccctttatcttcgcacgctcatacgtcggattccgcgtcaccgtgtagaccttgccgctgtaggcaaaggtaagctccaccttcgtcggcatatcctccttggcatacttggagcgcagcatggacggattccggttattgccgctggcctcgccaaacaacgcaaaggtgatggcgtcaaagattgtggtctttcccgcaccggtatcgcccgtaatcaggtaaagtccgctgctgcctaagcggtcaaagtccagctcctgcacgccggcatacgggccaaagcccaccattttcagctttagaggtctcattctgccgcctcctttatatgctcgatcagctcctgcacgaaagcgttctgttcctcgctcatgggctggttattctgcttgaaatacagctctgcaaacagctccagcggtgatttcagatgtacatcctccgcacggtccagcacttgattcgtccgggtgcgggtattgtcgtatgcgagctttatcagattggggtagatgacccgtagccgtcccatggcctccggcacatcctcctcgtctgtgaggacaatctgcagatagtcctccgttgccgtaccgccgtaatttgctttgtccgtcagctccgcaaatgtcccccgtatttgccgcataacgtgtctgggcaccagcgggcagagacgcagtgtcaaatcgcccttagctcccagctccaccacggtcacgctcttgtgatgtccgcactccgaaaacgagtatttcagaggtgtcccgcagtagcgtatccggttggagccgatattctgcggcccgtggagatgccccagcgccacatagtcgaaatcttcgaacacctccgcgtccacattatccgtgccgcctacggagacctcctccgactcgcaggtagccgcgccggtgacgaactggtgggtcagcagcacatttcgggcgtttttgtccagcgccatgtgctgtatcgccgtgcgtatggcaacggtgtagctttcgatgcccgcgtcgggataaaaccgccttacatgggtaggcttcacaaagggcagcagccagaaatgcaccgcgccatgcgcatccgtcagcgtgatgggcgccacctcgccgttgtaaacgggcgagatatggatgccgctgtgctccagaatccgattgccgaaggccagccgctccggactgtcgtggttgccgctgatgataaacactggcaactcccgctttgccagacggcagaggaaatcgtcaaacagtgtcaccgcctccgcgggcggcacgcttttgtcatacacgtcgcctgcgatcagcaccgcatccgccttttcggtgtcaatgatttgtagtatctgccgcaggacatactcttgctcctccagcatggatgccacgtcgacccgctttccgatatgcaggtcagacagatgaatcagtcgcataggaaactcccctcttctatcttctgtgctttataccatccacactagaacaatacaattttccagtcgatagcacttttctttagtctgatgcaaaaggttctttgactgcttataagtataccgcatccgcccccatctttcaaccaccacccacccccgcgcaaaccccctcgattttgacctctcccgtgcctgaaacacccctcaaacaccccatttacaggtcaaatttttggctgatgcgcacagcggccaacccaacaagtccttgcgccgcaatggcttcaagtccttgccgatagggactctctggactggaaggactatgatgcggacaccatctatcagcgggtgacgtccagggtgcagccggggagtatcgtgctgttccataatgcggcgcttcacacgccggaggcgctgccgcggatcctggaatacctcatcaacgacggctataccgtgctgcccatcagccagctgatcctgacgggggactacaccatcgaccacacgggacggcagtttgcggcggagacggtgtccgcagaatagacagaaaaatatacagagcacttgcaatttgctgaaattcgtgctatattagtcatagttctttataccataccaagaactatgcaggttactatgataaggtagtacaccgcagagctctaacgcctcgcgtaagcggggcgttatctctatccgggagtatgaggaggacatgctatgtatccatacgccatcggttttgacattggtatcgcatcggtaggctgggcggtcgtcgctctggatggagaggacaggcctttcggcatcatcaacatgggctcccgcgtttttgacgccgccgagcagcccaaaacgggcgattctctggcggcaccccggcgtgaggcgagaagtgcgcgccgccgcctgcgccggcaccagcaccgcttggaacgcatccgccgccttttggcagcggaaaaggtagtatctcaagcggagctggatacccttttcgagggaaaactggaggatatttacgcgctgcgcgtcgaggcgttggatgccccagtgtccaacaccggatttgcccgtatccttctgcatatcgcgcagcggcgcggtttcaagtccaaccgcaagtccggcacatcgaaggaggacggcgagctgcttgccgccgtaacggccaaccgtgcgctcatgtccgaaaagggctaccgcacggtgggcgaaatgctgctgaaggatccacaatacagcggaaataagcgcaataagggcggcaaataccttacgactgtgggacgggacatggtggaggaagaggtccgcgccatctttaaggcccagcgtgagcaggggcagccctttgcggcggcagagctggaggagcagtatctggaaatacttctgagtcagcgctcctttgacgaaggccccggacagggcagcccctatggcggaagccagatcgagaagatgatcggcaagtgtacgttggagacgggagagccgcgcgcagcaaaggccagctattcctttgagtattttacgctgctccagaatgtcaaccacctgcggctgatgtccggcggtgaaagcagcccgctttccagcgcacagcgggagacgcttatcgcactggcacataagacgaaggatctgaatttctcccgtattcgcaaggaactggggatccccgcgggtacgacctttaatgcggtgttctataagaacgcggaggactatgaggaggcggaaaagaaaacaaagttctgctatctcagagcctatcaccaaatgcgggcggctttcaacaagcttgccaaaaatcatttcgatggcttgtcccgtcagcagaagaatgagctgggacgcgttctctccacttataagacttccgccaacatccgtcaccgcctggctgcggcagggttgtcggagatagagatcgacattgccgagacgatgagcttcagcaaattcggccacctttccgtaaaggcctgcgataagctgatccctttcctggaaaaggggatgaaatacgatgaagcctgcgacgccgcaggatatgatttcaaggggcatgacggtgaaacgcggacgcgccttctccaacctgcggaggatgatttcgcggatgtgacaagccctgttgtgcggcgtgcgatctcgcaaacggtgaaagtccttaacgccattatccgggaacgcggcggaagtccgacctttatcaacatcgagctggcgcgggagatggcccgcgattttgcggagcgcagcaagatgaaaaaggatatggatgaaaaccgcgcccgcaacgagcggatcatggagcgcatccgcacggaatacggcaaggaacgccccacgggacaggatctggtgaaattcaagctgtgggaggagcagcacggcgagtgcgcgtattcccaaaagcatatctccattgaacggctctttgagccggggtatgtggaggtggatcatatcatcccgtacagcatctcctttgatgacggctataaaaacaaggtgctggtattcacagaggaaaaccgaaacaagagcaaccgcctgccgctgcaatatttgcagggcaagcggcgggaggatttcaccgtctgggtggagagcagcatccgcgatttcaggaaaaagcagcgactgctgaaggagacgattaccgctgaggacgaaaagaagttcaaggaacggaatttgcaggacaccaaaaccatgtcccgcttcctattgaactatatcagcgaccatctggaatttgccgattttgccagcgggcgaaagaagcatgtgacggctgtcaacggcgctgttacctcctatatgcgcaagcgctggggcattaccaagatccgtgaaaacggggatctgcaccacgcggtagatgcacttgtggtcgcctgtacaacagacggaatgatccagcaggtgagccgttatgccgcgctgcgggaatgtgagtatgtacagacagaggcgggcagcatggcggtttctcagcacaccggcgaagtgctgaggcagttcccctatccctggccggagttccgccgggagctggaggcccgtctgggcgatgacccccgccgcgctgtgatctcccagcgattccctgtgtacgccaacggtgacattccggtgcggaagctctttgtgtcccgtatgccccgccggaaggtgacgggcgcggcgcataaggagaccatcaaaagcccgaaagcactggacagtggcaacgttgtcgtgaagcgcgcgttgaccgacctgaagctcgaccccaagaccggcgagatcgccaactactatatgccgcagagcgaccgcctgctctatgaggcgctgaaggaggtgctgaaaaagcacggcggcaacggggccaaggcctttactgcgcccttccataagccgaaaagcgacggtacgcccggccctgtcgtcaataaggtcaagctgtgtgagcctacgacgctgaacgtccccgttctgaagggagccggtgtggcggacaacgacagcatggtgcgtatcgacgtgttccatgtggagaacgatggctattactttgtgcccatctatattgccgacacgctgaaaaaggagctgcccaacaaggcgtgtgtggcgtataagccctatgaacaatggaaggagatggccgacaaggactttatcttttccttgtaccccaacgacttgctccgtgtgacccacaaaacaaagctgaagctgacaaaggcgcagaaggaaagcacactccccgatacttatgaaacgaagcaggaaatgctgtactatatcagcgcgaatatccatactgccgcaatcggctgccggaaccatgacaacacctatgagatcggcggtatggggatcaaaaccctggagaagttggaaaagtttaccgtggatgtgttgggcgaataccacaaggtcgagaaagagccgcgcatggcgttttgcagaaagtgaggtttgagtatggcttttcggaatattatcgttgagagtcccgccgctctctccttgcggagagagcagctgatcatccgcacggacagtgaacactctgtgcccattgaggatatttctgcgcttttattggaaagccgccagaccacgatcacaacagccgcgctgtcccgtttgggacagcgcggctgcgccgtttttacctgcgatgaaaagcatctgccctgcgcggtcctgacgccgtatcagcagcatagccggggactgtccgttctgcggatgcagatgagcatgaccgagccggcgaaaaagcgcctgtggcagagcatcgtcaaggctaaaatagaaaatcaggccatatgcctgcagctgacagagcacactgcggaagcggatacgctccgcacgatgattgaccgtgtgcgctccggcgacagcgaaaatgtggaggccacggccgcacagctctactttccggctctgttcgggcagggctttacccgtggagaggagaacggcatcaacgcgggactgaactatggctacgcggtcctgcggggctgtattgcgcgccatctgaccgtatacggtttcctgccagtgctgggactacaccatcgcagtacgctgaacgcctttaaccttgcggacgacctgatcgagccgttccgcccggtcgtcgatcttctggtgtcgcggagcatcgcggccgaagatgaattgacaccaccgcaaaagaggctcctgtttaactgcctgaatctggatatcttatcgggacggcagcaccacagcgtgtcctacgccgtggagcgactggtgcaaagtctgggacgggttatggagcggcctgaaacgaagcttaccctgcccgcgctgctggaatccgagcagcaccgctatgaataagtttatgaggatcatggtgttttttgacctgccggtcaagacaaagacacagcggcgggaagctacccgcttccggaactttttgctgatggacggataccatatgctccagtattccgtctatgcccgcgtctgcaacggcatggacgccgtggaaaagcatcgtcaacgggtcaagcaaaatctgccggacaacggcgcgatccgcctgatggtcatcacggaaaagcagtatgaagccatcgacgtgcttttgggaaaattatcagaagcagatgatacctttcagtgcgaacagctctcgattttttgagaaaaaagtcgcccaaggccttgccttgagcgactttttcggtagtctattataccataccaagaactaccagggaactacaactaccttcagcattgcctgtcctcctcccttattataccataccaagaactaccagggaactacaacttcggtgttggcctcagctccgggaagtagattataccataccaagaactaccagggaactacaacgttcttcctgaacgccttggccgtggttctattataccataccaagaactaccagggaactacaacttttcgtataaccaccgccgccgccaccaaattataccataccaagaactaccagggaactacaacgtaagtattgcggtgaacacggcgaaattgattataccataccaagaactaccagggaactacaacatctccttgatctgggccgtcaggcccttgattataccataccaagaactaccagggaactacaaccccgttcccgaaaaagatacaggggattcaattataccataccaagaactacctggcaggggctgccttcagcagcgcacaggccagcgacggatcggagaaatgccgcttttccgcctgctttacccggacggatgagagaataccgacagagaacggtggttgattatccgtgatgaacagccgcttgaaaatatccaagtatgccgctgctgtgttgccgtcaatatcctcgccatccacagcttttccaaagagaccttgccgctgaagaatctgttcaacacccagtacgcccgagacatttcccagaaggtcaaaagctctctccacgccaagcagcagcggggcgaattcgtcggggcttttgccagctacgggtattgcaaggacccgcagaatcacaaccgtctggtcattgatccgcctgcggcggaggtggtgcggcgcatcttcaccctgtttgaaaacggaatgggcaagatccgtattgccaagcagctgaacgaggagggcatcccctgccccagcgagtacaagcggctcaccggcgagaaataccgcaacaaccaccggctggcggccactacctactggacatatgccaccatccatcgtattttgcaaaacgagatgtacatcgggaatatggagcgggggagggacgaccgccttcagatgcccggcaaggcaaggcggaaggatcgcttccagtggacggtggtgtccggtactcatgaatgtcgccgcgtttgatgtggcgggcatcttttttagagcgaagtacagatcatatcacataatcatacccgtcagggtcactgtgcatcagatccgcaagcgtgatattctcaaaatattccgtaatgagcttatccagtccccgccacatggggagcgtgcgacattcagcggagcggggacaaacatcagcgccgggatcaaggcaggaaacaggagccatagaatcttctgtgacgcgcagaatgttttccacagtgtactgctcaggcgcttttgccaactgatatccgccgcccttcccccttacgccggtcagcagctttgcctttaccagcagcttgataatgttctctaaatatttttcagatatctcctgccgctgcgcaatgatcttcagcggaataaaaccgtccgactggtgctcggccagatcaatcataacgcgaagcgcatagcgtcccttggtggaaaccagcatacgatccctcctgttccagtataaacccattatacaacatggttaataggggaatcaatgtaaaattttgcggaaaggccttgacaaacggggacggcagcgctataatcacaccaacctacaagaaaggttggtattaacatgaaatacgacctgcacctccgatgttgccgcggtgaacaataagccgaaacacacaaaacagaacaaaccacaacaacatcatttttaggaggaatatatgatgagcaagatctatacatccgctgaccagctgatcggcaagaccccgctgctggagctgacccatatcgagaaggaagagggcctggaggccaaggtgctgggcaagctggagtacttcaaccctgccggcagcgtgaaggaccgtatcgccaaggccatgatcgacgacgcggagcagaagggcctgctgaagcccgactccgtcatcatcgagcccacctccggcaataccggcatcggcctggcatccgtggccgccgcccgcggctatcgcatcatcatcgtgatgcccgagaccatgagcgtggagcgccgccagctgatgaaggcctacggcgcggagctggtgctgaccgagggtgccaagggcatgaagggcgccatcgccaaggctgacgagttggccaaggagatccccaacagtttcatccccggccagttcgtgaatcccgccaaccctgccgtccacaaggctaccaccggccccgagatctgggaggataccgacggcaaggtggatatcttcgtggcgggcgtcggcaccggcggcaccgttaccggcaccggtgaatatctgaagagccagaaccccaatgtaaaggtggtggccgtggagcctgcgtcctctccggtgctgagcaagggcgtggcgggcagccacaagatccagggcatcggcgcaggctttgtgcccgacgtgctggacaccaaggtgtatgacgagatcatccccgtagagaacgaggacgccttcgccaccggcaagctgatcggcaagaaggaaggcgtgctggtgggcatctcctccggcgccgccgtgtgggccgccatccagctggcgaagcggccggagaacaagggcaagaccatcgtagccctgctgcccgacaccggcgaccgctatctctccaccccgctgtttgcggactgaggagatcacaagaacataagcacgggagactgcctttgacgggcagtctcccgtgcgctgatcggtcaaacgattctggaaatgcagtccagcaaggtcatggagtaagtggggcaaagtattcaacttcttgctgtacggaaattgaattttagaaaggatgccgagctttgcggaatggataaagtttggacgctttagacccgcttcacattctcaacgatcaaaaatcttacagcaaaggagacacagactatgcagaagctctctgaacgaactgccagctttaccgactctgtcatccgccggatgacgcggatatctcttcaatatgacgcggtgaacctgtcccagggctttccggattttgaaccgcccaaggagatccttgaccgtctggcgcaggtggcccacgaggactatcaccagtattccatcacctggggcgcgcaggctttccgagaggcgctggccgccaagcagtcccattacatgggccgtaccatcgaccccaacagcgagatcgtcaccacctgcggcagcacggaggccatgatggctgccatgatgaccgtgacgaatcccggcgacaaggtggtgatcttctccccgttctatgaaaactacggcgcggacaccattctctccggcgcggagcctatctatgtaccgctggtgccgccggatttccactttgatgccaatgtgctggaggacgcctttcgccagcaccccaaggcgctggtgctgtgcaacccctccaacccctgcggcaaggtctttacccgtgcggagctggagaccatcgcggcactggctgccaagtacgatgtgtatgtcatcaccgacgaggtctatgaacacatcgtctacgctccccacaagcacacctattttgccacgctgcccggcatgtgggagcggaccatctcctgctcctccctctccaagacctactccatcaccggctggcgtctggggtacatcattgccccggcggagatcatcgaccgggcgaaaaaggtacacgatttcctgaccgtgggcgcggcggctcccctgcaggaggctgtgatcccgggcctgaaattcgggcaggactactacgacgattttctggccaaatatacccacaagaaggagctgttcctcaaggggctggacgatctgcacatcgtccacaacgatccggagggtgcgtactatgtgctgatggacgtttctgaattcggctacgacagcgatctgaaattctgcgaggatctggcccggctggtgggcgtgggcgccgtgcccggctccagcttcttccgtgagccggtgaaccacctcatccgcttccacttcgccaagaaggatgagacgcttctggaggcactgaaccgtctggaaggcctgcgggcaaaaattccttcccggaaaaagagttaaaaggacaagcctatgatggatctcaaacgggaagccttgaaggaggatacatatattctcatcaaccctgccggccggtttgccatcagcggtccggccggagacaaccgcctcacaggacgaaagatcgttgtcgatacctatggcggcggtgctttttccgggaaggatccgacaaaggcagaccgctccgccgcttatgccgcgggatatgtggcaaaaaatatcgtcgctgcgggagctgacgcgaaaagaaggcatcttcgccggatcttcttccggcacggcattggctgcggccaagaagtttgcgcttgcagccaacaataaaccgccccggcgcagttttatgctgcgccggggcggtttattgcgtgggatgcaaatgcagtttggggatttatgcggggttggtattcacctattatcctgtgggcacttgcgcttatggtcgataaaagcaaaacgctgctttatgttccgcttcccagatccagctcgtaggtacacaggtagaacaggaacgacgtcatctgatagcggctgatgtgggtgtcataggcccccagcagctcgcccagctcgctgtcacgggtggtgatgtcccgctcgtcgcaccacagcatggccttgacgacctcgccgctgagcaggggattttcccgcatggtctgccgcagcagctcctgatccatgctggtgtcgatgtcggccagggcagcgtagcggtagatgatcagacaggccgtctgatagtccatgttgtcgtcataggcggtgtgcaggtcgttccggcggatcagcctcgtctgataggcccagcacacggcgtcgtagtaggggcaggcggaaccgttgaaatcttcgctctcataatccggcggcagggcggtgctgtccgtctccggccgctgggcgatgcggtacagcacatccacaaattcgcccagctttgccgtggcctttccgccgaaggtgtccggcgtctccgggtcgatatacccattgcggtacatatagaggacgctggcctggttgaagattcccgtgatgtccgtaaacaccaccgtatcctccaggctgccgccgctggacgccttgccgaagacgtgggcatagtagtcactgttgacgatgttgctggacatctggaacttattgtccacatagagccggtaggcctccagctgctcgtcggagacagtgatgctctcgtcggcggggatcaccgtctccgtaccggcgtcatatcggaaggccttcgtcaggaaggacttgtccgacagtatcgccatgtggatgccgttggacagcacgtcggcgcccgccagcagccgggaatcgtagtccacgccgaacaggttcagcagcgtgggcaggatgtccgccgtggagcagtattcgtccaccacaatattctcggagaggccgggcacgtagcagatgaagctgttgcggtacttctcgaaggtggtgtccagggtttggcctgccagctcgttatactcctcctccgtcaggccgtaggggtagtggtcgttggtcagcacgatgcaggtcttattggccacgcccgcctgctccagccgctccatcagataggtcagcgcgttctccagctccagattgcaggcgatgtacgccttcaccggctcggagtagggcaggtctcttaccgcgtcccggttcttatcgctcatggcgttgtcccagttgtactggtagtggccgctgaaggtcatgtaataggcgtggaagggctccttgctgctgagatagtcgtccaccgaggcctccatcatctccagatcggaggagggccagtcgatcttcatgtccagcccggagtccgccgccttaaaggtatagcccatgtttgcgtgggtgatgttccggttgtagaaatcgccgatgtagtcgtgatagccccaggtctgatagcccttgtccttcagggcgttgcccaggcagaagggcaggtagttggtgcccgccacgttgaagctggaatccgtcttggtgcgggacatgtcgggatagaggcccatgcacatagtgtactcgccgttggtggtgacggactggaaggtgccgtagtaattatcgaagataatgcccgtgtgggacagcttgtacagggtgggcgtcagctcctcgctgatgaaccaggggcagaagctctcggcgcagatggtgatcaggttgtagtcctgtaaaagcccggtatagctgttcttccgggtggggaccacctgcgccagatattcgtccgtggtcttgcacatggcatcgtccgtggactctgccagcttcgggaagtcgatgctctcgatcacgttataggaattgctgctgtagagctgcctggtggccgtgcccagggaggacggcgtgatggtaaagctgccgccgttgccgaagagcatatagcggagctcctgggccgtggtggccagcatgcccacgtttttgaagctgctgtcggtggaggtgttcacattggtgaagatcttgtacacggagaagggcttgttccgcccggcgtacatgatccccgacgtcaccagcagcagcgtcagcagcacgcccagcgtggccagcgcctgcttccagcccagccgcacccgcagcaccttccgcaaggcgagccccaggatcatcgccgccagcggtaccagcagcagaaggatggccgccagattcttgccgatgccgtacaggatctgggagctgaagttgacgatgacgttctcgcccatgctgacctggctgatgggcatgaagttgccgaagatgccgtgatagaccagctgcacctcggcaaacagcacctgcgccgctacaaggaccgcgcccacgatctgccgcaggatacggggcaggtacgaggtcagcagggaaaagaccacgccgcccagcagggcgaacaggatggggtagacgatccgcttatccagcgagcgatagacgcacaggtgcaggcacagctccacatacacgctggtgcagcagaacagcagcaggctgctgccccacgatttccacaggccgcggcgcagagtctgcgccgtctcagacgcctcataaggcgtctgatggaggttcgatatctcattgggtttggttttcagcatatatgtctcctaccgagagtatccctttaaaaaagagaacgaaatttgtctgaatttagacgcgaggcatatcatactgcatttattgagaaaaagcaatgattcccatgaaaaattcaagaaagatttacagtcgggttttgtcatctcaaaccgaaaatgaacaaaacctgcacaggcacaatacaaaagccgtgctgtacggcgtggaaaatcaggaagagcatcgtttcggggaggtgcttattggctgacgccatccagcgccagcacctgctcataagaatccgcgccggcgatagagccgataggcagcaccacatggagcttccctgtaccatcggcgtatgtacggacgtccctattgatgttctcgtcggacagcgtccagtcgcggcgctccgtcaggaactcgtcggtatcaccgcctgcaatcgctccgtattgactgtcaaactttgcggcagcggctcgacgcacagcctccaggaaagccgcttcatccacatgcattaccttcagcaaatccgctgtggcgagctgctggccggtggcgatgtcatacagatagacgttatagctgtttatatcggcatcccaaccgcaggagacaaccagagacaggatgttttcatactgatatgactcccatgccgcatagaagcaggacaggctaaccttatccgagacattttcaagcacgccattcacgatagggctgtattcatcggagatagccttgttgatggcttctgcaccctgtgtatcggccacgatttgaggtacacggtaggtaaaatggccactgttgcccacgccgtcggtatagtcgaaggcctcattatacagttccgtgatttggggagcttcataagacgtgtcgggcgtttcggcctgattatcattctgtgtgttggtatccaccggatcgggtgtcgtgccgcaagcggccagtgcgaaaagcattgctgcggtcagcagcatggtcaaaaactttttcatgcgaataacctccttccgcttacttccaagagaagcgtcccacaacggcctccgtgtccatcacgcgatcaaagcccatggcggcctctgccgtccggccctgcgggatgctcatggagaaatccgcacagcgatacggtgtcagctccagtcaggacgccatggggtaatgacgaattcttccgtataagcctcccttgctgatcatgctttaagtatagcatgagttctgccccgccgcaacatgtcctgcgatgcgccctgcccagaaacgattatgcgtatgttttctggcgaagaaacacggcaaacagcaacttctgatcaaagaa

SEQ ID NO: 2749 - DNA, 23261 bp, synthetic construct
  source 1..23261: mol_type = other DNA
  misc_feature 1..23261: note = Synthetic
gcggtctttgcaggctgcgcggtgatcttcagacccgtcagcaccggctctgcaccggcctgccacttcaggatgggatagccgtcgttgagacccttggtatccgccgcgaagctgctgcccagctcggaggccagcgccttcagctcgtcggcggtcttggcggtacccagaccggtgatgccgtacttggggctctcgccggagacggtacccgtcagatagaagctgttgacatagtgcgccgccgtcttgtccggggacagaccgcccacataggaggcgttgccgccggtaccgacgaccttgccgacgctgtagcagttggtcagcgtggcgcccgccgtgttgctgaagccggagccgcagatgccgcccagatagcactcattggcggcgctgctgcggatcgtgccggtggcgtagcagtcggtgatgaccgcgccggtggcggtgtagcccgcgatgccgcctgcgtgcttgttgctggtgacgttcacggcgctccagcactgggtaatggatgccttgtcgtacatatagcctgcgatgccgcccgcctgcgcgttgcttctggcggtgcaggtcacgctgccggtgatgcccagccgcgtgacggaggcgccgccctgcagatagccgatcaggcccgcgggatagctggtgctgttgatgtacaggttgcggataacgtgaccctgtccatcgaaggtaccgtagaacttcttcagcggtgtccaatcatagcccgccagctcgatatcggcggtgagcttggcgctgcttttgccgtcggtggcggcgaaccatgccagctccgcagcggtgccgatgagatagacgccgttgtcatccttctggggctcggttttggtcgtgccgtcccagggatcggcgccgacggtctgcatggaggccatgacggtcagaacgccgtcctgtaccttgtccgcatcggcgctgcccagcgagaagctgccgcgctccaccgcgtagccgtccttacgcagggtgtacagataggtgccgtagcccagctggaagcgtccgtccgcaccgggctccatgtccttgccgttgctgtcggtgatggtgacggccacgccgtccagcacgctgcctgcatcatcggagatacgcagcgccacggtaaagaacaccttgcggtagactgtgaccgcagcgtcggcgtagtggttcatgtagtagttgacggtgacagcgttgaagttggtacccacgccggtatccgtcatgccgtacaggaatgcgaaggggttggcagcggaatacatactgccgtaggtgtagccgttggtgaatacgcacgccgccgtgtccgcgccctcggcaaagggcagatcctccggaacggtcacggtgacggaggagttgtccatccgctggtactggcccagcgttccgtcgaacttgctctcaccgttgtgataggtgggcttgaacagggtggggttgaagataccggagatcttgttgacgccgcggaacataccgctgaacgtcagcttcacctgatcgccgggcataatgtcctcacccttgtggctggcgttttccgcggtgatggtgaccttggccacccgcaccagacggtagctgacgccgctctcgtcggtcatccggaggatgacggtgccgcccatgccgttgccggcggtgttgaaggcctccagcggcacgatgtaccggccatcctcaccgacggaggcggtctggaaggcggaaacactggtcaccatggcggcgttggtggcgacgaaggcgtactccaccatgacgctgccggtgttcttcacgacggcaaagcgcagggcgggatcggtctcaccggcctcgtagtaccatgtgtcgtagttgtagtcccactccatggaacgggtggtggtgacgccgggcgccatgttgaagtccacgtccgcgtcggcggtgccgtgggtcacgccggtgccgcccaccacgatcacgcccacgcgctggggctgggtggcgggatacaggccgccgtggctgcccacattctgcgtgccgtcattggggttcgccgtggtgacatccacgctgtcatagtagacggtgatgatggaatccttcgtgccgggggtcacatccgcccagttggcggtggtattgccgccgttgactgtctggatccgggcgtcgccgtctcccatcacgctccagtggaagtcgggctccaccatgatgttgccggcgtcggagttgatgatctgccagtggcggtaggcccggacacgggtggtgccgtccagcacctcaaagccgctgggatccagattcacctgcagatcggcctcgtcgcgggtggcggtggctgtacccagctggctgaagtcgtgggacaggcgatccgtcgcggtgctggcggtaaggttcagctcccgatccgcggtcaagccgctgacccaaccggcgcgggtcacatgaccgggctggctgagacgccaggtgtagttgccgctgctcttggagatgaagtagtcggcggacttggtatcgccgctgatgcgccagccgtcgtcactctccgtcacgcccatgggctccacctccgtggtgttgaagttgttccactggaagtacaggccgaaggcagcgtcggcgggtacggtgacggtaagcttcacgccggtattgatggtcaggcccttggtaccggcgctggagccggcgcggaaggtctggttgatggactgcgtgaagatgtagccatcaatgtcgggataggcataggtattgtacaggcaggcgttgccggccgcgtacagcaccgtgggataataggcgtagttgccccggacatagggcgtacccatgacataggaggtcttcatgatggggcagtccacctgcacatggtactcctccgccgtgaaataggtgttgtccgtcttgcggctgttggtatagaaggagttgcactggaggtagacgttggtgccgccgccggcgccgccgtccacgttgctgtcggtgggcagctccagcgtcataccgcccagctccacatcgtagacgtcggtctccgcgttcttggcaaaggcgcggtaggcgtagcgtccggcggtaaggctggcgtaaaacgtctggtagccgtcgaccagttggccgttggcaggctcataggcctcctgtccctccggcagagtgtcggtgaagctgctgtacaggaagcagtccttcagctcctcgcccagcacctcgctgccctgcgcgtccgtcgttacgctgtacagcttgatgacgggatagccgccggtgtagtccttgctcacatagaatgtgaagttcatgcggggcgcgtcctccacatggagggtcagcgtccaggtgtccttggagaagtgcttcccgtcgtgggaggcgcagaagcgataggtgtagtcgcccgccgccagctcggtaagctggatggtggtagcgccgaatattgcctcagagaagctctgcatggtgccccatgtctgaccgccgtcggtggagcgctggtagtagtaattcttgtagttcagcgtctggccgtccacgggcgcgaagatcttgcccgcctgcaaatcgctgagcagatacgccatgcccgtctggactgtggcctcagaggctgcgggatacccctccttgcgggtaggcacaggggcgtcgctcttgccgcaggtgtcgcacttgccgtcgttgttgccgtccttgtgctccgccgccgtctgccccttcaggacgggtgcagggcagctatcgacataggcgtcgcccagcgccgcggcgctgagaccctccgctgcggtgaaggcagtccccttaacggtgacagtcgcggtggatgcagcgccggtctgcaccgcgctgtccagatagtagcagttgttcgccgtcagggtggttttctcgttgttcgtgacctcgccgaccagcgcacccatgctggcctgatcgtcatactgaccgctgacagtgccggtggcgtagcagttggtcagcgtgatcgtgctggcgtggctgctttcccccgcgagacccacgatgccgccggcggcctgctggatcttctgcgtcttgtaatagaagttgatcgcgccggtgttgtagcagtcggtgatgttgaccgctgcgctggcgttgccgacaatgccgccgacgccgcggaattgatggtgccagccgcgcagcaggatcgcaccggtattccaacagctctcgatggtcgtcgttccatacgaggcgtccgccacgatgccgccggtatagccctgatagccggtgatgtcggcgttattggagcagccgcggatcaccgtgtcctgcgcgctcgccgccacgccggcatgaccgtagatctgatcgttggtgggctcaccggtcagcgtcacatagttgtggcagttctcgatggtgcaggtgcgtttggtggaaatgccacaggcgcggcccacgatacccgccacatagcgggtgacggccttggcctcgccgtacacactgacgttcttgatggccgcgccgtcgcacaggccgaacagcgcggtgtagtagctgctgacgttggcaaggctgcccttgttttccagatacagcccggtgatcttatggttctgtccgtcgaaggtgccgcggtagtcctgattgttggcgcgatcgccgatgggcgtccagggcgttgccgcactgcacacgccgctcaggtcgatgtcggcggtgagacgggcgttcagctcaggcttgccgctgttcacctcgtcggcgaaccacttgagctgtccggcggtggcgatctcgtagtaaccgtcctccgcctgtgcgggcttgttgacatccgtcaccgtcacggtacacttggccatgaacgcgccgtcatccgtggtcacggtgatgagcgccgttccctcggcaacgccggtgaccaggcctttgcggtccaccgtcgccacggcgggtgcgccgcttcgccacgtcaccttctggttggtggcgttcgcaggctccaccgcagccgtcagctgcgccgtggcgttgcggtccaccgtcagctccgaatgactcagcgttacgccggtaaccgccacctcactggcggtgccgccgggcttggtgttgtcacccaccacgaagttgaagcagttgaagtactcgtagttattgtcgttgtcctccgccgcgatgtacaggcccttctccagcaggaacgcggcgggcagcgccagcgtatggctgccgtccccgttctccgttacggtgtactcgtagtcggagccggcgtagtagctccagtccacctcgccgtcggcattgaagagtgcgcagtacgccgcgatgttggtctcgaagtccgccggataggtgacatacacagtctctgtacccttgggaacggtgacggtgtagaccttcttctcgccggggttgctgtagtgcgccacctccatggtgctctccgcgatgtggtagaggtagtccgtcccctccgcgtccagggagacgctggcgaagtcgaaatccttatagtactcgttggggtcgaagggcttcgcgccgccgcccaccgtcactcttgcagtggccggtgcgtagcaggcgtcctccgtaccggcgttgggatccgtcgccagcaggtaataggtaccctccttctcaaacgtataggtgtagctgctgcggtcgccgctgtgcgccgcgacctcgcccacctcccgccagtcggcatcatagaccttcacggtcaggccggtgatgggctcaaagctctccgtgccgccgtccgccacagagcgcgtgtcgtacttctgggtctggacggtcaggctgccgccgggtctgacggcgtagctgtcccgatcgaaggcggcaaaggcgccgctctgccagaagctccagttactgaacatggccacgtcgatggtgtccccgtcagacagcagcatatagtccgccgtggcgccccagccggcgctcatcagcgggtacacatggttgcggtagtacatgaggttctcgtcgtgaccccagaactgctgcatatacatggacgtggcgctgccggtgatgttcagcgccagactgctgtcgtcatacggctgaccgccgttcatgtcggtgacgcccacgccgccgtcgtgacccttgatgatctcgtcaccgttgatgacctgctccggcgtaaggcccagatagtacacacccagcaggtagagatacaggtgcagagcggtggggcgctttaccacctgatcgtccacatagccgccctgtccgttctccgtatggtagcggtagaattcggacatatcctgcttgtccagatcgaagtagggcacgtccagctccagatgggacagcaccgtgccttcgttgcccaccagtgggatgccgtcgtgggaaacggtgacatagacctttacagaggcggcgtccgtctcatcgtagccgtactgggctgcatcgccgtcggccgcctcgttcaccgtaatggtgagctgcacggacgccgcagccttctccgcgcaggtggcggtgatggtgggcgtgtacgtacccgcagtcgggttggtgaaggacaggatggcgctgccgtccttgtcggtggtcaccttggtctgcgtaccgtagtcgccgccatccagcgtgtaggtcagcccatggctgccgctgtcctgaaacagctcgtccagccggacggtcagcaggccgcctgcggccacctcatacgcggtcttggcgccgtccttcacggtcacgcaggctgccgcgccgccggacacatccgacgtggcgaacactgtctgcggtaccagagacaggcacagcaccagactcagcagcatggccaatacacggttggtcatgcttcttttatggttcatgtgatctcctccttatcaggattttctctatctctaacgcatacgcggaaaaaggagtaaggctcccttggccaatacggcggaggtatgtcctttccataaaaagagaggaggcgggagaggctttcgcccctcccgcccttatggaaagcagacggctggaaaaaccgtctcgacttgacttatccatatgcagaaaaaatgccggtccccctccgttccacggagaatgaccagcgggatctgcgacagaaaaagcaccggcgttttcccataggggaaacgtcggcgcacactcctgcctatccatacaccacggagagagcgcccgctgttggcgatcctctgctatgtaagtcttctgactcgcgccgcggagagctctctcctcgttcgtgacctgtcttctcacagacatgacgtctgcaatgacggactttcgtcccagcggctcacgccgcctcggtacgttcttgcgcttacagtgccgttcgcgtggggccttgccccccgttcctttgaagccgccgcctgaccccccatcggagtcgttgcggcaagcggctgcacagcatctttggagcttgtatttaattggccgacggctttcgccgctacatatcattatatgttggcaaaaacaggatgtcaacaaaaatgtgcgctcagtttgtgcaaaaatatttcccggcagcaggcgccccgccgcctcgtgcggcagggcgcttacaatccgctcaatagtcggcgttgagccacggcttttgcccccagtgcagcagccgcgccagctccatggccttctccccgtcgtcggcagaggcggcgcccagccgcagcagcccttccagaccacaggagcccatcagaagcgacgccagatccccctgccggcagtcgacggtcacatccgccgccgcgtccggtacggctactgtccaccgtcccgccgcgaaggaaaggcgcaggcagcgctgttcgcccgccagctcgtcccggtagcggaacgccgccgtcaacgtccccgccgggaacggacgataggcggttttttccacaaagcgctggtcgtccaccagcttgaacatcgtacccacggcggacacgttggtctgcaaaaagccgtagtcgatgtagttctttgacacgtcctgcgggtcgtccagcaggtggtggaagtcctcctcgccggtgcgcaggcacacggtctgcgccagatcctcctgcatccgcaggccgcccagcagcgcccgcagcacgccgccgctctcatagaccagctcctctacgctgagacggttctgggtgtagttgacgtcgctgacgctctcaaagcggtacgccgcgtagccccgcagggtgccgccgtcgtcgtaccagcccatgcgccgcacctgtatatcgtctctggcggcccgcacctcctcgtcgaacttctccaccatgccgtggtttttcgccgcgaagcgtcgctggcattccagcacggcgtcgaaatcctccggctgcaaaagccgcagatgccgccgcgcctcctcatccggcctcggcagcgccgccgtcggcaggcggtattcgtagagcttcccggcgaagccgtagcccatccggcggtagaagtcgatgcggaacggcagcagcagcgtcagcagcgcgccgttttcccgggcatagtcctcaaaataccgcaccatggccagcgccgcgccctttttcttgtggagcggatgcacctccagcgccatcaggccgcaggcaggctgcatatgtccgaagaaattcatggagaacaggatgagcttcatggtgccgatgagcgtatcgttctcgaaaagccccaccgtgcgggtctgcctgtcctcccgcagctccagaaggtgcttctcccggtagtgctgccggcactcggcgtccagcgccttgtacgccggataggcgttcaggtagatatccagataggcctcgatgtcgccctccgtcagaggacggaacgcccacttgcgggcagctgtctcgttgtgcataagccgtactcctttcgccgcatgccgcgtaccacgattataccgccattcccgccgcttggcaacaaaaaagccggtgctggatgggcgtttggcggcatacaatggcactaaaaaactgaaaggggcgcggatgcgatatgaaaaaggtaaaggtattcctgctgcggcgttggtacatggtgggaggcgcggcgctggtgctggcggcggcgatcttctatgtggtgagctatccggcctccgtcagcaccgccgcctccacgcggcagctccctatctattccgtggagcggagccagcgggtgtgttccatcagcttcgacgccgcgtggggcaacgaggacacccagacgctcatcgacattctggagaaattccacgtcaagaccaccttctttgtggtgggcgactgggcggagaagtacccagaatcggtgaaggcgctgcatgacgcaggccacgaggtcatgagccactccaaccaccatgaccatttcaacagcctctctgccgatcagatcgtcgcggacgtcaccgccagcaacgagcgcatcgccgctgccagcggtgtgatgcccacgctgatccgctgcccctacggggagtatgacgaccacgtcatctccgccatccgctccatgggcatggagcccatccagtgggatgtggattccctcgactggaaggattacgacgcggacaccatctgccggcgggtgacctccaaggtgcagccgggcagcatcgtgctgttccacaacgccgccctccacacgccggaggcgctgcccgctatcctcacctacctcatcaacgacggctacaccgtcctccccatctcccagctcatcctccacccgccctacaccatcgaccacaccggccggcagtttccggcggaggaattgtcttaaaaaatgtcaaaatgtacttgtttttccaaaaattcgtgttataatgataatagttcttataccataccaaggactatgcaggttactatgataaggtagtacaccgcagagcactgacgccccgcttttgcggggcgttatctctatccagaaaaaaggagggcgcgttatgatcccctatgcgatcggctttgatatcggcattacatccgtaggttgggcagtcgtggctttggacagtgaggacaagccgtatggcattatcaacatgggttcccgcgttttcgatgccgccgagcagcccaagacaggagcttccttggcagcaccgcggcgagaggccagaagtgcacgccgccggctgcgccgtcaccagcatcggctggagcgtattcaccgcctccttttaacagaaaatgtgatctcccaagcagagctggataccctctttgcaggtaaactggaggacatctatacattgcgcgtcaaggcgctggacgcaccggtttcgcgtaccgaatttgcccgcattctcctgcatattgcacagcggcgcggctttcgctccaaccgcaaagccgaaaccgcgaaggaggacggcgagcttctggccgccgtcagcaaaaaccgggctctcatggccgaaaaaggctaccgcaccgtgggcgaaatgctgctgcaagacccgctgtacgccgcgagcaagcggaataagggcggccagtacatcgcaacggtaggacgggacatggtggcggaggaagtccacgccatcttccgcgcccagcgccagctggggcagccctttgcgtcggaggagctggaatcccggtatctcgacattctcctgagccagcgctccttcgacgaaggccccggcgagggcagtccctatgccggaagccagattgagagaatgatcggcaaatgtacgctggaggacggtgaacagcgcgcggcaaaggcaacctactccttcgagtactttacgctgctgcaaaacatcaaccacctccgcctgctccgcggcggcgagggcagcccgctcacccccgcccagcgggaggctctcattgcgctggctcacaagaccaaagagctgaacttttcccacatccgccgggagttggccattcctgcggacaccaccttcaacgcagtgtattataagaatacggacgatgcggaggaagcggaaaaaaagacgaagttctcctatctcaaggcgtaccaccaaatgcgcacggcctttaacaagctgtcaaaaaaccacttcgacacccttacccgcgcgcaaaagaacgagttgggacgtgtcctttccacctacaagacctccgccaaaatacgcgccgcgctgctgcctgccggactgtcggatgcggagcttgacatcgccgagacactatccttcagcaaattcggccacatttctgtaaaagcctgcgacaagctgatcccctttctggaaaaggggatgaagtacgacgaggcctgcgctgccgccggatacaacttcaaggcccacagcggccgggagcgcacccagcttctccatccgacgccggacgaccttgcggatatcaccagtcccgtcgtgcggcgggcagtggcgcagaccgtcaaggtgctcaacgccatcatccgcgagcgcgggtgcagtcctacctttatcaacctggagctggcgcgggaaatggcgcaggatttcacagagcgcaatcaggcgaaaaagagcatggatgataaccgcgcccgcaacgagcgcctcatggagcgcatccgcacggagtacggcaaggagcatcccacagggcaggatctggtgaagctcaagctctgggaggagcagcacggcgaatgcgcctactcgcagaagcacatttccatcgagcatctctttgagccggactatgcggaggtagaccacatcattccgtacagcatttccttcgatgacggctataagaacaagattctggtgctggctgaggaaaaccgcaataagggcaaccgtctgcccttgcagtatctacagggtaagcggcgggaggacttcatcgtctgggtggagaacaccattcgcagcacgcctaaaaagcagcgcctgctgaaggaaaagctcacatccgaggatgaaaagcaattcaaggagcgcaacctgcaggataccaaggccatggcgcgattcctcctgaactacatcggcgaccatctggcctttgccgactttgccgccgggcgcaagaagcacatcaccgccgttaacggcgccgtgacctcctatatgcgcaagcgctggggcatcagcaagatccgggaaaacggcgatctgcaccacgcagtggacgcactggtcattgcctgcacaacagacggcatgatccagcaggtgagccgctatgccgcgctgcgggagtgcgaatatgtacaaacggagggcggaagcctggccgtttccgtgcataccggcgaggtgctcaagaggttcccctacccatggccggaatttcgccgggagctggaggcccgcttgggcgacgatccccgccgcgccgttatttcccagcgcttccccgtctacctgaacaacgatattcccgtccgcaagttctttgtgtctcgtatgccccggcgcaaggtcacgggcgcggcgcacaaggaaaccatcaaaagtcccaaagccctgcaagacggtgttgtggtcacaaaacggccgctgacaagcttgaagctggacaaaaacggtgagatcgccaactactatatgccgcaaagcgaccgactgctctatgaggcgctgaaagaacaactcatgaaatacggcggcgagggggcaaaggcctttacacagcccttccataagccgaaaagcgacggaacgcccggccccatcgtcaacaaggtcaagctatgtgagcctacgacactgcacgtccctgttctgaagggtaccggcgtggcggacaacgacagcatggtacgcatcgatgtgttttatgtggagggcgaggggtattacttcgtacccatctacatcgccgacacgctgaaaaaggagctgccgagcaaggcgtgtgtagccttcaagccctacgaggattggaaggccatgtcggatgaaagcttcattttctccctgtatcccaacgacctgatgcgcgtgacccacaaaaacaagctgaagctgacaaaggcgcagaaggagagtacgctccccgacacatacgaaaccaagcaggagatgctgtactatatcagtgcaggaatttccgttgcagcaatttcctgccgtacgcacgatgccgcttacgagataaaaagcatgggcatcaagacccttgaaaagctggagaaattcaccgtggatgtgctgggcgagtaccacaaggtagaacgggagccccgcatgaccttcaacagaaagtgaggttttgtcatggcttttcggaacattatcgttgaaagccccgctgtcatctccctgcggagggagcagttgatcatccggaccgacagtgaccactccgtggccattgaggatatttctgcgcttttgctggaaagccgccagaccaccatcacaacagccgcactgtcccgcttgggacagtgcggctgtgccgtttttatctgcgatgaaaagcatctgccctgcgcggtcctggcgccgtatcagcagcacagccgggggttgcccgttgtgcggatgcagatcgccatgacagagccggcaaaaaagcgcctgtggcagagcatcgtcaaggccaagatcttaaatcaggccatctgcctgcatttgaccggccacgcctcacaggcggagaccctccgcgccatggcggagagggttcgttccggcgacagtgaaaatgtggaggcagccgccgcgcagctctatttccccgtgctgtttggggaaggctttacccgcggggaggacaacggcatcaacgcggggctgaactacggctacgcggttttgcgggggtgtatcgcgcgctatttggcggtatatggtttcctcccctcactcggactgcaccaccgcagcacgctgaacgcctttaatctggcggatgatctgatcgagccgttccgcccggtagttgaccttttggcagcgcgcagcataaccgaggacgaggaattgtcttccccacaaaaaaggctcttattcaactgcctgaatctggatattctctccggcaaacagcatcacagtgtgtcctatgccattgagcggctggtgcagagcttaagccgctctgcggaacggcccgaagcaggtcttttgctgccaacgctgctggaaacagagcagcaccgctatgaataagtttatgaggatcatggtgttttttgacctgcctgtcaaaacaaaggcgcagcgcagggaggccacccgcttccgtaatttcttgttggcggacggataccatatgctgcaatactccgtctatgcccgggtctgcaacggcatggatgcggtggaaaagcaccgccagcgcgtaaagcagaatttgccggcgaacggcgcgatccgcctgatggtcatcacggagaagcagtacgaggcgattgatatacttttaggaaaattaacggaggcggatgacaaatttcaatgcgagcagctttcgattttttgaaagaaaagtcgcccaaggcattgccttgagcgacttttccggtagcctattataccataccaagaactaccagggaactacaacccggcgacggaatctatcggcatggacatgaattataccataccaagaactaccagggaactacaacgacttcctccgctatgtctacggttacaccattataccataccaagaactaccagggaactacaacaacaaagttgagcgtgcgtcctgcggagctattataccataccaagaactaccagggaactacaacacagcaatatgtcactggcagcatacaccaattataccataccaagaactaccagggaactacaacccgtcacgttctggcagtcgattgaaaagcattataccataccaagaactaccagggaactacaactgtactgctggggcagcattgccgtcatcaattataccataccaagaactaccagggaactacaacagatcttttaaaacggaaactcgtttttccaattataccataccaagaactaccagggaactacaacgaggtgataaaatgacatataaagacattcattataccataccaagaactaccagggaactacaacggagtagccgatgggtgagaaagtcccggcaattataccataccaagaactaccagggaactacaacgctggctggattacctgtttttcgcttttcattataccataccaagaactaccagggaactacaacttgagaatgtgcaactattatgataaatgcattataccataccaagaactaccagggaactacaacatagccgctatgcagatacagtcccattgtattataccataccaagaactaccagggaactacaacgccgggacacttccgctacaacgacgtggcaattataccataccaagaactaccagggaactacaaccaagttgctgcgcgtactggtggacttgctattataccataccaagaactaccagggaactacaaccataacggaataggtattgacctctacggtattataccataccaagaactaccagggaactacaacattgaatgcgccagcaagaacatcaacgtcaattataccataccaagaactaccagggaactacaacttagtcacagcctccaccgtgctcgcgtaaattataccataccaagaactaccagggaacaacaaccgctgcgatacggcggtgaataacggtatgattataccataccaagaactaccagagaactacaacatggatcgttctgctccgctgcctgccgcaattataccataccaagaactacctgggaactacaacatgccctttccgctcaggaaaagaagcggaattataccctgcaaggatctcacggtcagaactcccgcgctgctgctcggcaatttttgtgttgcttttttcgtccgaagtgggtataatagtatcagaaggttgagcattgctctttccgctttcagcggacggggtaacgtcggcatgtaaagtccgccgggtgctcggcctttcattttgccgttcggcgctgaagctatacacatattcgccatcactccgttccttgacgttgatcgtcacgcggtacggggtgctttcttttgcacaggcgccctacatcacaaaagcgcgtgcgatactcgcacgcgctttctcgtaaacacggaggtctataaccgtacttcgacctccggggaaagttttctcccgctgccgcagccgtggcttcctgatgcccgctacactgaacaggggccgcataaccaataacaaaaagaataacccgcctccctcacaacattgaacacggtgggaggtcgttgcttttcataaaaacggcgcagacagtggaacggaacggtttttactccgccagctcgaaggtatcccgctggttcacggcatccagcgccagctgcgcccgagacaacgcatcagcagtctcttcgtagtccgcctccaccgcggccagatcgtagttggcataggtgtagtcgatgatgttggactgccgcccgtactgctcctccacccgctccttgggcagccgcgccttcatttccgccagcttgttcttccgctgggtgagctgggggatatagaccagcatctcgtcgatggtcatgtggaagtcagggataacgtgggtagcgttgaacacattgatggcgtgctttaccttgcggatacgctgctccagctccgccagccgattctgggtgtcggcatagtcgtaggccgggcgcacggactccacatcctcgcccatggcggcgcggaactccttgctgcgattctcccgatccagcagggcggcgtgctcgtcgtgcagctttttcagcagcttattggcctgtgcagaggtgtatgtcatggtcgttcgtcctttctcttttataaattttcactctcattatacatgattttgcggcgcaagtccagcaaaagacgagtgtatgcccatcgttccgccgtctccaccaaaatgtcgctcccgcgccgttctcccccgcgttctccagaccggacgcggggagctcgatacaaaaaaaccgtgcccggccggagccggacacggaaagaggggtaaaccccatggaaaagacaaattgtgaagcttaaaacggaaaagacaaattgtgcggtttggtgcgccttacttcatctgcaggcggttttcgctatcccagctggtgatgtccagattccggtactgccggcgcagacgggtcagctcctcgttgtcaccgcccagcgcggcaatgcggttcaccacagccagatcggcggcggacatgggtgcgtcgctgtccgtaccacaggcggcgcagtgataggtcttcccatcgtatgctacatcgctgctgccgcagacagcgcagcggatcgttttcgttaccagtgccataattcgttacctccatatatttcaaattttcctgtcgacaatagaatcatagcacaggatttattatttgtaaaacgcattattgtacttgcaactatgagtaaatgtatgatagaataaatcaagaaacgaggtgagcgcatgagcataaccaaatatcagatgttcctgaagacggcggcctgcggcaacttctccaaggcggcgcaggcgctgaacttcacccagtccggtgtcagccacgcggtgcagtcgctggaggaggaactgggcgtcacgctgctgagccgcaatcggggcggcgtagtgctgacagcggatggccgggcgctgctgcctgagatcgaaaagctgtgcgccgcccaccacgcgctgatgcagtcggcagccagtctgcggggcatggacgccggtcttgtcaaggtcgccaccttctccagcgtgtcggcccagtggctgccgtccatcctcaagagcttcggcggacagtaccccagcatcgagtttgacgtggtcaccagcgacttctatgagcaggtggaggagtggatcctgaagggtacggtggactgcggctttctgcgattgccctcggtgaagcgcctgcagacctacgcgctgcaccgggacgagctgcaggtcatcgtcccctgcgaccacccctacgcccatacgagcccctttccggcggaggcgctggcggaggagccgttcatccagctggaggagggcgaggactacgagatccgggcggcctttgacgagatgggcatgcggcccaacgtgaagtacaccgcacgggaggaccgcaccattctggccatggtatccaaggggctgggcatcagcctgctgccggagctgatggtgcgccacagcccctacccggtgacggcctgccgcccgcccatgacgttttaccggaacatcggcatcgcggtaaaggacgagaaggcgctgtccgcctccacccgccgctttgtggagtacgtccgtggctgggtagcggaaaacggcggcaagtaaaacagcatgacgaaaaggccctccggctgcgccggagggccttttgtatcgtttcgaagggttacagccgttgaccgcccagacagatggcgcggcgtgtatttgccaatagcatacgcccttttcaggatgaaatgcaaggaaatcttcgcggctgacgcggccgtctgcgccgcacattagataaaggacatgaacagcagcaatatgatgaggaatccgaaattgaatgcagagaactgccaaatatagctttttgtcttgtccgggttgtggcgcacatactcgcggaatgtgataaggcttgccaacgacgcaatcagtgttccaacgccgccgatatttacgccaaccagcagatccggatagttgtccgtaaactgcgagagcaggatcgccgagggtacgttactgatgcactggcagctcaatgtactgaacagcagcgtattgcgtgcaagaagtgacgagaagaagtttcgtaccacttcgatccgtcccatatttccggcgaagatgaagaaaaatacaaacgtaagcagcagcgggtaatccaccatttttagtgcttttggatccaggaacaacagggcggtagggatcacgatcagaccgacccagtacggtattccgcggaaaacaatgacgattgccagcgtgaacagtagaaggtagacaactgtacgccacggtgtgacctccagacgcttattctccagttccatttcctccggtttcacaaacacaatgcagcataaggtgatcagcgcgacagaaatcgcgaagggcggcagcatgatcgcgacaaattcaccgttgggaatgttgaacttcgtgtacaaaaacagattctgcgggtttccgaacggcgtcagcatgccgcccaaattcgcggcgatattctgcatgataaaggtgaacgccatgtatttttctttttgcgtggaggacagcacaaaataccccagcggcagaaacgtcagcagtgccatatcgtttgcgatcagcatagagccaatgaacgtgatatataccagtatcaatacacacatcctggcgtttttgaactgctgcacgacttttctggccagcatataaaagaagttgatatttttcagcgcacacaccaccgccagcacgcaaaacaggcaggtcaatgttttcaggtcaaaataccccaggtatgtgctgtccacagggacgatgaagctcgtcaccactgccgcaaaaagggcgacaagcataacgacattctttttcgaaaatgccacgaagcttttcactttttcttgagataacagattcattaaatgttgtcctttgcttgaatacgatcctgccggatcttgttgcggatgcaatagtcatagatcgcggaaccttcattgcagtacacgaccaccgtcttttcgcatccgtcaaacagtccccaacccaattccacgaccgagtcaggaatgatgattttttccaaacttgtgcagccccggaaggcgcaatcgtcgatccgctccacgctgtccggaatctccagctcatccagcagtgagcagttgctgaacgcgccttcaccgatctcgcggacactgtcgggaatggtgatgcggttgagcttcttgctctcacaaaacgcccagtcgcaaacgtgcacaacgctgtccgggatgtcatactgtacctctctgctgctggcgggataggcgatcaggatggacttgtttttattgaacagcacatggttgctgccatcacgcttgatgggggcagatttgtagtatttgttcttgctgtccacctgaatagatctgatggcggagcagcctctgaagggggcgtcaccgatattggatactgtagagggaagctgcgcctttaccagcgacgtacagtttttaaaggcggacttgccaatttttctgacgccttcctgcatattgatctcggtaatgctggtacagccgttgaaaaccaagtcgtcgatcttcgttaccgtctccggcagagttatggaggtgagccccacacaatcggcaaacgcactttctcccaaaatggtcaggttcgcgggcagtctgatactcttcaagctgcggcagctgttgaatacaccgccatagatctccgtgatcccatcgggaagctccacctcttccagtgcagaacagttttcaaatgcacgctcaccgatcttgatgcagttattccgtaccaccaaggatttcatgctgacgcagtctctaaaggcgctggtgtgaattttgaccgttttttccggtacatccatttcctccaaattgcggcatcctctgaagctttcctccccgatctcttcaagggtcgacggcaatttgatgtggtgcaggcggatgcgatccttgaacgcaccgtcagcaatgatgcggatcccctcgtcgatctcaatgtccgtgccgttgtcctcgcaccgctcgacgacatcattgttcttggtcaggcgatccattgctgtggcaggcaggtcgcgtaccatcgcccggaccagcttatccagattatctgcggtactgtggtgcgtattcgcaaaaagaagctggaatgccggcggaagctccacgttatcaagataaatggggtacagccgctttccgttttctcgtgcaacaatgatctccatgccgcagaagggcgaggccatggaattttgggatacgaacaccaggatcgcatccgcagcctcgatccgcacacgcaattcgtcgcggaaatcatttccgttttcgcaggattcatcataccagatcctgtatttcttgtcgtacagggcatccaaaacggggtacactctgttggagtctttgtgcgagtaactcacaaacagatagggctccttgtttcccgtctaaattcaagcagtgtcacccccgctatgcgccccgccctcccatatgaaaaaagcaccgtgcagcgcatcaaggccacacggtgcttcttatttacatccgcattcaagtctgctccaggcagttctcatcaaatgccacctccgcaccgcagaggttgtccagcagcgtatcgttgtcgtagaaagcgctctcatggacccgcagagtcatccagtcgcccggcatctccgccagccggatggcggtgccgttgcggataaagcgaccgccgtagatattgctgctccaggagctgctgccattggtgtcgatgcacagcgccacgccgttacggctgaaatcggagcgctgcacccagatccagccgccgtccgccgccagcgcacccacatcccagccggagatctcgcagcgattgagataggtgggtgcctgcgcctttataccggtgccgccgctgccccggagccggcagccctgcagcaccacgtgcatatccaccaccgtattctccggcagccgctccaccgtcaccggcgaggcaaaggtggtaccgtcgtcatgggccaccagcttcacgggacgtcggatggtcagcggctggtcatacgtcaccgccggcagatagatggtcacagccgtctcaaagctgacctccccggtcagcctgtccagcagcgtctgcaaggcctccgtcgtgtccagcgtcgtgtcctcccagctatacgactggacgggctgctcaccgcactccaccacctgccgcagggtgatctcgtcgccgtttttcatatacagcgtccagataatgtcgttataggtgcatttgctggtgacatggtgctcgtgggcgtacagcgccccggcgtcggcgtagttgtctgtggctgcgtccaccacgcaggcgtcgccctcctgtgccacaacctgaatggtatgacgctccaccagcgctgaaaacgccgcgcgcacgtcctcctccctgtcatccgccttcaccacaaacaggcacagcgggctgctgccctcctcaccccggagcagcagctccttccggtggctggcgggcacaccgccgccgtcaggctgcggactgaagcaggcaaatacatggtagagcgtaccgtccgccccgtcgtaccacacctgccccgtgtcctgcttcagcgtcccctccaggctgtccggctgctggggatccggcacaggcgggtcatatccgacggctccgccgccggacagcgcccagatgcccgccaccgccagcagcagtaccaacgccgcacagagccatacccggcggcgcttcctgccgccgttggacggcggcgccactacggaccggcgctccatctggctggccgtgcagcaggggcagaaggaggcctcctccggcagcacggcgccgcatttgatacaatacttctcttttttcacagtgacctcacaaagcgtcccgcagctccagcacatcgcggaaccgctggtcgggattcatcatggtacagcggcggacgatccgccccgcatggccctccgccaaccggcgggaggggtgctgccccgtcagcatcacgttcagcagcacgcccagcgaatagatatccgccctgccgtccgtctgagacataccgaactgctccggcgccgcatatccggtggtacccaggatcaccgtgtcggcgggatgctccggcttgacgatgcgggaggcgtcaaagtcgataagcaccgcgtcgccgcctcggaggatgacgttgctctccttcacgtcccggtgtaccgcgcccatgctgtgcagcacccacagcgccccgcagatgtccgtcgttaccttccgcgcctcgctccagtccagcacgccgccctccagcaggtacagcagcgtgtcgccctgcacgtactcctccagcaccgccacgcg

SEQ ID NO: 2750 - DNA, 23243 bp, synthetic construct
  misc_feature 1..23243: note = Synthetic
  source 1..23243: mol_type = other DNA
gcatggctccgtcgaatatctccttcggacggactatgagcttttccgcatcgatggccgtgcggaaatagccgccatccccatcggcaaagcgctcgcggatattctccgcaagctcctcagctttcaggatatacgcagggtcaaagtccgccgagtacagctccagcaggccgagagcatagaaagcataatcgtcaagctgcgcggcgtatttaagctcgccctcgcacagccgcgccatgagcgcgccgccctcgtgcagggacgcctccatgaacttcgccagttcctccgcctccatgagatagcgccggtcagaaaacgcccttgccgcgcgggagagggccatgagcatgagcccgttccacgcggtgagtatcttcgtgtccgtgccgagcgtcatacgctcctcgcggtatatgcgcaggcgctcgcagaagccgtcatagccctccgggagaaatgcccagcgggtgttcagcagcaggttcggaatgctcttcccgtggaaatttcccttgggcgtgatatcgtagcactcgcagaagtgcccgccctcgtcgtcgagaacctgctttacctcgtcaggcgtgaagagatagtacgcgccctcgtctccgccgctgtcggcatcctgcccgcagaagaagccgccgtccgtagccttgagctcgcgcaggcagtaatcgagcgtgtcctcggcaacggtgcgccacagcgccatgtgcccgtcctgccacgcctcggtgtaggccagcgcaagcagggcgttgtcatagagcgtcttttcaaaatgcggggcaagccactcgcggtcagtggagtagcgggcaaagcccccgccgatgtggtcataaatgccgcccttatacatctgccgcagcgtgttctcgaccatctgccgcggctttttttcgtttttaagctgcgcataccccatgaggaaaatgaggttatgcgcggatgggaacttcggcgctgtgccgaagccgccgtactcctcatcgtaggactcctcaagctgcgtctccgccgcctttgcgagcgcggaaaactccaccgctgccgacggtgcggtcttctgccgcagccacgcggtgagctccccggcggtcttcgtcagctcttttctgctgccgcgccacttatccgcgacggtcagcagcagctctcgcaaacccatgcgcccgccgctgctctcgcgcgggagatatgttccaacaaaaaacggctgctgctccggcgtcattataacggtcagcggccagccgccgctgccgttgagcgcggtgcagaccttcatatacacgctgtcgatatccggccgctcctcgcggtcgaccttgacagggacataataatggtttagaatttcggcaagtgccttgttctcaaatgactcccgcgccatcacatggcaccagtggcaggtggagtagcctatgctgagaaacacgggcttatcttcgcggcgcgctttctcaaacgccgcctcaccccacggcagccaatccaccgggttttgtgcgtgctgcttcagatacggggatctttcatttatcaaagcgttgctcataccgcagcctccagttcgtttttatgtattataacaccgcagcgggcgattactcaagccctgcgctatcactgcaaaggagtattcattatggaacttcacaccggaataacaggcgttgacgaagtcgaggtcaccccggcaaacactgccgagaccgtcgggagcgggacactccccgtgttcgcgacgccttccatgctcgcgtcgatggaaaaggccgcgtatacatcggtgcagccctttcttgacgagggctgcggcacggtcggcattctgctgaacgctgagcatctagccgcctcgcccatcgggatgcacgtgcgcaccgagagcgagcttacggaaatagacgggcgcgtcctcacgttctccgtccgctcctacgccggcggtgagcttatcggaaagggcatacacaagcgctgcataataaattccgagcgcttcttggcaaaggctctctcaaagctcgataacaagtaaaatgaagctcctcccggatcatacagtccgagaggagctttttcctgcatcgccattattctgctcgctctgcctgagcagacgcagatattttgctccgtacagcagcaggcacaggcctatgagcgcagcgcacagggcgatcccgccgttcataagcgcgcccggcatatccggccagaacagcaccccggccatgacgatatatatcaccgcggtgcagagctttccgtaccagcgcgcagagtacacctttcctgtgcactgcagcacgcgcgccccgagcgccgcaaggctcagctcgcggacgatatgcagccctatcagcagccacgcggcctttgtgcgcgtcgcggcacagagcatcatggcgatttggatgagcttatccgccgccgggtcgagcgccttgccgagatcggtcaccatattgaagcggcgggcgatcgcgccgtcaagcacgtcggacacggcgcacagaagcagcacgcccattgcctgccagagcgcacctctgacatacagcaccgcaaaaaccggcgtcagcagtattctgaccatgcttatcatgttaggtatgttcatgctctcagccccccgttcaagttttccctctcctcgtatatcttatgcacaggtaaaggccgcgttccgccgatccccaaaatttgcgctttactcttgaaaacagagcgcattttgcatataatagaaaagattttaactgtttatttttgggagagagcaatgaagattctcagaaaagcaattgccgcggccgcggtgctgaccctgtgcctgtcgctcggtctttccgccctcgccgatgatggcgatgacgcgctgtacgccgggaaaacctgggaacaggtagtcgatcaggtgctcgaggagtgcgatgtgtcgcgcgaccagatcaccgccgggtactgcaacctcgtcactggggaggagcactacataaacggcgatgaatacaagaccgccgccagtatgtacaagctccctctcaatatgtatttcaccgaccttatccagagcggccagcttgattgggacagctactatccgaacgtcacctacgaatatgtgcgtgacgcatccctcatctactcggataacgactggtcgatgtttctctggagcagcagcgtcgtcggcgggtactccaagttccgtgagcttaccgcgccctatatgggcgttgacctgaacgacgtgccggacaattattatactgacaatatctataccgcccgtcagttcatcagctgcctgaagctgctgtatgatgagcaggagcgcttcccaggcatcatcgagactttgcagcagaccgagcaggagcgcttcttcatgctgcatgagccgcgcttcaagattgcccacaagtacgggtacgtttccgaaaacggccattcatttatgaacgactgcggccttgccttcacctcccagcctatcgcgctggtgatgttcaccgataacgtcgaaaacgccgaggagctgctgacagcatactgcaccgccgtgtgcgagtacacgaactacaccgtcgcgaacccgcccggcacgccttctcccgaaccgacggctgagcccacgcctaccgtgcccgccgtcgccgcttcggccggtcccgctcccacggcggccgctcaggaggctgagactgccagggccgcgactccgcttgccgccctcctgttcatcgcccttttcatcgcagcgggcgtcctcggggcggtaaagctcaagaagaaatataacgccgacatgaagctcacgctgctcacggtgctgctgtgtacagccgggatgctccttgccgtcgcgggctgcttcggcggcacggtcatcgcaaagcccacgggcgatccgcaggaggccgtcacggtgttcttcgattcgctcatcgcaggggactataccgcggcctatgaccgggtgcgcgattatacgagccttggccttgagaacgagccgagcaccgagtccgggaaaatggtgtatgccgccctgcacgccagctacggctatgagcttaccggcagcgtcaggaccgacaagctcgacgcggcgcaggatgtcagcttcacctatctctcgctccccgcgcttgaagccgctgtcgccgaggagacgcaggttcagctcaagcaccttgtgcagcagctcccgtcaagcgaggtctatgacgataacaacaactatctgcccgagatcaccgagcgcgcctatcttcaggctctcgaaaagatcctcgaaaacgccgcggactattacaccacagaggaaatttcgctcgccctcaactatacggacggcagatggcagctcataatgaacacttccctgctcaaagccctcaacggcggagcgggttactgaaaggaggggcacgcatgaacgacgatttcgacagcatgaacgatcttgattcgatactcgcggaatttggcggctctgcccctcaggaggaagcccctgctgctcccacagccgcggaggagctcccgccgcagccggtcgtcgagcctgaagtgcaggaggagaaggcggatgggaacactcacctctggcggagccgggatctgaccgcagccgcgcgtccggtgaggaagccgatgccgatgcgcgctcccgtgagcgccgcgcccgccccggagaagcggaatgacgcgccgcgcgcggggatcatcacgctgctcttcggtctgctcgcggcgcttatactgctgtgggcgctcttcaacatccaccccgcctcaggcacgctctcgaatgcctccggcagcagcagtctcagcctgtccgacaagctggacgtatatgtcaacaacgccgcaagcgacgcactcggcgagcttgcgtacataaagaagatatacaccctgcaggagaacgacacagtctctcccgttccgaacccggcaaacttcggcacaacaaatgaccccgccgatatccgcgaggtcataaagaacgccgccgacctgctcgacggacagtccgtcatcttcgatgagaacgcagacttcgtccccggcgaaccgatccggtactaccttgatgacaccatactcgtcatcacatggaaggaatacatcaaccagcgctgctgcacctgcgctgaggtcaaggtcgcgcacggctctcagctgcggcgcaaacttgccgaggacagctacagctccagcgtccagctctacgcctcggatatggcaaagcaggcgaacgccgtcgtcgcgataaacggcgacttctacgccttccgagatctcggcatcaccgtgtaccagcgtacgctctaccgcaacagccccgccaaggtcgactcctgcttcttcacctccaccggcgacatgctcttcacccgcgcgggcgaactcaccggcgagggcgagacgcagaaattcattgaggataacgacgttgtctttgctatcgccttcggccccgtgctcgttgacaacggcgagctgcagtactgcgagcgctaccccatcggcgagatagacaccgagtattcccgctcctgcattggtatgtccgacgagctgcactacttcctcatgaccatcaatcacacgaccgacgcgcgtccccgcgcgaccatcaacgagcttgcacgctttgtctattccaagggtgtgcagaaggcctataaccttgacggcggccagacctcggagatcatcatgaacggcgagccgataaaccacatcgacttcggcttcgagcgcaccgtcagcgacatcatctattttgccaccgcgatcccgaatgaggaggcgagcaaatgaatcccatagccatatacagcggctccacagtcctgtactggagttcggtaataatagtcttcgggctgctcgcgagccttgtcctctcgctgtccttacagcgcgtgaacggcggcggcagcaccgcgatgcttctcttctttccgcttgcaattatcctctccgtgcctatctgccgcgtgatacactggtactgccactttgagcagtataacggcatctggggcgcgctgacggattactccaccggcagctactgcctgcccggcgcgctgctcggcgtgtggcttgccgcgcttattgtgaagaagcttggctttgagcgcagcattgcccgtctgctggacgctttcgccccgggggcggctctcgcggtcgcattcatccgcctgagcgcgctcttcaacagctcctgccgcagcaagatcgccgtaacgacgcccgcgctccagcacctgcccatcgcttccggcgtcacgaattccacaggcgccgttgaataccgcttcgcgaccttctttgtggagtttctgcttatgctcatcgcggcggcagtcctgcttgagttcttctatcgctgccgcaaacgtccgatgaagcgcggcagcagcgacgggaacaccgcaaggtacttcctgctgctttacagcgcgatagagctgctgctggacagcacccgcaacgactccagctttatgaagttcaacggctttgtcagcatcgtacagatgatctgtgcgatatgcatcggcgcactgctcatttattacagccgccggagcgtaaaggccaacggcctcggcgcaaggcgctgggtcatatgggcagtctggttcatcggccttgccgggacgggcgtgtccgaatacctcgtccagcggcacggcaactggtacctcggctgctacgcggccatgacggtatgctgcgcgctgatggccgtagcggtataccggatgtacctgagctgctgcgacgaagcagcgatcggcgttttagaatgacgccgcagttcgggctattcgagatggcaaaagcgcccgcatgccaaggtatgcaggcgcttttctatacgatggagcgcaagaaatgagacggccgaagccgtctcatttttaataattatcagtcggtcacgtaaggcaggagagcaatctgacgtgctctctttatagcctcggtgagctcacgctggtgcattgcgcaaacaccggtagtgcggcgcggcaggatcttgctgcgctcggacacgaagcggcggagctttgcggtgtccttgtaatcgataaaggtggccttatcaacacagaactggcacacttttctgcgcttgcggttcttgggattgttcttatcgaaagccaaagctgtatcctcctatcaaaattttagaacggcagctcgccgtcgccgtcatccagctccgaaaaggcggaagcagcgggagcgctgctctttccggcagagccggaattgccatagctgctgtatgaactgctgcggctgtcaccgctgtcgccgtcgcggcggcggctttccccgaagtacatattgtcaacaacgacctccgcgctgcggcgcttgccgccatcgcgatcggtccagtcacggatctggagacggccggaaacaacggccatgctgcccttcgtgaaatacttgctgacgaactccgcggtctgacgccaagcgacacagtcgatgaaatcggtctgcttttctccgccgtcacggctgccgaaatcacggtcgaccgcgagggtgaaggacgctaccggcgtctgggactgggtgtatctgagctcaggatctctggtcagacgccccataatggtgatatggttcagcataattatcgctccttactctgcacgcagggtaatcaggcgacgcagaatgccgtcggtaataccgagtatacgatccagctcggcggggaactcgggagcgctggtgaacttcatcagcacatagtagccctcggaaatgtagttgatctcgtaagcgagcttgcgcttacccatctcctccatctcttcaagagtaccattcgcttccacaagtgccttgaacttctcaacaacagcggcagtctcctcctcgctgaggttggggttgatgatgtacatcacttcgtacttttcgcttgcttttgccatggttgcacctccttctggtctgttggcccccgttcagacgggagcaaggatcgcccgtctccatggacaggctatattattatagctgtttttctttatttgtcaagggttttcggcacattcagggccgaaaaaagtatcccgcaccggtggtgcgggatactttttatactgcgcgtctgcttattcgccatcgtcggtataggtgcagaccttgccgacgttgagtatcatgtttgggtcaaagacctgcttgatctgagccatgagaccgaaggcgacatcgccgacggattccttgaggtactccttctttgcgtggccgatggcgtgctcgccggagacctgaccttcaaactcagtgcacttggcatagcacttgtccatgatgaccttgaccttgggaatgaactcctcccgcgtcatggtgttggagcagcagtagatatgcaggttgccgtcgcccgcgtggccgaaattgcggatccttatcccctgctccgcgccgacctcgcggacatatacgagaaactccgtgatcctgtcgacagggacaacgacgtccatctcgtcaagaagcttggtgtcggcctcgatcgcggtcaggaacgagctgcgcgctgcccatacttccttcttcagcgacggggtatcaacgacgagaacgtccatcgcgccgaccttctcggcgacctctccgagcttttccatcttgaggtaaagctcgtcctcgccgttgccgacgagcgtgacgaggatgcatgcgccgacggccttgccgcccacctcggtggggaagatggcgttgccggtgaacgcggcagagcttttgacgatgtccgcgtccatgaactcaatggactgaggatcgaggttcgcaagctttatagatggcacagacgcgatggcgtcggcaagctcggcaaatggcaggatcagggacacatcgcaggcgggcgcggggatgagcttgagcgtaagctcggtgatgatgccgagagtaccctcggagccgcatatcaggtgcagcaggctgtagccggagctggtcttgcagacggtcttgccgagcttcattatctcgccgctcgggaggacaacggtcatcgccatgacatagtcgcgcgtgacgccgtacttgacagcgcgcataccgccggcgttagtgctgacgttgcctccgaccgttgcggtcttctcgccgggatcagggggatagaacaggccgtgagcctgagcatccgctgcgagattgcagagccttacgccgacctgagtatgaacgcagaggttcttcatatcgtagccgaggatcttgttcatgcgcgccgtgcagataattacgccgccgttcagtgcgaccgcgccgccgacaaggccagtgcccgcgccgcgcggagtgacggggatgaggttctcattgcagagcttcatgatcgccgcgacctcttcggtgctctccacctcgcataccgcttcggggaagcgcttgccgtagatgggcatttcatcgtggcagtagtcctcggggatgctgccgtcaaaatagaatctgtcctcaccgactatcgccttgagcttttcggcgagctcagcggtgatcttgttgtatttcgccatgcttttatctccttaaagtatttttatccttacgcaaatcccggcggccgggacgcggtctgtactgttattcatgcaccattcactgcctgtcagcataccataaagccgtttttaaggcaagtggtaattgggatggacagactatgtttcccacaaacgacagatatctgcaaaaacagcattgactttttcttttcgtcacattataataaaggtggtatttaccataccaagaactgcgcaggttactatgataaggtcttagtaccgcagagctctgacgccccgtttctgcggggcgtcatctttttatatagaaaaatacaaataaaataggaggctccgcaatgctttcatacgggatcggtcttgacataggcatagcatctgtcggctgggctgtagtcgcgcttgataacaatgaattgccctacggaataataaatatggggtcacgcatattcgatgctgccgagaaccccaaagacggcgcctcccttgcgctgccaagacgggaggcgcgcagcatgcgccgcaggctgcgccgtcacaggcaccggaacgagcgtatacgtgccatgctcgtcaggcgcggtattctgacgcagggcagccttgacactctttttgacgggcagctcgaggatatatacgcgctgcgcgtccgtgccctggatcaaagcgtaacggcggaggaatttgcgcggatactgatacacctttcccagcgcagaggcttccgttcaaaccgcaaagccgaagcgtcaaaagaggacggggagcttttatccgcggtgagcaaaaatgctgagcggatgcgtgaaaacggttaccgcaccgctgctgaaatgttcatgaaatcggaggaatactcagagcataagcgcaacaagggaaacagctatatttcaacagtcagccgcggcatggtcgaagcagaagcaaagatgatctttgccgcgcagcggtcatttggcatgtcctttgcctcggaggaaacagagggagagtatctcagcattcttctgagtcagcgctcctttgacgaaggtcccggcggcgacagtccatacggcggcaatcagatcgaaaagatgataggtaaatgcacgctcgagcctgacgagctgcgggcggcaaaggccagttattcgtttgaatacttcaatctgctgacgcggataaataatatccgtatagtggaaggcggagcgtctgtcccgctcgacaacgcgcagcgggcgctgatcgttgagcttgcgcacaagaccgaagctttggattttgccaaactgcgcaaagcgcttgagctctcgccgtcacagaccttcaaccttgtgtattatcgcgcggacgaaacgcaggaagcatcggagcgcaagcagaaattcagcttcctgagagcatatcacgagctgcgccgcgcttttgacaaactctccaagggctatataaacggcatgagccgcgaaaagcgcaatgcaatcgcttacgcgctgacagcatataaaacggaaaagtcgatacgcacggggctcgaaaatgccgggctgacagaggatgagctaaacactgcgctcacaataggcagcttctcaaagttcggtcatctctccgtaaaggcctgtgacaagcttatcccttatcttgaacagggcatgaagtataacgacgcatgcgccgcggcggggtacaacttcaaggctcacgacggtgaaaaaaggtcgcgactcctgcacatcacgtctgatgacatggaaccgataacgagcccggtcgttcgccgcgcggtatcgcagacggtgaaggtcatcaacgcgatcatccgcgagcgtggatgcagtcccacattcgtcaacatcgagctcgcgcgtgaaatggcaaaggatttccaggaacgcggcagactcaaaaaggaaatggacgcgaacgcctcgcagaacgagcgcgttatggagcagataagggagctgggcaaaactcagcccacagggcaggatctgctgaaatatcttctctggcaggaacaggacggacgctgcgcctattcgctgaagtcaataccgattgaaaacctgttcgacgatggctatgcggaaatcgaccacatcataccctacagcataagctttgacgacagccgcagaaacaaggtgcttgtcctctcaaaggagaaccgcgaaaaaagcaaccgcctgccgctgcaatatctgagcggtaaacggcgcgatgacttcaccgtatgggtcaacacagccgtgagggatcagaagaagcgcagaaatctgctcaaagaagagataagcgacgtggaccgcggcaagttcattgagaggaaccttcaggatacaaagacaatgtcaagcttcctcatgaattatctgaacgataatctggaatttgcgccgtcggataagcgcaggaaaagagtgaccgcggtaaacggagctgtcacgtcatacctgcgcaagcgctggggcatcaggaagctccgcgcgaacggcgatacccaccatgcagtcgacgcgctcgtcatcgcctgcacgacggacagtctgatccagcgcgtcagcagatacagcaggtggcacgaaagcagcaccgttgaggtcgaccccgagaccggcgaggtgatcgaccgcttcccgtacccttggccgcagttccgcaaggagcttgaaggccgcttgacaagcgacccgatgaaaaatctccgtgagctgaacctgccgctttacggcgattctgaagtgccgctgcggccgctgtttgtctcgcgcatgccgaggagaaaggtcacgggcgcggcgcacaaggaaacgatcaaaagccccgccgccctcgatgacggcttcctcgtcgtcaagaagccgcttaccgaactgaagctcgataaggacggcgagatctcgaactactatatgccgcagagcgaccgcctgctgtatgaggcgctgaagcggcagctcagcgctcacggcggagacgggaaaaaggcattcaccgagcctttccataagccgaagagtgacggtacgcccggcccggtcgtcaacaaggtgaagatatgcgagccgagcacaatgtctgtcccgatccttggcggcagcggcgcggcggataacgacagtatggtgagagtagacgtgttccgcgtcgagggagagggctactactttgtccccatctacgtcgccgatacgctgaagcctgagctgccgaacagggcgtgcgttgcattcaagccatatgaccaatggaaagtgatggatgacagtaatttcattttctcgctctatccgaatgacctgttcaaagcgacgagccgaaagacgctcaccctgaagctttcccagccggacagcacactgccgccggaatactgtgtgaagtcagagcttctgtacttcaagggagcggacatcagctctgcaagctttgccgcaatcaaccacgacaacagctacaaagcacgtggaattgggataaagactcttgagaacttagaaaaatacaccgtggatgttctcggtacataccacgccgtagggaaggaaaccagacagccgttttacaaaaagagaggttgaacatggcatttcggaacattattgtcgaaaatcctgcgcatatctccgtgaagaacagccagcttgtgatccgtaccgataccgaacacagcgccgcgcttgaggatatctctgcgctgctgcttgaaaaccggcaggcaacgataacaacagccgcactctccgctcttggagagtgcggctgctgcgtttttacctgcgacgaaaagcatttaccctgtacagtgctcgccccattcatgcagcacagccgtcaggccgccgtcatcgaaaagcagcttgcggcgggtgaaccgctgaaaaagcggatgtggcaggccatagtcaaggcaaagatcaccaatcaggcactttgcctgaaatactgcgggaatgagcatgactgccagaccttgaaagcaatggcggagcgcgtccgttccggagacgtcgggaacgtggaagccgctgcggcgcgcttttatttccccgttctcttcggggaaggcttcacgcgggggaacgactgtatatacaatgccgcgctcaattacggctatgccatcatcaggggcagcatcgcccgctctctggcagtgcatggtctgctgcctgtcttcggaatacaccatgaaagctcgatgaacgcatttaaccttgccgatgacctgatagagcctttccggccgctgattgatcttcttgtattctcctctttccgccccgaggatgagcttggtcccgataaaaagcgtctgcttttcggtgcgctgaatctggacattctttccgattcccagcatcacagcaccgcatacgcgatagacaggctcgtgcagagtctgctgcgttcactggatgaaaagcagccccggcttctcctcccggagctgcttgcgcttgaacagcaccggtatgaataagtttatgagaatgatcgtattttttgatctgcctgtgcagacaaagacgcagcggagagaggccacaaaattcagaaactttctgctcaaggacggttatcatatgctgcaatactccgtatacgcccgcgtatgcaacgggactgacgccgtggacaagcaccgtgagcgcctgcgcgaccgtctgccgaaaaacggggctatccgtatgctcgtcattaccgagaagcagtacgagagtatcgaaatcctgctgggcgagctcacacctgcggacgaacctttcgagagcgaggtcctcagcgttttttgaaaaatcggaatttctgcatttttgccgcggcggcgcagactttttataaaaaaggagccctgaaaccattgatttcagggctccttttccgcagtcagttttaccataccaagaactgctagggaactacaacgccttgctatctatgcttacaaatgcggtggttttaccataccaagaactgctagggaactacaacaatttgtcaagtcaattgctgatgagatacgttttaccataccaagaactgctagggaactacaacttcttccgtaactgggagcaagtatatttcgttttaccataccaagaactgctagggaactacaacgaacatttacgctgcgtacatatacggggagttttaccataccaagaactgctagggaactacaacatgccgagaaagcccccgttatcattgcaagttttaccataccaagaactgctagggaactacaacccatgcagactcagtattttcgccgcaaaagttttaccataccaagaactgctagggaactacaaccctgacatatgaccccgttaatattcctgtgttttaccataccaagaactgctagggaactacaactttaagacttttagccgtgcggatgttatagttttaccataccaagaactgctagggaactacaactctcagaaataagccgtactaatcccacgagttttaccataccaagaactgctagggaactacaacctgcggccgcatttcagaagtgacgattgagttttaccataccaagaactgctagggaactacaactaggtatctgatattcagtagtcggagcccgttttaccataccaagaactgctagggaactacaaccgacatcaataaatggttcgccaccatcgggttttaccataccaagaactgctagggaactacaactgatgttttaccgtagtctctacgctatcagttttaccataccaagaactgctagggaactacaacgatcgcgttcttacgctcttctatcgtcatgttttaccataccaagaactgcaaagagactacaacaatgggttaactgacatcagcctgctacgttcattcttcaatgacctcaagctcggattccacacaatcatatagtttccagctatcatcttcaccgaagccgccgggtgttccctcttcgtcggactcaactataaaccactctgtgccctctattgtgtgaatgtcaaccactatgccggtgatgccagtctcttttattctcacgtgcgcgaaccaatctatcatacttcacacaccctttttataagcagtatacactatcgctttctttttggcaatacataccgccgcactgggcggcaaatcctcccgccgcggctattgacacggcgcgaaaacctgctataatatcacagtacaattgaacaccttatcaagagcggtggagggaacggccctgtgaagcccggcaacctgcgtatgcaaggtgccaaatccggcggtgatacgaaagatgaggcttttatgcagactttatgctccgtcggttgacggagcttttttactgcccttgacccaaagttctgtaaaaatacaaaggaggaaatataaatgagccattactttttcacatccgaatccgtgaccgaggggcatcccgataagatatgcgaccagatctccgacgccgtgctcgacgccatccttgagaaggacccgcaggggcgcgtcgcctgcgagaccaccgtctccaccggccttgtccatatcatgggcgagataagcaccgagtgctatgtcgacattccccgcatcgcgcgcgaggtcatccgcgatatcggctacgaccgcgcaaaatacggctttgactgcgacacctgcggcatcatcacgaacatcgacgagcagtccggcgatatcgccatgggcgttgacaagtcccttgagaacaaaaacggcgaatatgacgagctccagaacggtgccggcgaccagggcatgatgttcggctacgcctgcgacgagaccccggagctcatgccgatggctatctctctgtcccacaagctcgcaaagaagctcaccgccgtcaggaaatccggcgctctcacctatctcagacccgacggcaagacccaggtcaccgttgagtatgacgagcagcgccgccccgtcagagtcgacaccgtcgttatctccacgcagcactcccccgaggtctctctcgagcagatcagagccgacatgatcgaaaaggtcatcaagaccaccgttcccgcggagcttctggacgagaacaccaagtaccttgtcaatcccaccggccgctttgtcatcggcgggcctcagggcgactccggtctcaccgggcgcaagatcatcgtcgacacctacggcggcagcgctccccacggcggcggcgctttctccggcaaggaccccacgaaggtcgaccgcagcgcagcctacgccgcgcgctacgcggcaaagaacgtcgtcgcggctggccttgcgaagcgctgccagatagagcttgcctacgcgataggcgtggcggctcccgtgtccgtcctcgttgagaccttcggcaccggcacggtctccgacgccgtcctgtccgaagcggtgcagaaagtgttcgacctgcgcccgagcgccatcatccgcgatctcgacctgcgccgtcctatctaccgcaagctcgccgcctacggccacatggggcgtgaggacctcggcgtgagctgggaaaagaccgaccgtgttcaggctctgctcgacgcggtgaagtaaataacagcacgaccccggaggaagccaagctttctccggggtttttgtttccctctttatctcttctttttcggcgggagatccggcggcgcttcaaagcgcaccggtgtctgcgtgaatacctcgtcgagcggtgcggtgaggataaagtcccttttctcgtcgcggctcagcccctcaggcataacggcggcggcaagcctcacgctcttcccgctctcgcggtcatagaagttgaacgccgcctcgtcactgtcgcgcacttcaagacgcccgttcccgaccgtcgttccgaaaacgacctgtattccgtcgaggtagcaggcgcggctctcggagatgcagtacagatttgttttctttttctccgggctcaggatatccagcgccgcagccgcggctctgacccctatggcaaggccggggcagtaatgcccgtgcagctcgcccgctttttcatacagctcttttatcatgttctctctcctgttctccagtatatccacgccaccttcgtgtttatttcgtcgtttacattgccgtcggcatcgcatatatctttgagccgctccagcgcggcggcgcacagcgcatctgcgttcagctcatccgcaaagtaattgcggcgcatatactctgccatcccctccgcaccgcgcttatccgaccaattgtaatcgacatacttcacctgaggcacatagcccgcgtctgtcactgcctgaataagtgcggcacagtcggctttcagatcaccggtatgctttgggcgcggctcaatacctatctctttcatcagcgcgtcacggagcggctgacgccactcatagaaattcgccgtaaagcaccatgagcgtgtcatgcggctcatttttttgacggtggctgcatcgtgtattgcaggcgacatagtggatatcgcaaggtcaaagccctccgcgaacgcctcctccctaccgctgatctcattgaaatcgcagcagactgcgtgccacggggtcttgtacggtgccatgttctcgcacgcgtgagcaatcatgttttcggaaatgtcagtcagcgtcacgtcgcagccgagcccggcgagatacgcaccgtacttgccgacgccgcagccaatgtctatcacgcggcagcccggcgtgagcatcccgttttcctgccagaagcgcagcagcgctgaattgtagtcgttcagtccaaggcggaatacgctctggtattcgggtgcagcctcgtcccatttcgcgcgttcatccttcattgtctgcaccccaatcatcctcgtgcatcacgactaccggcaggccgtgtacggtctcaacataagcatgcataccgtacaccgggaagatgttgtcatctgacagcacctctctaccgccatatctgaacacactgccatccttcatgagcaggaatttatcgcagaagcgcatggcaagactcaggtcatgtatgaccacgagcacggttatcccgcgctcatcggctaccgtgcgcacaagcttcatcatctcatgctggtttctcggatcaagattgctcgtcggctcatcaagcacgagcaccttaggctcctgcacaagagctcgggcgagcatgaccttctgcagctcacctccggacagctcgtccacaggccgcagacgcagttcggcaaggccgacgcgctcgatgaccctgtcgcagatgctcacgtcctcgtcgcccaccgaccattttatgtatggcttgcggccaagcaggacgcagtcaaacaccgtggcctgcgtcagttcgtttttctgcgcgacataggcgatgttccgggcaagcttcctgcgcccgaactgcgcgatgtcctcgccgtcgagcaggacagtgcccgagcccggcgtatttatgcggttgatgcacgtgacaagcgtgctcttgcccgcgccgttattgccgaggatacccaccagttcaccgttttctgccgaaaagctgacgccgcgcagtatctctctttctccgtatgaaaaactcaggttcttgacttctatcatttcatgccgcctcgctttatgatgaggtagaggaacagcggcgcgcccaggaaagaggtcagcgcacctatgggcagtaccgtcggcgacagcagcgtccgcgagacgatgtccgacagaatgagcagcgccgagccgcacagtgccgaggctgggataaggaagcggtaatcgttgccgagaaaacggcgcatgatatgcggcgcgataaggccgatgaagcttatgcagccgacgaacgcgacggccacggaggatatgagcgcgcacagcgccatgctggagagtatgagcgcgtcgacatggacgccgaggctctttgccgtgctcgtgccgctctccatcgcgttatagttccagcggttatagatgaaatatccgaacgcgccgaaggtcagtaccacgattatggcaatatcccgccacccggcgcggccaagactgccgaatgtccagtatacgaccgtcgcgaccatgacgtcgtcgcagaaatactgaatgagcgccgtgccgccggtgaacatcgaactgagcgcaacgccgacgagaaccatggtcgcgggggtcgtgccccgcaggcgcgagatggcgaggatgacaacagtcgtcgccatcccccccgcaaacgcgcagagcgtcacgagcgcgggattcgtcacggtcagtgcagaggacgtccccccggcgttgacctgtatccccgcgccgaaatacactatcgctactgccgcaccaaaggatgcaccttgagacacgcccagcgtagacgacgaggcaagcggatttctcagcacgttctgcattatacagccgctcagcgcaagcgccgctcccaccgcagcggcggtagcgagcttcggcatacgcacgttccagattatcgtttctgtccgaaggtcgccacggtgggctatcgcgaggatcacttccttcaccgacagtcccgcagaacccgcgataagcgagaaaagcccggacgcggcggtaatgacgagcagcacaagcagcacgagccactttctccatatatagcgcccgtagtcattattgagcgtctcaaggcttttccttctcatctctgtttattctccgatcgtcaattctccgtagtaaagtccgcccgcttccatttcggcgaaggtgtccttgccgagcataaaggtgagtatctttccgccgatctccggcatcgtcacatcggcaaactgctcgggatagagcactattccggcgtagtaggcatccataagcgcgtaggtgatgttcgtcccgcagttattgaaggagggcatcgtgtagacctgcccctcctttactgcgcgcagcgcgtcaaagaagccaggattagtgttatattcgtcattcacaagatccatgttgcccggatcaaggaagattatatcagggtcccattctatgaccttctcaaggtctacctcataatagttctggtccgccgcctcatcggcaacgttgagcgcgttcacacccatgaacgggccgaagtgcgcataggtgccgccaaagccgtggcggccggagaacgtaacagcgccggtatagaccttttgcttatcggaatccgggatgtccttggtgcggtcgttaagatcctgcttgcattcatcgatgaaagagagcacggcctcgcagcgctcctgtgctccgacgacctcggcaaaaacgcgcatcgcgtcgtagaagctctcgtccacgaaattgcggctgagatagcgcacgcacacaacgggtatgccggtctggccgtaaagctcatccgccgcctctgcggagaagcccgcgaggataacgtcgggtgcaacggtgattatctcctcggcatagccgttgttcgcgccgctgccgccgcccgagccgaccgcgggcagctcctttatctcgtcgcggtaaaccgggttatagtcgcggagaatgttataggcctccttgtcgtgatcctcaacgccgaccatcatgtccacgacatcaaggtacgccgccatgcgcggcgcgcccgaaccgaggcagataatgctctcgacgttatagggtatctcgaccttacgtccccatgtatcggtcacaatacgcatttcctgcgcggcgttttcctgtgcagtattctcctgcgcgggcgcagcgctctgttcaggtgcagaagagcttccgcaggctgcgagcgacagcaacgccgcaagcgcgagtattatagctgttatttttttagacatctgttctttcctccggtgtatctaagtggagcggaggtgctcggcctccgctccgcatacagttcatgagcgcttcatgcttactgtcattgagtatacatgattgccgcacagattttaagccccccggggggatgcagacgcactacaatccgagtgtgattgtataaatttcggcaatctccgtatcgaaaccgtattcaacagatgctgaacacaaatcgcacaaaccatattgacaagtttgcggcattcggttatcatgcagatattagttcaaattttttaatcaaaatttttgaagttagtaaaggagctgcaaacgatggatattttcacaaaatgcgaaaactttacccttgcaaaagattacagggaaaaaggcatatatccctatttccatgcgctggaatcgcgtcaggacgttgaggtcatcatggagggcaagcggcgcataatgctcggctcgaacaattacctcgggctgacgactcagccggaggtcgtggaggccggcataaaggcatttgagcggtacggcacaggctgctctggctcgcgctttcttaacggcacacttgaaatgcacctcgaactcgaagcagagctggcaggctttgtacataaggagggcgcggtcacgttctcgaccggctttcagtcgaacctcggcataatcagcgccatagccgggcggaacgattacgtgatatgcgaccgcgagaaccacgccagcatatatgacggatgcaagctgtcctacgggaaaatgctgcgctataagcacgcggacatggccgaccttgaagcccagctccagcgcgtaccggagcagagcggcgtgctgatcgtgacggacggcgtgttctccatgggcggcgacatcgccaagcttccggagatcgtcgacctcgctaagaagtacggcgcaagggtgatggtggacgacgcgcacggcctcggcgttatcggcgagggcggccgcggcaccgcaagctatttcggccttgacgacgaggtagatataatcatgggcacattctcaaagtctcttgccagcctcggcggctatatggccgcgagcgaattggtgtgcgactatgtgcgccacaattccagacccttcattttctccgcctccattccgcccagcgcctgcgcgacagcgctggccgccctgcggtatatcgaggcgcacccggagctgcctgagcgtcttctcgcgctctcgagctatgcgagaaaagggctgaaggagcgcggtctgcacatccgcgaatcgctcacgccgataatcccgatatacacctatcaggcggaaaacacgctgagaaaggcaaaggagctgtatgaagccggcgtgtatgttaaccccgtcctccccccggcaacggagcctacagagtgcctgctgcgcacgagctacatggcgacgcacaccgaggcgctgctcgacgaagctatggacataataaaagccgtcctcggagccggcgcgcagaattgatgccataacaggctaagaccgcccagcaccgccttacccgcgctctctcatatctccccatgctttcacatatacatcaaatacgaaagcatggggagtggtgcatatgtacacaaatatcgagcagcgcgcctgtgacctggcggtgttcatcatagacaaccgggccaccgtccgctccgccgccaagcgcttcgggatcagtaaatccacagtacat

SEQ ID NO: 2751 - DNA, 23177 bp, synthetic construct
  misc_feature 1..23177: note = Synthetic
  source 1..23177: mol_type = other DNA
aaattctgaattccggtccgtttttccatgagttcgtggtcaagtgtccgaaaccggtggaagaactgcaggaacacttgctggaacatggtattctgggtggttacgatctctccggttcttatccggtctttgaaaactgcctgctaatcgcggtcaccgaaatgaactccaaacaggatatcgatgatctttgtctggttttgaagggagggcatcatcaccatgtgcactaaaccgacaaccggaaatgaacaaaagacgatttttgaactctcttccgccggacgccgcgggatgcgttatccgaaatgcgacgttcctgaggctgaattgccctcaggactgctgcgtgatgaactgccaatgccggaactttctgaggcggacgtggttcgccactttaccaatctttcagaactgaactactctctggacaacggcttctacccgctgggatcctgcacgatgaagtacaacccgaagatcgatgaaaagctcagccgtctggatggctttgtcaatgttcacccgctgcagccgatcgaaacggttcagggctcacttcttgtgatgtatgaactgcaggacatgctgcagcgcattagcggcatggacgcctgtaccctgacaccggcagccggtgcgcatggtgagttcagcggtgtcaaaactatcgttgcctggcaccaggcgcagggacatgacaaacgcaaggtcatgctcatccccgacagtgcccatggcaccaaccctgcgacatccgccatgagcggactggtggtgaaacctgtcccgacggatgcccgtggaaatatcgacctcgagaaactggctccgctctgcaatgatgaactggccggcattatgatcaccaatccgaacacgctcgggcttttcgatgaacacattgtcgaagtcaacgagatggtccacaaggcaggtggtctggtttatggcgatggtgccaacatgaatgccctgctcggtatcgcccggccgggtgatttgggatttgacgtgatgcacttcaacctgcataagactttcgctaccccgcacggcggtggtggtccggggtccggtccgatttgcgcgaaagctttccttgctgactatattccgggaccggttgcctgtgtgctggaagaagagaccgaggaaatgcctccgctttatgggctgaagatgccggaagaaagcatgggacaggtccgctccttctggggacactttggcgtgatgctcaaagcttacgtctatatcctgatggaaggggaagaaggtctgcgccgcgtgagtgaatatgccacgctgaacgctaattacctgatggctgcactcaagaaagtctatccgctgccctttgaccgtccatgtatgcacgagtttgttctggagggtaagctgcccaatgcgccggaggtacgtgctttggatatcgccaagcgcctgatggattacaagttccatccgccgacgaattacttcccgctcatcgtccacgaggcactcatgatcgaaccaaccgagactgaaagcaaacaggttctggacgagttcatcgaagctatgcttgttatcgcgaaggaagcggaagaaaatccccagctcctgcacgacgcaccgctgaccacaccttttggccgtatggatgaagtcaaagctgccaaggacctgatcctgacagcgtaaacgttacaattcacgaagcacatgcgggactggcaccttgtgacgcgcagccgacacaagtgtgcctgtacccatgtgcgtcacagcaatattggcaaacgcattaattgtaagcgtataactgagtaagttttcagggggattgtgattcatccccctgtgttgcgttgttgtgttctttataagaatcaattcatgagataggcatttttgtggcgcaccccgatccggtgcttcgagcagaacatggaaaggaacataaaaacctgactccaaagtaataaaaaaacgcaaaatcgcggaaaatgcaaaaaaacgtgtataataaacggttgttagttgccagcatagctcagttggtagagcaggcgtttcgtaaacgtcaggtcatgagttcgagtctcattgttggctcagagaaacggataaaatatccgtttttttgtttaaatggatggattttatgctcctgctttttatgttggacgtataataaatttaattattgaggaagaaaacttccggaggagagatatgaaactcagccgcgtcagtggaatccagccaaatgaagacatcacgccaagagaggcagcaaaccgcgaacttgcccgagaagcggcaggggaaggaatcgtgttgctggaaaatgacggggcccttccgctgaaacctgggaaggtcgctttattcgggtcaggcgcgatctctacgatcaagggtggaaccggctccggtgaggtcaacgaacgttattccgtcaacatcgctgacgggctgaataacgccgggtttgaaatcaccagtcaggattggctggatgaatataaaacggaactggcagcggcttatgaagagcatgaccgcaaatgcattgaagctgtcaaaaagtccggcagtcttcattccctcatggatgtgacgaacttcccctttgtgtatcctatcggacgaaaaattgacgaaaacgacgtgcggaacagccaaacggataccgcgatctatgtcgtcgcccggcaggcgggggagagcggagacaaaaagcttgaaagcggggattatgatttttcccctgaagaggtggaatgtctgcgtttcctttccgatcattatgcgaaaacgattctggtcatcaacagcggctcttccatggacatgacgtcattggatgagattcggatgtcagccgtgatttatttctgtcagcagggtgaagagggcggcaatgccctcgcggatattctgtccggtaaggtgaaccccagcggcaaactgacggatacctgggcgcgttcctatgctgatattccgtatggagacgagttcagttacctgaacggtgacctggagcatgaatattataaagaagggatctatgtcggctaccgctatttcgattccttccatttcaaaccgcgctatgccttcggtcatggcctgagctacaccagctttgacctgaaccttaaaaaaatcagctttgaaaaatcaaaggtaattacatctgtttctgttcgcaataccggaaattatgccgggaaagaggtggtgcagctgtacctttcctgcccttccggaaagctggaacgggaatatcagatgctcacggctttcgcaaaaacatccgtattggctcccgctgctgaggaaacacttgagctttcctttgatctcgcggattgcgcggcatttgacacagcttccgcctcaaaaattctcgagaagggggagtatattctccgtctcggcaatgcttctgatcatacagttccggcagctgaaatcacgctgccaaaggatgtgacggtttggcaggggcggaatctctgcggtccgcaggtcgtttttgatgaactgcatggggagaaatttattcatacagctggtgaggatgtgccgcatctggtgatttctccggatgcctttgaaacggtctgtccggactatgccgaaccgcagccggtggatgacgcggatgtgactgcaatcttaaagaaactgagacgaaatgatctcatcgaattgtgtgttggcgccgggatcctcggcatgtttgccggcaacaagatccttgccccgggaaccgtcggacggacttccgtgcgccttttccataaggggctggtcaatttaaacctctccgatggtcctgccggactgcgcctgatgcgtcgggtagcatataaatggggactggtacgttcggcggactacctgatgagcttcatgaagtatttacctgctttagcgaagaggctgatcatggcgaacccgctgaaggagaagtttggctatcagttttgcacagccttcccggtggaaaccagccttgcgcagacctggaacacggagctttgcaaacgggtcggccgggcggttgctgacgagatgaatgagtataacgtcacctgctggctggcaccggcgatgaacatccaccgcaacccgctctgcgggcggaattttgagtattacagcgaggatccgctgctgaccggcaaaattgccgcggctgtggtctccggtgtgcagtctcagcccggatgctacgctaccatcaagcatttcgcctgcaacaatgcggaggataaccgcaatttttcggattccatcctgagtgaacgggcactgcgggagatttatctgaaggggtttgagatctgtgtgagggaagctcacccgaagacggtaatgtcttcctacaacaaggtgaatgggatctatgcgccgaataattacgggctgctgacggacattctgcgtaatgaatgggggtttgacgggatcgtgatgacggattggcattccactaacgacgggaaggctgaggatgggctgactttcccctccggtaatgacctcattatgccgggcggctggaagttccgccgttcggtgcgtcgggcactgcgccgtcatcagctcatccgtgcagacctggagcgctccgcctcccgcatcatccgcctgatcctcgactctaatgtggcgaaaaaataccctccggaattgtttcgttaatgtgtttattcaggacggagcacttggggactggcatcttgtgtcgcgaagccgacacgagcgtgcctgtcaccatgtgcggcgctggattctgaatagttacttgttaattatttattccctccgaatgtcagagaaaacatctttggctggacggacttttccggttttcatgtcagcataccctttttcaagttcttctgataattagtcttgttatattaattacaacgtatatacataagcaatgcaatggtggatttgtttttattcataattattttgataaatcggttcaggagagtcattaagaatataattgttttgaaatttgaatacctactgaaaaaccggagatgaatatggaaaatacaaaatcgattgaagaattacaagccagtcgagaccaggtgatcgtgcggacgagcatcatcggcatcatcgcgaatgtctttcttgcgggattcaaggcagtggtggggctggtttccaactccatcgctgtgacgttggatgcggtgaacaacctgagcgacgcgctttcctccgtgatcacgatcgtcgggacaaagctcgccgcgaagaaaccggataaggagcatccgctgggctacggacggatcgaatatctgagcgccttgatcgtggcagcgattgtcctgtatgccggtcttacctccctggtggagtccgtcaagaagatcattcacccggaaccggcagattattcacccgtctctcttatcatcatcgcctccgcggttgtcgtaaagctgttattggggcgctatgtcagggcgcagggggaaaaggtcaattccggttcgctgatcgcttccggttcggacgcgctttttgacgcgatcctttcggcatctgtgctgatttccgccgtgattttcctgctgacaggattgagccttgagcctttcgttggcgtggcgatctcctgctttatcatcaaatccggtttggagatgatgaaggatacactggatgatatcctcggaaaacgggccgatcgggaatttgtacagaatatccggcagacaattctggaagatgaagctgtttccggcgcgtatgatatgtatctgcatgcctatggaccggaaagatattacggttcggttcatgtggagattccggacaccatgaccgctgatgagatcgacctgatggaacgccgcattgcccagaatgtctatgtgaaacacggcgttgccatgaccgggatcggcatttattcagtaaacaccaaggatgatgacgtgaaggaaatgcggacgaatatcacacgcatggtcagcgctcatgaaggcgtgctgcagacccacgggttttatgtggatatggaaaagaaaacgctcaatctggacgtgatcctggatttcgcgctggaagatcgtgtcggaaccttcaacgccattcgggatgaggtacagaaggcttatccggacttcaagatccagatggcaatggatatcgatgtctgatccatatctcatgaaggagaatacacgtatgatcaatagactaaaacggctgttttcgcgcgggaaagcagaagaaaaatcaatgacggaagaggacaagcaacagaccgccgcctggcagtctgggttggagctggtttctgctgctccttcccgggagaccccggaatcaattccggagcgcaatacagacccccgggcagaacgtgggatgatcacaagaacctgcaaaaaatgcgggaaaaccttcacccttccggaagaagtccagcactggcctgattactgtcaggagtgcaggagaaaatatcacattgtggaacagatcacgagaacatgccgtggctgcgggaaggaattcacattcccgtcgaacgtctggcactggccgaactactgccgcgaatgccaggcaaagcgaaagtcattgaaacgaaattaggatattaccgatttaacttgtttgagtcagcggaacaagctgcattgactttgtggtagaacatggaaaaaaactcaggggacgataatatttttgaaaagctctccaaagcgggaaaggccgtaaaggaaacagcggattctgcgagaaaagctgctgcggatgccgggatcaccggcgaatccctgctggacacggcaaaaaaggccaccgggactgtcgtcaaagtcggcggtgaagcggttcgcgtaggggaaaaagcggtcgaagtgacgcaggaagcttatcagaggaccatagggactgctgttcaaaagctggaccggaacggggatgggaaagttgacatcgaagacgtcatcatagcgagtctcaggatccccggtgttcgtattgaccgtgcccgttttctggaaaaggaactcttcaaaaaccatccccgggaagtcgtggacaaagcgattgcggaaacacccgcgaaggccggtatcccccgggaagaaatcgacaaaatcgcggacgaggtcatcaattttgagcgcagctgtgtctccggaatttcagccgcgctggggatccccggcggtgcggtgatggcggcgaccattccggcagatattctccagtattacggctacaccctgcgggcggcacaaaagctgctctatctttacggtttcccggaaattgattcctgtgaaaatgatctctatctggataccgaaacgatcaacacgctgattctctgtctgggcgtgatgtacgggacggccagcgcgaacaatgctatcagagccatggcaaaggcgcttgcgaccggtgtggaaaagcaattgatgaaaaacgcgctgaccagaggggcgtttttcaagttcgttcagcaggtgggcaagtggttcgggaaaacgatctacaaaaagaccttcgccggattctttaagaaagcgatccctgttgtcggcggtgtgatcggaggcggcgttacctttttgacgttcaagccctgctgcaaccggctgaagcatgtcctggaggatacgctcctttccaatccggaccatgtttccgatgcggaagaggatgcgatcctcgaaaacatcctgacagacaatgatataagggagtgaagcggagcatgtccgcaggcggctctgtccccgatatatggtgcatccgaaaccaaagctgaaccgggtaacggacttcgatcagcctgtatatgcgtcttcggcagtgttggaaaagttctgccgggacagccattcctcttcttctgctgtttccggaatgtcgattctttcaataactgtgattctgcattcgtgctgcatattggtttctccttcgtgagcaggacatcatactgcctgcggtttgttatcggggccttctgtgtcatttccggcgtattttcggtataactccggctggtcgtagtgcgtgtggtagcgcagcggatcgatcaggcggaaaaaggagcgcttcaggttcgttccgatgttgacgcgcttgatcatggtgaacccgctgaacggcggtaaatacgagatcaaatcattgacgtcggcaaaattggcgcagtccgtatagagtgtctcaaaatagcggcgcatccgctttctgttcagcggtgtggagcggaaaggacgcacactgccgaaggtatagagatagggtttgacgccaaagttatagttcagatcctggcagcaaagacaggctaccgccgatcccaatgaccaaccgatgatctccgtataggcatcggggtgagcttcatgcagttcttcccatttctcacggatcagccttttgaccgccagatacatatttccccacccgtgatgcacccggatctgcagtctcttgccttcaaaatcgattgcgtcgtaataccggctcgacgattcaaagatgttcgcgatccagtcggttttgtcatgcgtacattgaaagtggatctggatcacgtcccgttcgggttcgtaatggatctcgtaattgacctcatgagcgatccccagcagtttcccgagtatcgtcgtgttatattttacagcggtgtacttcaccggataggtgacccgtccggtgtgggtgtagtcctcgctcgtgttgataaaatactcctcaaatggcagccgctgatatttcatattcccgtcttcgatatgttatctgaatattttccctaattttcagggtttgattgagtcaatgcagcctgttctgctgactcaagcctgagtcagcgaaaacaggtcacttttgactcaaattgaattgctcggcattttcctgtgtattctcacaaggaaactgacttttggcaacttcccaatatccatttttatctgccccatgtcggataagaatttctttgttctttaactgctgaaggttatattcaatacttcttttcgtttttccgattaaatcagacatttgttcagcagaagattccggatcacaaatcagaatatataaaattttcagttgtgaattgttcaggtcatcgccaaaaatacaccgaagtttttctgaaattacaccgaaattacaccgaagattttccgcgattacaccgaaatcaccttgaaaatcttcttcatttacaccgaaattactcaaaatattcggtgcattcgtgctttggaattttcattattttattccgaaattataccgaagtttattccgaaattgtattgagtttttctgcaattacaccgaagctgatttcgctgtatatttagatttaagatgtggcacactgtctttgatctgttatctgaatatttccccgcattctcagagaatgatgaaagaagattcatcttctccccggcaggtctgatttatttgaccagtgttcattatacaacatataaaacgccgcggctgaaaaacactgaaccgcgtctgccatatacgttcctgatatataaaaatagcgggagattcccccgccttcggtggaccagggtctttcgaccagcccgaacagtttcaaactgtatttatagtttacagattctttatcaatttgtcaagtcaaaattttttcattttctattatattttttacacatttattcacaagtcttgctgcaaaattaaaataaattatattgacaaatgaacaaaagtagatatacttaaattagtttcttataccattccagaaactattatggtcactacaataaggtattagaccgtagagcactaacaccccatttggggtgttatctctttaaactgtccaaaatttagtattgcaattattgataaaaactggtaatatttttatacgaattatctttacagatcatggaggtgtcaaatgctgccttacgctattggtttggatataggaattgcatctgtgggatgggctgtggttggactggatactaatgaacggcctttctgtattttaggtatgggctcacgaatttttgataaagcagaacaaccgaaaacgggagcttctcttgctttaccaagaagagaagcacgcagtttgcgccgccgtttgcgccgtcaccgccatcgtaatgaaaggatcaggaatttactgctgcgtgaaaaaataatctctgaatcagaattacaggaccttttctctggaactctgtccgatatttatcaattgagagtcgaagcattagaccgaaaattggacgataaggaattctcgagggtactgattcatattgcccagcgcagaggtttcaaatcaaaccgtaaaaatgcagctgcctctcaggaagacgggaaactgctttccgcagtaactgaaaatcagcagcgcatgaatgataaaggctaccgaactgtctctgaaatgctgttgagggatgataaatttaaagaccataaacggaataaaggcggtgaatatctgaccactgtcacacgaacaatggttgaggatgaggttcataaaatattttctgcccaacgaacacatggaaatctgaaagctgataatcaattggaatctgaatatctggaaatccttctcagtcagcgttcctttgatgaaggacccggcggtgacagtccttacggcggcagtcaaattgaaaaaatgattgggaaatgtacattttttcctgaagaaaaacgagctgcaaaggcaacttacacctttgaatatttcaatttgctggaaaaaatcaatcacatccgtctggtttcaaaggataacctacctgaaccgctgagtgattttcagcgtcgttcgctgattgaactggcatataaggttgaaaaccttacctatgaccgtattcgaaaagaactgcacatttcaccggaattaaaattcaataccattcgttacgaatcggatgacctgccggaaaatgaaaagaaacaaaaactgaattgcttgaaagcctatcatgaaattcggaaagcattggataagcttgggaaaggtactatcaatacactgtcaaaagaacaattgaatacgataggaaccgttctttccatgtataaaaccagtgaaataataaaaaacaaaatggaacagattcctgctgaaatcgttgataaattagatgaggaaggaataaatttttcaaaatttggtcatctgtccatcaaagcatgtgaattgatcataccgggactggaaaaaggcttgaattacaatgatgcatgtgaggaagcagggctgaacttcaaagcccataacaatgaagaaaaatcctttttgttacatccgacagaagatgattatgccgatattaccagtccggttgtaaaacgtgcagcttcacaaacaataaaggtgataaatgccattatccgcaagcagggttgcagtccgacgtatatcaatatcgaagtagcgagagaattatccaaagatttttatgaaagagataaaataaacaaaagaaacgaagccaatcgtgcggaaaatgaaagatctcttgaacaaatcagaaaagaatatggcaagtcaaatgcttccgggcttgatttagtcaaatttaagctatatcaaaaacaggatggtgtttgtgcctattcgcagaaacagatctcctttgaaaggttatttgaacccaattatgtagaagttgatcatattatcccatacagtaagtgttttgatgacagggaatcaaataaagttctcgtgtttgctaaagagaatcgggaaaaggggaacagactgcctttagaatatcttgatggcaagaaaagagaatcttttattgtatgggtcaacagtaaggtaaaagattatcgaaaaaaacaaaatttactgaaagaatcattatctgaggaagaagaaaaacagtttaaagaacgcaacctgcaggatacaaaaacggtttcaaaatttctcatgaattatatcaatgacaatttgattttttcatcatcaaacaagaggaaaaaacatgtaactgctgtgagcggtggcgtaacatcttatatgcggaaacgctggggtatttccaaagtcagggaggatggcgatcagcatcacgctgtggacgcgcttgttattgtttgcaccactgatggcatgatccagcaggtatcaaaatatgtagaatataaggaatgtcagtacattcagacagatgctggaagtctggctgttgatccatacacaggagaagtactgcggtcatttccgtatccctgggccagatttcatgaagatgctgtgacttggacagagaagatttttgtgtccagaatgcccatgcgtaaagttaccggtccggctcataaagaaaccatcaaaagtcccaaagcgctgggtgaaggtttgctgatcgtcagaaaaccattaactgaattaaagctaaaaaatggagaaattgagaattactacaaaccggaagccgacttgttattatataacggtcttaaagaaagacttatggaattcggtggagacgcgaaaaaagcattcgcggaaccattcccaaaaccgggaaatccgcagaaaattgtaaaaaaggttcgccttacagaaaaaagtacactgaatgttcctgtcttgaaaggtgaaggtagggctgataatgattcaatggtcagggttgatgtttttctaaaagatggcaaatattatctggttccaatttatgtggcagatacattgaaacctgaacttcccaataaggcttgtattgctcataaaccatatgatgaatgggctacaatggatgatggtgatttccttttttccctctatcctaacgatttgatttatataaagcacaaaaagggtatcaaattaacaaaaataaataaaaacagcacattagcagattcaatagaaggaaaagaattttttttgttttataaaacaatggggatttcatcagcagttttgacctgtactaatcatgataatacttattatattgaaagtctcggggttaaaacgcttgaatcattagagaaatgtgttgttggtgtattaggagaaattcacaaagtaaggaaagaaaaaagaaccggtttttccggaaactgaggaacaatggcataccgacatattttcatcgaaaaccctgcgaaaatttctatgcggaacaagcagctgttgattgagacagaccgaattcacagtgttccgattgaagatatttcggctgttctgattgaaagtcatcgatctgttattacagctgctgctctctcctgtcttggggagagcggtgttgctgtttactgttgtgatcaaaagcatatgccctgtgctattctcactccgttttccacgcacagccgagaactttccgtactgaaatcgcagttggaatgtaaagaaccactaaaaaaaagattgtggcaaagtattgttcagtctaaaataagcaaccaggcaaagtgtttggaaattgtcggaaagactgatgaggcactaaaaatttcagcatttgttgaaaaggttcaatccggtgatacaaaaaatgttgaagccacagcagctcttaaatattttccattgttattcgggaacacattttatcggtcaaatgacgatgtgataaatgcctcgctggattacggttatgcaattctaagaggctgcatcgcgcgtaatttagctatctatgggtttcagccggcacttggtttgcatcacaggagtgagttgaatcattttaatttagcggacgatttgatagagcccttcagacctttaattgatctaatggttgtttctatggaagaatttcatagtgatgaatttacatctgattgtaagaagattctttttagctgtctctcaatggaaagtctttccggcaatcagcaccatagtgtttcctacgccatagaaagatccgtcaaaagtctgacacgatcattatcaaatgaaaaaaatgaactctgtttgccggaacttcttccgctaaagctgcatacatatgaatagatatatgcgaattctggtattttttgatcttccggtaaaaacgaaatcagaaaggaaggctgctacaaaatttcggaaatttctgatcaatgatggttattatatggttcagttttcagtctacgccagaatatgcaatggcccagacgctatcgaaaaacataggctgcgtgcaaaatctaatcttcctgaaaatggttcgatccgtatgttggtcgttacagaaaaacaatatgaatcgattgatatactccttggcaattattctgtaaaaattgaagatgaacctgttccggaacagctttcttttttctgaaaaaaggatttatcttataaaaaatataatcaaaaacgcttatttttttgtcgaaaataagcgttcttcctgaggatctattataccattccagaaaccatcaggggactacaacccacggatcaaacttctgaacaacgttattattataccattccagaaaccatcaggggactacaactcggaacttgggttcccgtatttctcctgaattataccattccagaaaccatcaggggactacaactccaattgctcactggtcacatagttgactattataccattccagaaaccatcaggggactacaaccggcacatagccatccagccgaccggtacgattataccattccagaaaccatcaggggactacaacgatatccgacttgtaaaaccgactccatcattataccattccagaaaccatcaggggactacaactcacggtaattccagcggctcgtgaaatcaattataccattccagaaaccatcagaggactacaacctcttttggttcacgctgatatttggaataattataccattccagaaaccatcaggggactacaacaatgcttactgtcctggactgactgtcgcaattataccattccagaaaccatcaggggactacaacgtggtgatttattgtgttaaaccactgaggattataccattccagaaaccatcaggggactacaacatttgatggtggtcgtcgtcattctgagcaattataccattccagaaaccatcaggggactacaacaaaagtttcattcaacctccacggagcacaattataccattccagaaaccatcaggggactacaacgctattttcatcggcgaacgcttcggcctgattataccattccagaaaccatcaggggactacaacagccggaagcgcaggtcttttgtcgagatcattataccattccagaaaccatcaggggactacaacaggtagaggaaaactgcgcccgctctccgtattataccattccagaaaccatcaggggactacaactcccgctgcgcggttggtccggtgatctttattataccattccagaaaccatcaggggactacaacgttcagcacggatagaacattactggtacaattataccgtaagcgtcaaatagaagacggattgaaaagggtaatgaaaaaagaccatactctaaagaagtctcgagatttttacgagaaactcatggaaatctcgagaaagctatgaaagtagtaaggagtatggaatggaaaagggaaaatataccctgaattcggcaaaacacgcatcaaaaatggccgaatggcggatccggatcgaagaatgccggaacagtgggaagacggtaaaaaactggtgtaaagaaaatcacatcagtctgaaaacatactacagatggcagcggatcatctgggatgttgaaacagaagacagggccatcgagccgataaaaacaggagggatcgaatttgtggaaataccgcagatcaggatggaatcggattttcatcaagcagaaatagtgatccgaaaagggaactggcagatcgagttaaaaaacaatgcgaacccggcgctcatcaaacagatcatgcaaatggtgatgcagaatgtttgacccatcaaaagccgagcatgtatatatcgcggtcggatacaccaatctgaggatggggatcgatggactttccggagtggttgcaaacacgttccatcagaatccgcagagcaattcactgtttttgttttgcgggcgaaagaaagaccggatcaaaggactgtattgggataacgatggatatatcctgttatataaacgattggagagcggacgatatcaatggccgcggaatgaaagtgaactgaaggaattgacggcacagcaattccgctggctgatggaaggtttgagtatttacgaaaaaaaggcaatccagccaatacaggaatcatttacatattagataaaccttaacaaataacaattgtcattaaagcctcgtattagagataagattaacgattatatgttaaaattatagccatccctaacgggtgcgtggattgaaattcagtataaagatgtgtttggatggttgagtttgtaaggtaggaactgttgccggactgttctgtatttcacatgagggcatgagacgggtacaggcaccttcggttccagccccgcgtaaaaaacggggacggttttgtgtgcgcgggcggagtttgaaggtcttaagcgtagttcggcacacagaactgtcaccgggggaggacggtcagcatcgaagaaagccggcaccgcaactgtttgggcatctgttctgcaggattgggcgctgtgtgtccggggactggaccgcttgcgggcctgtacccactgtgtgtaaacagcggatggacaagtggttttttgggtggtttggtgttgagcccgggggtgggtgttgttgccggataagcgggtggctccttgcggtatatgtgcgtgcgctcgggtacaggccccgttgggtccagtccccgatatatgaatacagcggatggacaagcggggctgtgggtggttcggcgttgagcttgggatggagatgtgcgcctgagaaaagcagctgctcgatagccgggcatttgtgcgggcttcgcctcagcaaattcccggcccggtgcgcgtacccggggcgtttaccacaaaatttggcatttgtcaaccgccaatattggtggttttcttttttaaatttttgaatatactcttgttaacgattgaaacggggacggttatcccgtacatggtacggggaaccgtcatccagggtaggaccgacagaattatggggattcggcttcatgaggttaagaaaagtctaaccttgcaagcgctaaaggagagcctgattgtcgttgaacctggtactttcagaagcgcggggacagattcatgagggtaataagtatttattaacctcatgcgcattcaaatctgaaaacggcggcctgataacaggtgacggtcccccgtaccaggtacgggataaccgtcaccgggtgagttcaggattcagtggttaatggccggtggtcagggacaaggggcagggtggtatcagctaacacctaacacctaacacctgataagactggattgaaacaagggactgttgccgacaggcgactgtcccgggaaagggaggaacatatgggcagcgcgatgatggatatgatgttcagaaacgcatgtatgaatttgtcgaacgggatcgtgaacccgcttgacaaagatattttgtcctatgctcctcttccggacagcgtgatcgatccttatatcacgcaggaagtcgacccgctgcaaacgatgaacctcacgaacaatacgctgaaggtctgggtcgaagagtccaaaaaggcgaattatttcaccacgcattttgttacactcagccgcatgatcatgaacggggtcgccacgatggcgcgcggattggtcacgctgcatttgcgcggtgaggacctggagcaggctccgctttccattcaggatttgatcagtatttcttcctatcaatttcgcaagagttatatcggggttttgcagacggtgaaatccaagccggaggtcagcgagcgtctgctgatgaaccagctgcgctggaataatacgctgatcaagctgtttaagacgcgggagaaattggaacggccagttgtcagtggacagtgttcagtgatcagtgcccaggggctggaaaatgatgaaggaaaaaataataacgaagttccgcatatagatttggaaagttcaaattctttggatgatgagaaggctttgactgaagccgaaattaaatctattgctgatcctaacgtctcaagtcttgagtctggatcttctgagatctcaagtgtcgagactgatgtctctccgctcactgagctttcggagtttcccgctttggcggctccgggtgcgtatggtgcgattcgggcatatggggcgctggaaaataagaaagcggaaaagaaaaaacaatcaggggccaggagccagtggcagggaaatgaggaaggaagaaggaagaagaaaatggattcggaaagttcagaatccgaaagtcaggaacaaggagcaaggagcaaggggacgggaaatgaagaaggaggaatgaagaatgaagcgaatttggaaagttcagaatcggggagtcaggagcaaggaacaaggagcaaggggacgggaaatgaagaaggaagagtgaagaatgaagtgaatttggaaagttcagaatcagggagtcaggagcaaggggcaagggaccaggatggaagtggtgacgaagatgattcttcattggatgaaaccgggcagaattgcagagacgcacatggggacatgcacgcttgtgcgggctgcgccgcacatggggacaggcacgcttgtgcgggctgcgccgcacaagatgccagtccccatgtgcttcgggagggaatggggcggccgccggaatatgcgcgggttctttaccgggcactttgccggagttcggggaacgaggaaggtgcgctcgaattcactctcgatgaaatttaccagcttttaggggatcctgagttctgcaggtatgagccgcagctggcggctgatttaacactttctgaaattgaatgctgtcatttcccgcagccgccggatcgtcagccgctccagcagcttgaacgtatccccttcctgctgttccttgaccgtcttggtgatgcagacgctgcccagctgactgatcaatttttcaagctgagcgcacatctggaaatagagcggggagtgtcggttgatctcgcgcatgattttgaaggtctcattcgcctcaacctcgagcatcatcgccgtttcctgaaatttgagggtatccgtgccgaaggaatcagaatattcgaactcatagccgtatttgtctttatcgccaaatttggccgcgttttttatttgcagctttcgcattgcacgcacaccgtcaatgatgtccatggtttcaaccgtcatctcattcattcgacacgtacctcctttcgttcagtggtcagggatcagtggccagtggccagatggagcaaggaacaaggagcaaggaacaccctaagacctatctcctatctcctatatcctaacccctataatagcactaatttctattatgtcaatatattaaatattattttctaaaatatattacttaaatcatatttatatagttattattacaataaattatagaaacaagagaattcaatgtaaggatggtaatgtgtgtgcaggtgtacattgaagggccccagtgtttcacgatgaaagttcagtcgggaaaacgtacctggggttcccggcgatgtcaaacgaggcagtcaagaaagattattatgcggatgatacaagggggaaaagaatagatgtcgaagtcaatatgttatataataatagcaagaggcttcctgattataattatattcatggaacaattctgatcatgataaccggtgaggtgctggttcttatgctttatcgtcttggaacacatttggagctattcaagaaatagccttgaaaatcggaatttgatgatatatagatgatatacaaaggaaaaaggggtaaaggatcatgaaaattaaaagccggaacttatcgtatgaagatgttctgctgcttcctcatgaaaagcatcagatgccgaaaagaccatccatgtttttcaggactctcctgaaaatcgcgagcactcccgatctcagggcgacggatttctcggtgcaagaggaaggaatggaaaaccttgggaaaaacgaaccggcgctgttcctgatgaaccactccagttttattgacctgaagatcgcctctgtgatcctttatccgcgtccattcaatatcgtctgcacatccgacgggttcgtcggcaaatcaggcctgatgaggaatcttggatgcattcctgcaagaaagttcatttttgacacgacacttgtccgtgacatggtatatgcggttcgggaactgcgggattcgatcctgctgtatccggaagcaagttacagctttgacgggacggctacaccgctgcccgactcacttggcaagctgctgaagctgctgaaaattccggtaatcatgatcaggacatccggagcctttttgagggatcctctctacaatatgctccaattgaggaaggtaaaagtcagcgcaaaaatgacatatgtcctttcacctgaagaaattatggaaaaaagtgtcgatgaactcaacgaaatactcaggggactgttttcattcgactatttccgtgaacaaaaggaaaacaatatccgtgtgactgagccattccgtgccgacggcctgaaccgggtcctttataaatgtccgcactgcctttcggaagggaaaatgacagggaaagggacaaagctcagctgcggaggctgtgggaaaacatggaaaatgaccgaaaccggaactttacaggcggaagatggcaagaatattttcactcatattcccgactggtatgcctgggagcgtgaacaggtcaggaaagaaattgaagccggtacatataatctggttattccggtaaagattgggatgctggtagattccaaaagtatttacttcgtcggagacggccgcctgatccataatgcggagggtttccggctgaccgggtgcagcggaaaacttgactatcagcaatctcctgcggcatcatacagtctctactccgattattattggtatgagatcggagatatgatctgtatcggcgacacaagtgcattatattattgttttccaaaagaaggcggcgatatcgccgctaaaaccaggctcgccgccgaagaattgtataaaatcaaccgatagcaattccaatttgtgaagaaagaagagcagtacagaaccaattaccactcataaggaaaagatttaatgaaaattgacgataataataggattgaagcgttatttctaagcgaacgctgtatggcagttgtctgcgcatttattgcctctatgggtctaatctcccttgttctctttcgaaatgaaatggagctgtttgagatatttggactgctggttaaagttgtgactgccgtgatgatttattttgcgttcagatcgtataaatgggatgcggcaaagggtttactgggcagtgttttgttcagcttaatgtatcacgaggcttatctcgttctcgtaaagttatggagtcaggattttgatacataccttgtcgccggtgtgtggggcagcctgtatctggctgctgccggaatgaccttatggatgacggtgatcattaccgtcaaccattttatggtaaattacacactgaaaagcaatccgaaaaacctgatgctgaaccgcatttccattatttttaagtttgccacctatatactgcttcttgcggccaacagaaggcttggactatcctcgtcccttatgtggaaaaacatattggaatatctgacagacatcgctattttattactcgtgatcatgacagaatcgcagtttgataacttcaaaaaactgcgtcaggaacttctggctgaaaaacgtaaagggggtatggagaaatgagcacaaaggaacgtctttccggaatctggctgatcacgatgaaccttttggcgttgttagcctataccgttttcttcgtagcccagatgtggctggatattctgcacgcatggtacctggcgctggtcattctgcagggtacggcattgtttatctatatgtggggacctgataaattaaaatcaaaaaaactcaaagtgttgtaccgtctccttttcgtttcttcgtttttggtgattccctcttttctttttatttttatggggcttatttcccaatatcacgcagagataccggaagctattgacgccgcatctatgcgtacggaagatatccttccgaaagatcaaaccgtggtctacaacaccggcacgctttatgtatttttcccggaatactccgacatagatcatgtaaccgggaatcgtccatcaaaatcagatgagtccatcacctggtgcagcggggccgcttttcagcacagcgtaagtctcggtttttccgaggttgatgtagagggtgatcatgccgtaaacggcactctttacgaaagcccctacaatagggataccttcgtggcatttacttttgcagacggaaaatattcttttaatttcgaaaacacctccgaagccataaaaaaggcagcagaaaaaggaggcagcgggtttatgcaattcgggctgatccgggacggagagtctgtaatgaatttcgaaagaccgagagctcgtgtttatcggaccatggcggagctgaacggaaatctctgcattattgattctgtaaagatgatgcatttcacagagtttatggaagagctgaaaaagcttggtgttaccaatgccatctatatggatatgggtgccggctggaattactcatggtatcgggaagcctcaggcaaagtccgcacgcttttcggacttcccgtaccatggtctcataactgggttgttttccgtaaatgacatacaatcgcttccgtgctgcaatcgaagaaggcaggcgtattgcttccgacaacaatgtgaagggctataccaatatggacgatcttaaggcggcgctggaagtatgaagtacgaggtaaagtttacaaacc

SEQ ID NO: 2752 - DNA, 22034 bp, synthetic construct
  source 1..22034: mol_type = other DNA
  misc_feature 1..22034: note = Synthetic
aatatccccaagatgaagaccgacctggcccgctacggcatccagtacgaccagtggttcttcgagtccagcctccacgacagcggctatgtggccgacagcgtggcggcgctgacggagaagggctatacctatgaaaaggacggcgcgctgtggctcaagacctccgacattttggccgccaagctgcgtcaggagggcaagagcgacgaggccatcgaaaagctgggcctgaaggacgacgtgctgcgccgggccaacgggttctacacctacttcgcggcggacatcgcctaccatcggaacaaattcgccgtgcgcggctttgacaaggtcatcaacatctggggcgcggaccaccacggtcacgtggcccggctgaagggcgcgatggacgcgctgggtctggacggcgagcaccggctggacatcgtgctgatgcagctggtgaagctggtgcgggacggtgaggtggtgcgtatgtccaagcgcaccggcaaggccatcagcctgaccgacctgctggacgagatccccgtggacgcctgccgctggttcttcaacgccaagccggagacgcagatggagttcgacctgggcctggccgtccgggaggacagcgagaacccggtgtactacgtccagtacgcctacgcccgcatctgcacgctgctgaagaatttggccgccgagggctactccgtgccccgtgccgcggaggccgatctgtccgtgctgaacggcgaggaggagaaggcccttatcaagcagctggcgcagtacccggcggtggtggtgctggccgcacgggactacgatcccagcttcatcaaccgctatctcagtgacctggccgccgcgttccacaagttctacaacgcctgccgcatcaagggcgaggcggagaacgtgctgctggcccggctgaagctggcggataccgcccgcgccgtgctgaaaaacggcatgacgctcatcggctgctccgcgccggagaagatgtaataagcaagggcctcccgtttccgggaggccctctttacatggcggcgtttttagggtatactgcatatacgactttttgacgtggagaaaggagcgttatatgaatacaaactggaacgaccccaactttcagggctttggccgcagccgtgagccccgccagccccgggagcggaaggcggtgggcacgccgctgggccgcacgctgctgaacatcgcggttacgctggtgttcgcggcggtgtactactatgtggtgctgccgcccatcaacctcaagagcgaggaattttatatcttcgtgctgctggtctgcgccgtatacggcggctgcgccgtgctgacctccgggtttcagggtacgggcgcgaagggctacttcggctttctgaaaaagcagtgcgccgtgccgctgatcgtggctatcgccctggcggccacggcgctggtgggcagcatcgcgggctggcagctgttccgggccggcgcgtaccgcgacctgctgacggtggaggacggcgacttcgccgccgaggtagaggagatcagctacgatcagatccccatgctggacgcggagtcggccatgaagctgggcaaccgcaagctgggagagctggcggatatggtgtcccagttcgaggtggcggacgactacacccagatcaactatcagggccgccccgtccgggtgacgcccctgcggtacggcgacatcatcaagtggctgaacaaccgcagcgagggattgcccgcctacctgctcatcgacatggtgacgcagaacgtggagatggtgcgtttggacgagggcatccgctacaccacagcagagcatttcagccgcaatctgaaccgccacctgcgctttcactaccccacctatatgttcgacgacccggcctttgaggtcgacgagaacggcgacccctggtgggtctgcccacgtttgagccacaccatcggcctgttcggcgggcgggacatcatcggcgcggtgctggtgaacgccgtcaccggcgagacggcctactataagaccggcgacgtgccaagctgggtggatcacgtgttcacggcagagctgatcatggatcagtacgactaccacggcgcgtatatcaacggctttctcaactccatcttcggccagcggggcgtgaccatcaccacggagggctacaactatatcgccatcgacgacgacgtgtatatgtacaccggcgttacctcggtggtgtccgacgagtccaacatcggcttcatcctgtccaaccagaggacgaaggagacccggttctaccagatcgccggcgcgaaggagtactccgccatggacagcgccgagggtcaggtgcagcagatgaagtacaaggccacgttccccctgctgctgaacatcgcccagcagcccacctatttcatggcactgaaggatgacgcggcgctggtgaagatgtacgccatggtcaacgtgggccagtatcagatcgtggccaccggcggcacggtggcggagtgcgagagcaactaccggcagatgctgctgcacaatgacctgatcgacagcggcgacagctccctgccggagacggccagcggcgagatcaccggcgtcattgacgacctgcgctcggcggtggtcagcggcaacaccgtgttctatctgcgtctgcggggcggcgaggtgtactacaccatctccgcggcggtgcagccggaggcggtgatcctgaacaccggcgacacggtgacggtgcgctttaacgagggacagggtagcctcctcaccgccaccagcgtggtaaagacggcatcccagtcccctgccgccgaggaataagacataatgatcgaagcgggagggcgcaggccctcccgctttttgtccgccctcccttcccactccgccgcctatcccaggggcatttttcgcggcccggcgggcataagataggtcaaaacagaaaggggcacatgagtatgaaaaatgtcaagatcttcctgctgcggcggtggtatgtcatcggcagcgcggcgctgctggccgccgccgccatcttttacgccgtcaattatccggccttcgtcagcaccgccgccaccacgcggcagctgccgatctactccgtggagcggacgcagaaggtctgcgccatcagctttgacgcggcgtggggtgatgcaaaagtgcggcagttcaggtcgttgatataccgggaagaaagctccgcagcggtcctccgcgtctcgtcgataaggccgcgtctgccggtgcttgtgcagttgcaagcggtccgccgggatgatataatcaaattggcaaatacatctttgcccaacagaagcaaggaggttcattatggagttctttgatgtcattaaaaatcgcggcagctatcgcggtgagtttgaaaagaccgatataccgcaggaggatctgcggcgcattttggacgcgggcattcgcgccccatccggctacaatttgcagacgaccacgttctacgccgtcaaggatgagacgctgcgccatgcgctggcagaggtgttcccgacgaaagcggtaataaccgcgcctgtcattattgtggctgcctcgaaatgtgttcatggcggcgaccatgatcttcagtttgagaccgaggactacgccgccgccacagagaacgtcatgctggcgatcaccgcgtccggatatgccggcgtatggatggacggcatgatgaagttcgagggcaatgccgaaagggtacggcagctcctgcatatcccggaggaggaacgcccgcgcaccattattcccttcggcaagccggtggacaaagtcacacagaagcccaaaaagccctttgacgagcgtgtgcatatcctttgagcttattttgcgccgccaagctctccactaagagcttcggctttaaggctgctggtataggaaaagcgctcctgcgaggatcgacctcgcgggagcgcttctttctttcaggtgtgccgatgccatccgatgccgtcagcgtatgtgagagcatccttttacttccaagagaaccgccccacaacagcctccgtgtattggtcgtccgtgatagatgtataccgctctccgtcataccaatcggtaaagccgttgtccgtctgatagatctcgccggtctccgtgtccatcacccgctcaaagcccatggtggcgtcgctctgcttctggctgatgatgtcctgactggtgttccggctttcccacgaggacatgatggcatcctgcatctcgttggcggactggctcagctgctgggactgctgcatggccgcgtcgctctgcgccatggcggaggaggtgtagctgccggagtagtccaggctgcccaagctccgggtcaggatgtcctcccaattctggaacattcctttttcagcggaaacgatggttgtgctgtacgccatatagtacccgccaaggccggggatggggaagggcacaagctccacggaacacataccctccgccttgatgccgtcctgcgtgaactccgcacgcagcacgccggctgttccgcccaaagagccggtggcgtcaaaggtctccgtcaccgtgaaattctcatactgtgggaggctgaggtcgcggtaaaacggttcttccgccaccgccgccatatactgcggcagcacctcaaagtagtccttcacggactcctccgccatcacgggatacgccgcgtaagccgcattccagtaggtgtaattctgcttcagaaagtcatccacaaacagcggctctgccttcaggatatacaaaatttgatttacgctgcacgcggggtcataagcccgcagggcgtggtacatccccgcgttggacgtggcagcctccaccgtccagccctccgggatgctcatggagaaatccgcgcagctatatggtgtcagctccagcccggaggccatgggcgtaatgacaaactcctccgtctgctgtgtgtttccgctatcctgtacgttgtcactgccgttgtctccgccgctgcagccgcacagcagcaccagtgccagggtcaagataagacaagtaattttcctcataaaccctcctattgcgggaacgcccgcacagtaagtataacatacgttttgccccgccgcaacgtattctgtgatgactctgccgtaggcgttggcgaagcggaactcacgccggctgctggccacctcggaccgagcgggatatgtccagcccacaaacatacggtttccgtaacgcgcatacgatggactattctcaaagaggaggtctgtttatgccaaccactcagcaagcacccgccccgacgatcaccgtcacccggaatttccttggccagcagacagctgagacgttgctgctggagttgatccgcgcccatacgcaggcggcttaatggctgcgggcagtctacggaaaggagggagcatatggagaagcgaccactgcccactgcgctgtactgccgcctgtcccgggaggacggagaccggatggagagtgactccatcggaaaccagcggaagctgctggaggagtatatcgaaaatcatcctgagttggtaatggcagaatgctatgccgacgacggctataccggcacgaatttccagcgccccgcctttcagcggatgctgcgggacatggaaagcgggcacatccgctgcgtactggtaaaggatctgtcccgtttcggccgtgactacatcgaaacaggccgctatctggagcgctggctgccggagcacggcgtgcggttcatcgccgtcacagacaacatcgacagcgcctgcggcgcttacgacatgatgatgccgctgaagaacctgttcaacacccagtatgcccgtgacatttcccagaaggtcaaaagctccctccacgccaagcagcaacgaggagagtttatcggggcattcgccagctacggctactgtaaggatccgcaaaaccataaccgtctggttatcgacccgcctgcggcggaggtggtacggcgcatcttcaccctgtttgaaaatggaatgggtaagatccgtattgccaagcagctgaacgaggagggcatcccctgccccagtgaatacaagcggctcaccggcgaaaaataccgcaacagccaccggctggaaaccaccacctattggacatacgccaccatccaccgcatcctgcaaaatgagatgtacatcgggaatatggagcagggtcgggatgaccgtttgcagatgcacgggaaagccaagcgaaaggatcgctctcaatggacggtggtgtccgacacccaccagcccatcatcgaaaaggaacaatggcaacgggtgcagaccctgttgaataccaacgcacgcacgccaaatttccagcagaacgtcagcccctttgcgggctttcttaagtgcggcgactgtggacgagccatggtcaagaccacctggggcggtaagaccttctacacctgcggctcgtataagcgctacggcgcgtccgtgtgcagcaagcattatatcgcccacgatgcgctgacgaaggtgatactggatgatctgaaccaactcattgccagcgtggaaaacctccaccagctggcacagcagggcgcggcaaagtgtccgcgctccggcatcgatcagccgcaaaagctggaagctgccttgcagcgcattcagcgccgccgtcagagcgcttatgaggactatcaggatgcgctgatctccaaaggggattacctccgctaccgcgccgactatgacgcgcaggaacaggcactgcaggcccaactggacaagctgtgcagcacagcgcaggacgatccgctgtctctgccgtgggtgaaggaactgttagctctggggcatctgacggagctggatcgccccacagtcgccgccgccatccgggaaatgcgcgtctatgaggggaaccgcatggagatcgactatctgctcccggagggctgccgcgctctgctggagggatgagtgtatggtgctccgtgtagagcaaagcgaaaaagcggagagcgcagaatagtttttaaggatagacttgaaaaacttgttgcatagcggaagcattttgggtatactagtgactgcgaggaggcgatagcatgatcaacagaccgaattatatcgaggccatcaagccttttatcgaccagccactggtcaagatactggcgggcatccgccgctgcggtaagtccaccatctttgaaatgctggaggaaggactgctgcggcgaggtgtgcctgcggaccatatcatctgcaagcggtacacggagatggacattcccgaaaatatcaccgccaagcagctgtatgacgaactgctggaggccatggcgggcaagggacactgctacctcctgctggatgagatacaggagattaccggctgggaaagggcggtcaacagtctgctggagggtacggacgccgacatctacgtgaccggctccaactccaagctcatgtccagcgagatctccacctatctgacgggacgctatgtgtctatccccgtctacaccctgtctttccgcgagtatctggacttcaaagacggcagcactctgtcccaaaaggaactgctggaggaatatattcggtttggcggctttcccataatagcgctgagccagtatgacgcgcagaacgcctatcagatcgtcaacggcatctatcacaccgtggtctcccgcgatattgtgaagcgtcaccgtatcaataagcaggatctttttgaccgtgtggtgaaattcatcattgagaacgtaggtaagaccttctccgccaactcgatctccacatttctgaaaagcgagcatcgcaaggtgtcggtggagagcatctacaactatctacgctggctggagcaggcgttcatcatctatccctgtgagaggtatgatttgcaaggcaagagcatcctgaaaacacaggagaagtactaccttgcggatgtatcgctgaaatacgccctgttgggctataaccgcaagatgctggacggagcgatggagaacatcgtgtttctggaactaaagcggcgggggtacgatgtgtatattggtaagaatgataccaaggagatcgactttgtggccactcgacgtgacgaacggatctatgtgcaggtatgcgttcagctgccagagggctccgaccgtgaggtgggcaacctcatggaaatcaaagaccattaccccaaatatgttgtcactctgaatgatatggatgttggtatcgaaaacggcattaagatcgtgcatcttcaggatttcctgctggcagaagcgtggtgagcatccattcggaaaagcagtccagtcgggctgcttttctcttttaatggcgtattttcccgattaaatttcggccggttttgcattttactcgtttacggctattctgcttttcccgagtaaaattctcatttttattcccgttttcccgactaaaatcgcttttgcttcattcctaaattcccaactatttttcaattccgaacgttcctaatttcccgagtatttttctttcgcaccaattttggtttcccgactaaaatcacaaaacaaatatcggcaattggttgtcctacaacgcttttggccataattatctatcaaaaaagctttcacttttttaaaccagtcttgttgcagataggacgcatttatgctatcataaaagtacaataaagaagtgcgacagttctccgtgaactgccgcacttttgcatcaccgtggggcaacgaggacacgcagacgctcatcgacattttggagcgatacaacgtgaaaaccaccttcttcgtggtgggagactgggccgagaaatatccggagtcggtgaaggcactccatgacgcaggccacgaggtcatgagccactccaaccatcacgaccactacaacagcctgacggcgcagcagatcattgacgatgtgaccgccagtaacgagcgcatcagcgccgtcaccggcgtaacgcccacgctgatccgctgcccctacggcgagtacgatgaccacgtcatcgccgccatccgctccatgggcatggagcctatacagtgggatgtggactccctcgactggaaggactatgacgcggacacaatatgcaagcgggtgacgtccagggtgcagccggggagcattgtcctgttccacaacgccgcgctgcacacgccggaggcactgcccaccattctcacctgccttatcaacgatggctacaccgttgtgcctatctcccagctgatcctcgaagcgccctacaccatcgaccacacaggccggcagttccccgcggagacgacccccggagaataacggaaaataatatacaaagcacttgctattcgtcaaaaactatgttatattgacgatatttccttataccataccaaggactatgcaggttactatgataaggtagtacaccgcagagctctaatgccccgcatacgcggggcattatctctatccggcgtttgaggaggacatactatgtatccatacgcgatcggctttgacatcggcatcacatccgtaggttgggctgtcgttgctttggacggagaggacaagccctttggcatcatcaatatgggctctcgcatttttgatgccgccgagcagcccaaaacaggcgcttctctcgccgctccgcggcgggaggccagaagtatgcgccgccgtctgcgccgccaccggcatcgcctggaacgtatccgccacctccttgtggcggaaaatgtcatttctcaagcggagctggatgcgcttttcgaaggaaagctggaggatatttacaccctgcgcgtcaaggcattggataccgcagtgtctcatgcggactttgcccgtatcctcctgcatatcgcgcagcggcggggctttaagtccaaccgcaagtccagcacatcgaaggaggacggtgagctgcttgccgccgtgagtgccagccgcgcacttatggccgaaaagggctatcgtaaaggcctgcgacaagctgatccccttcctcgaaaaaggcttgaaatacaacgatgcctgtgcggcagccggatatgatttcaaagggcatgacagcgaaacgcggacacgccttctccaccccacggaggatgattttgcggatgtgacgagccctgttgtgcggcgtgccatctcacaaacggtgaaggttctcaatgctatcatccgcgaacgcgggaacagccccacctttatcaacatcgagctggcgcgggaaatggcccgcgatttcacggagcgcagcaagatgaaaaaggatatggatgaaaaccgcgcccgtaatgagcggatcatggagcgcatccgaacggaatacggcaaagaacatcccacagggcaggatctagtgaaattcaaactgtgggaagaacagcacggcgagtgcgcctattcccaaaagcacctttccctgaagcacctctttgatccggactacgccgaggtggatcatatcatcccctacagcatctcttttgatgacggctataagaacaaagtgcttgtactagcggaggaaaaccgcaacaagggcaaccgcctcccgctgcaatatctacagggcgagcgccgggctgatttcatcgtttgggtggaaaacagcatccacgactaccgaaagaagcagcgactcttgaaggaaacgatcaccgccgaggacgagaaagggttcaaggagcgcaacctgcaggacacgaaaaccatgtcccgcttccttctgaactacatcagcgaccatttggagttttccgacttctccacagggcgcaaaaagcacgtcaccgcagtcaacggcgctatcacatcctatctccgcaagcgctggggcatcgccaaaatacgtgaaaacggcgacctgcatcacgcggtggatgcgcttgtcgtggcctgcacaacagacggcatgatccagcagctgagccgctattctacgctgcgggaatgcaaatacgtacagacagaggccggcagcatcgcggtttccatgcataccggcgaggttttgaagcacttcccctacccctggccggaatttcgccgggagttggaggcccgattgggagatgatccccgccgcgccgtcatttcgcagcgtttccccgtgtacgcaaacggcgacatccccgtgcgaaaactatttgtgtcccgtatgccccgccgcaaggtgacaggcgcggcacacaaggagaccatcaaaagccccaaggcgctgaacgacggcgtggtcgttgtaaagcgtgccctgaccagcctgaagctcgacccaaagaccggggaaatttccaactattatatgccgcagagcgaccgccttctctacgaggcgctgaaggaggcgttgaaaaagcacggcggtgacgccgccaaggcttttgccgcgcccttccacaagcccaaaagcgatggtacacccggcccggtcgtcaacaaggtcaaactatgcgaacccacaacgctgaacgtcgccgtcctgaacggcgctggtgtggcggacaacgacagcatggtgcgtatcgacgtattccgtgtagagaacgatggctattactttgtgcccatttacatcgccgacacgctgaaaaaggaactgcccaacaaggcgtgtactcgcggaaagccttatgcggaatggaaagagatggatgccgaggatttcctgttttcactctatcccaatgacttaatacgcgttacatctcaaaagggcttaactctctccaaagcgcagaaggaaagcacactccccgacacctatgagacgaagcaggaaatgctgtactacaccagcgcgagcatcaatactgccgcagttgcctgccgcacccacgacaacagctacgagatcaagagcatgggcatcaagacgctggaaaagctggagaaattcaccgtagatgtgctgggcgagtaccacaaggtcgagaaagagccccgcatggcgttttgcaggaagtgaggtttgcgtatggcttttcggaacatcatcgttgaaaatcccgctgtgatctccctgcgaagggagcagctctcgattttttgaggaaaaaagtcgctcaaggcaaggccttgagcgactttttcggtagcctattataccataccaaggactaccagggaactacaacatgtgccgctgctggttctcgatcaggtcaattataccataccaaggactaccagggaactacaacattgggccaatctcttgatgaacgagaaagattataccataccaaggactaccagggaactacaactttcagcatgtcgctgattttctgctttagattataccataccaaggactaccagggaactacaacctctcccgctacatcgtggagggcgtgtccctgggcagcgtcaagggctgacaagcctgtttccgacagcaaaacgacacatctcacccggcagggaaacgtcccagcggatcgtaaaagcgaggtctgaccgcacgtccgtggccgggatatgccccgccctacattttgtccagcgcatcctcccgtgacagctccagcagctgggtcagggacattcccagctcctcggcaatacgccgcatggtgctgatgcgggtgcgctgggtgctgccggtgaggatgtgcttcatagtcagcggtgcgatgccgcagcgctgcgccagctctgtgggcgtgacgctgcgtaggatacacgcccggcagacggcgcgggcgtactgttcggtctgcgacatatcgttccctcctaccctttatggcagaagcataccacgtttcgcgccggagggcaagaggcgttagccggcaacgtagccgccgcccacgtcatagcccaggtcgcaggtgtagacccactccaccacatcgccgttttgcagcgcgtagcgggagcagccgtaattgggaaaccagccgttgacacgatacatccatcccgacccctggctcacatcgaactcgtacaggttgttgatgccctccacgtaggcgctgttatacatgggcgtccaactggcctccatgtggatgccgttctcgcggcagacacgctggagcacgtcgtagacgctctcaccctcgctgaagctggccgtggtcgcacccagtatcacaccgtcggcggggacgaggggctttttcgccgccgccgtctccgcgtcccactcgtcccaggcatcccagttattcaggatcgtatcgcaggagatggagatggtgcaggtataggtggtggcctgatccaccgtggtatcctggggctcggacggtgcgggcttgccctccggcacgggatcggtctgatacttgtccttgccggtggccgggtcgatctcctgcttgggctgctcctcctgcttcttctgttcctcctgtttcttctgctcttcctctaacttcttctgttcttccagctttttggcttcctcctcggccttcttggcctcgtcctccgccttctgctgctcctcggactttttgtcgtcctcggtcttgtcttctgcctttacctcagactttttgtcgtccgttttggccgcgtcatcctttttggtgtccgcggtctgctcctgcttagtgttgggggtcgtgtcggcggcaggggctttctgcttgccgcaggcggcgcaggtcagcagcagggacagcgccagcgccagcagccaaattttcttcactttcttcatgcgttttatacctcgtaaaagcgccatacgcagaggcgctttcgcgcctctgcgttggctgtttcgttgttacttgctcacgcgcttttgcttgcgggtcagcaccacgacagctgccgccgccatgaccgcgctgcccagccaaatgaccatctggctgtcgtcagccgtgttggcggaggtgggcttgacaacagtgatgctgccgctgccgctgccaccgccagtggagacagtctcataggacacgatggcaaacgtagatgccttgtccgtctggaagctcagcacgcggttgccctccgtgccgcccaggtacgcgggcagctcggtggtggtcacgttaccgctggcatcggtgtggctgcgtaccacgcagaccttgcggttcagcagactgttatacatctcatcagtgatagagatggtcacggtgacgctttggggcagctcgatgagctgggccacggacgttacctgctcgttgacggtcttgaccagctccaccgccacgtccacgaccttctcgatctgcgcgtccttcttgccggagttgtccttacgcatatcggccagcttgtcaatcagcttggtcagctcgttcttgacctcagcgggcgtatccgcagcgttcgctttagcttccagtgcgctcttaccgccgtcggtcttcttctgctcatcggtggtctgaacggccttttcattgtctaccttgacggtgatagagccattctccaccgccgccttgatctccatgagcttctcgtcatccaccgttactttggccttgatgaccaggccgccgccggacacagtcttgtcgtccttgctgtccaccttgatgtcatcgcctttgacgttggccgtcgggttcttgacgccgcagacggtgcagacgccgttgacgtaggtgtgcttgccggtggcgcgaatgttcacgccggcgttgataaccatgccgcagcgtttgcagtaggtatccgcctcatggccggaggcgtagcaggtggccgccaccgccgcacgggtgccgacatcgtggcccagggccgcgatgacccagctgtccttggcgatctcggtcttgcccgccgcatcgctgaagaacttgccgcagcgggagcaggaccagtaggcgctgtggcctgcctcggtgcaggtagcagccttgcccgccgtggcagtcatactgtgccccagcgcggggatggtctgagtctcctccgcgccgcagacggtgcaggtgcggacggacgtgccggcctcagtgcaggtagccgtcttggtgaccgtccacgcgccgaaggcgtgcttaccgcaggccacgtcggtcatgtcgtacagagccgtctgaccgcccaccaggcgcatatacgccgtcagcgcgtagtagctctgttcggtggccatctgatccaccgtggcatccgatgcctgatgcttgaacgccgtacccgtgtagaaggtcagcaggccgtccagcacgtggaaggagtttttgacaaagcgtacgtccgcggtgggatcaatacccatggcgcacagggccaccagcacctgggcggtggactcgctgctgctggcagcgcccgccatctcggcgaacgagccatcggccttctgcatggtgcccagccaggtcagcgccttgtccacagcggtcttcaccgcgtcattggtctcgtagtacggtgcgagggactgaatggccatggcggtcatgtccacgtcgtccgtcttgttggtgctgttgatgtaccacgcgccgctgtccttctgcagggacaggatggtctccaccaattggtcgcgggtcacgctgcccgccggggtgtaatcgtggctgtccagggcgatgagcgtccacaccgggccgttcgtgccctggcgcttgatgtacttcatgtcgtccagacctgccagcaggtcgtagccgcccacatcggtcacgtccttgctgatggccgtcagggccaggatcagccgggcgttgtccgtggacttattcttgtccaggcggttggtctcggcattgatatttttcttgacataggccaccgcgttgtcatagtacccggcgggcacggtgcgcccgctgcgggccaggccgatggtcagccactcgccgccgatgctgcccacaatgggcgtgcccttggaggccaaatagtcgccggtggtttggtagacagtctgcacatccggcccaacaggctttgtcaccgtcagggtgacagtatagggggcgctggtcttttcgccatcattggcggtgaacacaagcgtatccgtgcccactctgtcgccagcatagctgtatgcagcgtctgccgctacggggtcagcgccgttgacgctgaccatataggtcagggagtcaccatcaaaatcagaaaagacggttgtcagatccagcgtgtacgcctcatgaagcgtcacggtggcctccgcgccctcggtggctgctgcaggcgcggtatccgctatggtcagcccgctgatataggccagatcatcgccgccgccgctagcgtcatcctttttaaaggacacggtgagcgtccacgtgccggcggtcaggataccgttgtaggtgtccgactttgcgccgctgatacccgcagcgatgttgttggtctccgcgccgctgctcagggtgatggtagccttgtcgtaaccctcctcggaggaaacgccgaagtcgaaggcgatggtgcgctggcgatccagcgtgaacacgaaggaggtcgtagatatggacttgtccacattcgcattgccgctctcgaagcgctgcgccgcgctgttgtaggtccagggatacttgccctgatccgtcatagaggcgctgacaacgccggtggcgggcaaggtcacatactccaaacgggtatcagcccaaaccgtgataagctcattgcagacatcgcaggtataggtgtaatacgcgggatagaccatcttcgtgccggcgcgctccttgtggccggtggcggccacataggtgtcgcgataggatgcctggcacagagtgcaggtgcggagggtgtagcccttctccgtgcaggtgggcgggaccaccgtgccgccgtcggccttgtggaaggtcacgtcctcctgccacttcagagcgggatagccgccgcaaattaagccaaaagcctcggtgtccagttccacggacttcatctgctcctctgtcagcaccgtggcgttggcgtccgccgccagggcatagcagctggtgacggtgacagagcctgcgtccacgctgccgaacgcgccgttgccgccggtgacagtgcccacactgtagcagtcggagacagtggtcgtcgccaccagagtgccggcccagttcatttcgcccttcgcaacgccgccgataccgccggcattactgctggcgctgaccgcgccggtgttgtagcagttagtaacggtaatggcataaccgctgttgccaaacacaccgccggcggtgttgccagtagcggtgacagcgccggtgttgtagcagccgataatgaccgcgccgctgccgacgaagctgccgataatgccgcccacattactgctgccggtgacagcaccgaggttggcgcaatttctaatggtggtattgctgttggcatagcccacgataccgcccatattcctgccgctgccggtgacggtcacgtagctgaagcagttctcaataacgatgttcttgccataggcataacctaccacagaaccgccgctggtggaggaagcgcaggtcatcgtgccgcgcagagccaggttctgaatgtgagagccgccgccaatctgcttgaacagaccactcttggcgttcaggccggtgatctcatggcccgcaccgtccagctccacctttttggcgctggtaatgtccagccaggcatacttgcccagttcaatgtcggcagtcagaacgccggacacatcggcgaccttgctctgctccacaaaccaggccagctccgcgccggtggcgatctgatacacgccgctctcgctcttcttaggctcggtcttactgctgccgtcccaggcgctgtcggaggtgaccgtcagcgtgacggagaactggttcgtgccgtccttggtgacggtgatagagccggtggtatactccacgccctggccggagatggtgtaaaaatactccccggcatagcacttgaagctgccgttatcggccacgttggccacgttgcccgcggcatccttcaaggtaacggtcagctttgtgcgggcgatggccttgccgtcgctgcccacaaagctcagattgccggtgaggaagtccgtcttggccagcgccagcgtcagttcgggcagacgggccaggacgccggaggtgctgggtgcgttgaagccggggttcgtgccggcggcataggtgatgccgcggtgggtgggcacacccggccacccggcctgcttgattgcgccggagagggtgtagctctcaccggcccaatacttgggaatggtgatgctgataagctggcgggccgggttgccgctgaagtcgtacacaccgaagttgccgccggggttggacttgaagaatgtgccgtcctcaccctggtagtacagggagaagttgaagttatacgcgccggacagcttctccttggggctgaccaggttgctgaactgcaggttcacagtgtcgccggccttgagggccgccttggcggcctccgtcagctccttgccgtccttgtccaccagcttatagctgacgccccgggcggtgacgacctgataattggccacgccgttcttctccaccttgatgatgtggcggcccgtggtcaggccggtaacggtgacagtgccgtcctccgccacagtcacaccattgttggtgaaaccgttgaaggtcatggtattgcccacggtagagcgggccacggtgacggtgcagccgctttcgggcttgaagctgtaggaagcgccctcatcgcccaggtagaacaggatgtcgtgctccgcatccagaatacgctgctcatccttggtgatggcggcatccatacgatccaggatcatgttggtcttgatgcccgtgccatcgctgcccaccgtcaccacgaacacgccggtgcactccggccaaatggcggagaactccttgctggcggtgctgctttggccctgcttatggatcatggcgtcgtaggtcaccagcacgatggccgtaccggccttgttggcggtcatagtggccacgttgctgtttaccgcgtccggggtgatggtcaccacgtcgctgggctggccgttgacgtcgatgacctgatagtgcatatcgggtagggccaccttggcgttcatatagctctcgatggcgaaccagttgcggaaggagttcagctcgaacgtctcgtccaccgccatgctcttgtagccctgggtgttgatgttcagatagatgtcggcgcggtcatacacgttctttttaaagcggtagatcgtgtccttggtaaagttcttgtccccgatgtgcaggtcctccgccgtcagagtgacggtggtatccttatcccaactgacataatcccaataggtcacgccgttggggttctgcacccggtagaaataggtctcgccgctgttcaggcgatactggttggggctcacaggctcaacgtaagagtacacataatacttggtcagcgtgcccactgtgatggtagagccctccggcacgttgaaagtgaccgttgcgccagccttgcagctgacggagagactgtcgttcgtggtgggggtcttcttcgcggtggccgtattgaaggtgggctgcttttccggattgggcgtgaccgtggcctgcacggtatcgcctaccacgaagatgcagctgtcggaggttttctcccacgtctgtcccttgccgctgacaaccttacccagcgccacggtgcgcacctcgttgtcggcggaggtgaccttcacatccagggtgtagtcctcacccagcacccagccggagttcgcggagatctgatagatgcgctggatcttaaacccgttcttaccgggcttgacggtcagagacaggccgccgttgcagtcaccgttctcatcgtagccctctacccagtagtcgcccacaggcacggtcagggtataggccgcgtccttagctgttacattggccagtaggtcggtgtcgcccttcgttccgccggtgtaggtgtagagcttgagggacttgacctgcgcgtcatgaataccactgagggtcagcttggcgctgtccttgtcaaacacctccgtgggaccagagggattcataatgacaggggactctgtgacatcctcgcctgtggccaccagatatttcacaacatccttgcctgtggccgtaaaggttgccttaccgttttcatccgtaatagcgttctcgattttcgtcaccgcgccggtggccggatcgacccaggccaattgtacgccctccagaggcttagcagcggccttcaggtcagcaggagtcttgtaacggtagccactcagggcataactgatgcctgagacggtggcggtaatactctcaccctccaccacttcagtcggcacagccacccaggtgtagttatccagccaggaagtcgtgtcctgatgataaataaagaaatctatgatatcgccatcattcaccttagtgttggtgattgtcgtgccgttgtagccgccataaggagaggccataccgtcattgggatagccctgattcaccgcaaagccgttcgcagtcgtttcctcgcaaaacagcttctctaccatgctgccgttcacaaccaggcagtcctttgccgtctccttggtaaaagcctcaccataggtcagctcatgggcgcggaccagcacgtccagcgcggacacgccgtccacatcatcggtatagccatacttctccgccaggtcgtaggacacagtctgcttctccgcgaagccgtggagatagccgcccgccatttgggagcggatagtcacctccgccgtggggacggcagggacgtggggcgctttcaccgtgacggtgtaggtggtgggagtgaccgccggggtggcgttttcgccctcaccgctggcctcccgcgtgtcgccgcagcggatggtcagcaccgtgccgtgtaccatgggaatggccgccgtgcggcggtactcggcgttgcccacggacaggtaaacctgattctgcttgttggccgccgcggcggtcacagtgacctggttgtccttctccggcagcttcagggtgtacgcatgggtatccttattgaacgcgggggtcagctcaccggcactgaagctcagagccgtcaggctggtatcgttcatcgtggtccagtcaccgccgatgtccttgccgccgtcacgggtatacatgacgcggatctcatcgccgtcaactgcggtaaactcgccgaagcctcggttggtgaaccagtcgttcagcgtgcccatccagccgctgccgctgccgccgtcaaactcacccagctccttgtcgccgtgggtgatcttgctgatgtaattgctctccgcgcccacagcggtatagcctttcgtggccaaggcgctgacgatgcagtccatcatggtgttgacctcggcgttcagggtcacgtcagtgtccaccagcgtgccgttccaaaggccggcgtccgtggtgactttatacaccgtgttctccacgatgacgtggacactgccgaggccgctttcgctcccctcggccacttcggcccacacggtggtggggatcaggctcagcgccatgaccagtgccaggaagagcgaaactatgcgtttcttcatctgttgtttcctccttgtgattttctctgtatatgtgaacgcctttcggccttgctgccgtgaagaggaggtgggagaggccggcttggcctctcccacccttatggaaagctgacggtctccgtccagaccgtcatggcttgactgatataagggtgctgcgcgttccccgcgcaacacgaaaaaaacgccggtcatccgccaaaacggaaaaccagcgagtgcggcaagaaaaaagcaccgatatttccaccattggaaacatcagcgcgtactcctgccttgtccatatcacacacggagagagcgcccgctgttgtcggccctcctccatgtaagtctcctgcctcgcgccgcggagcttccgctccccgtctgccgcctaccttctcaggactcgcgtcccaatggctgactttcgtcacacagc

SEQ ID NO: 2753 - DNA, 21971 bp, synthetic construct
  misc_feature 1..21971: note = Synthetic
  source 1..21971: mol_type = other DNA
gtattccgggtcccggacccgggcgatcacatgggcggtgcccagcttccgggccgagatgcagcagatcatgttgacctcgtcctgctcggtggcggccagcagcagatccgccttttccgcccccgcttcccgcagggtctcggcattggtggcgctgccctccacacagatcacgtccagatcgttggacagggtctggatgatctccgggtcctggtcgatgatggtgatgtcgtgtccttcctccgccagaagagcggccacggagtggcccacctttcccgcgccggcaatgatgattttcacagcgatctcccctttcgggttcgttaataacaattgattgtatcatttttcgccggggttgtaaagacagggtaaacgatgattccgtccgcgagtgtaaacgatgattccgtccgcgagagcgatttgttcgcggcgcccggggcggccgcgtctctgcgcccggggcggccgcgtctctgcgcccggggcggccgcgtctcccccttgcggaaaacgccgcttcgcggtataataaattgttatctttcagaaaagaggcagacccatgtttcaaggcttttccaaggaaaccggcgaattcctgtgggagctgagcttccacaacgagcggccctggttcctggcgcacaaagaacagtttgagcgggtgctgaacgagcccttcaaggccctggcgcgggacagcgccgccctgctgcaggagcgctttcccgacatgctgatccagtgccatatctcccgcatctaccgggacgcccggcggctcttcggtcggggaccctacaaggaccacctgtggttcacgatctgggacagcgccgccggcaaggagggccccgccttctggtttgaggtcggcgccgcctcctacggctatggcatgggctttttcgaggcgccgccggcggagatggagctttaccgccgggccatcgatgccaatcccgcccgcttcgcccgcctggcggaggacatcgaggccctgggaaaatacaaggtcatcggcccccgctacgcccggcccaaggggagctatactgagcccgtggcctcctggtacgagcgcaagtgggtgggcgtggaggccatgcgggatctggagggggaggccttcacgccggagctgccccgcatcctggcagacgcctttgaagaattgacccccatgtaccgcttcctgctggaagtccacctggccgccggcaaggcgggcctgttcaaggagagggaggagcgccatggataagctggtcaccgtcatcatccccgcctggaacgcggagcgctggctggagaacaccctgcgcagcgtgctggaccagagctaccgtcagctccgggtcctggtgatcgacgacggctcttccgacggcaccgccgccatcctggagcggctgcggcgggaggacgggcgtctggactaccggaccgtggaaaacggcggcccggccctggcccggaaccgggctctggagctgctgccggaggggacggactacgtgatgttcctggacgcggacgatctgctggagctggacgcgatcgagtacgccctgcgaaacgcccagggggcggagctggtgatcttcggcttctccatccggcagccggacgggaccctgctgccctaccgcgagagggaggagctgctggaccgggaagacctggccgccgccctgcccaggctttacaaggccaatctgctcaaccaggtctgggccaagctcttcgccgcggacctggtgcgggagctccgctttccggactaccgctggggcgaggaccggctcttcctcttcgacgtgctggagcggctgcagcgcctgaaggtgctgccgggctgccggcacatctatgtgatgcacgagggagaaagcctcatcaccaggtattatgagaagaagttcgacgtatgctgtgaaatagaccggcgcatggaagccctctgccgggagctgggcgtccgggaggacgcggatttccgctacatgttcgcgaagagcgtcttctcctgcatgaccaccctttatgcccgctcctgccgcctgaccagggcggaaaagctggctgtgacggcgcgtatcggcagcgatgagcgggtgcatctccgctgccgggacgccgccgggggcttgcccacccgggctctctgcgcggtgctgcgcagcggaaaaccgggcctgaccctggcctgcttccgggtcgtggcctgggccggggagcacttccccgggctgttcaccaggatcaagcacaggaaatagaggaatgaatacgctgcgctaatgaaggaatgaagacgcgttgctaatgaagaaatgaagacgcgttgctaatgaagaaattgtggtgtcgctgcgcgacggattgaaattccccctattccccagtgtgcgcactggggacggtggcagatgaagcgagcccggaatttccgcagcggtcgaaaaatgcaaggaagagcgtacgcccgcagcatttttcgggtaccgcaaggcggacagctgccgagccgcctgcggcgaggccggaaggggtcttcgtttcttcgtttcttcgtttcttcatttcttcctgaacgaaggatcttcatttgttcttgccaagcgcgtccttttgcgctataatcagggaaaatttctcggaaagggggctgcggccatggatcctcggcctatcggcgttttcgactccggcctgggcggacttaccgcgctgctggagctgcgccggctgatgccggaagagaatatcgtctacttcggcgacacgggccgtctgccctacggggagaagaccctggcgcagctgcgcgtcatggcgggccaggacctgcggctcatcgcccaacagggggtcaaggccattctggtggcctgcggcaccctgtccagcaacacccccgagcagctggacgccttccccatcccctgcaccggcgtgctgcggcccagcatccgggccatggccgaagcgccgggagacggggccctgggcatcctcgccacccccgccaccattcgcagcggcgcctttgcgcgggccctgcgggaagcctgcccgggccgggagatcgtccccgtgccctgccccaggctggtgcccctgatcgagaccggccacaccggggcggaggatcccctgctgctggaggcggcggaggagtataccgcgcccctgcggaacgcttccgcggtgctgctgggctgcacccactacggcatcgtggagcgggccctgcgccgcttcctgccggaggacgccgctctggtcagcgccgccgcctgcggcgccaaggccgtggcggagctgctggaccgggaaggcctgcggggcggcagcggagaagaaacgtatttggtcagcggagacccggagacctttgccgcttccgcaagcctgctgctgggccgctccattgccggaagggtccggggcgtccctgtgatgaggatcgagctatgatgaaagaagttgtcatctccatcaacagcaccttcgccttcgacgagggggaggagcagcgcatggagtttaccaccgacggacattatttctatgaggacgaggtgggctgcctcagctatgaggagagcccggtcaccgggctggagggcacacgcaccagccttttcgtcatgccggatcaggtggtggtggaccgggagggcaccgtcaccagccggatgatcttcaaggaggggctcaagagcgccttccagtacgccacgcccttcggcagcgccaatctgggcatcaacacccgccgcatcgtccagaacatgggccagaacggcggcagcgtccggatcgactacgtggtggatatggaacacgtggtggcctcccgcaaccgctttgagatcaccgtgcgggagatcggagcgcagtaaagcttcggcagcctgctcaagtttcagccgcgcggggaatcccgcgcggctttccagcctgtatggaaggaggaaatcggatggaagaaaagaaagctttctatgtggacagtcacgtccacctgagccacggactttataacggcgatttcccgttccaccgctgggacggcaagggctttgtccgggaagagaacggcaggagagaggccctgatcgaccggatgaaggagcaggggatccgcttctgcgtggagccggcggtggagccggaatccaatgagcagctgctggcgctggcggaacgctacccgggctatgttctccccgcggtcgggatccatccgaccaggacctggtcctatgttttgttcgatgagcacggaaaacagcagccgaagcgcctggcctggaaatcccgggcgcagatcgcagcgtatgcggagaacccgagggtcgtggccatcggggaaaccggcctggactttcatcagccccggaaagagcagcaccgcctgcggcagctggcctggttcgtctggtctctgcacctggcgcacaggaaaaggcttcccgtgatcctccacatccgggaggcggactggctggcgctggtggtcctgcgcctgatgaagcccttcctccacggcggtgtgtgccactgcttcaacgggacgccgagagccgcggaactgtacacgagcctgggcctgaagctgggcatcggcgccgcgctgctggcagggggagagcagggcaagcggctcaggagagtcgtccgccagacccggctggaggatatcctgccagagacggacgggcccttccagcggccgccctgcccggaggaggagtcacaaaagcgctggagaaaggccaggaataccagcctgatcctcccggcggtggtgaatcggatcgcgtacctcaaggggcgctccccggaggaaacggcgcggatcaccggcgccgccgtgatggagctgttcggcgtcccccgggaaagtttcgaggaatgacaagcgcagatgcgccggagagaggttgccgcaacatgtaagcgcgcaatttggattaccatccaccgtaggggcggcggctttgccccgcccggcgggacggcagtatacccgatagaaatgttcggcgaattcgtacaagctgcgaattcgccgaacatttctgcctatatgtggctttgcactgccgggaggggacaagcccctcccctacggcggcaattagcatttgcgcttgatttttcatgatgcggcgcgcgtttttctttttccgatcttttgaaaaaatatttttcaaaaagcccttgacaaatctgtaccactgtggtattgttctaatcgcctaatacagtaagcaactaacacaagaacacaagggaggcttgtccatggagtggatctttcgcggagatcagccgatctattctcagctgatccagcagatcaaacagggcatcgtttccggtcaactgccgcccggcggaaggctcccttcggtgcgggacctggccatggaggccggggtcaatcccaacaccatgcagcgggcgctgcaggagctggagcgggagggcatggtctactcccagcgcacggcggggcgcttcgtcacggaggacatgcagcgtattgaaagcgtcaagcgcgcttttgccgcggaacacattcgcctgttccgggagggcatggcgggacttggctacggcagggaggaaattctggccctgctgcaggaggaaaaggaggaaaacgatggcgattctggaatgtaagggactgagcaagcgcttcaagtacgtgacggcgctggatcaggtcaatctgtgtatcgagccgggccgggtcgtgggtctgctgggccccaacggcagcggcaagaccaccctcatcaagctggccgcggggctgctgacgcccacggagggcgagatcctcgtcaacggccaggccccgggggtggagagcaaggccatcgtggcctatctgccggaccgggactttctgcccggctggatgaaggtggagcagatgctgagcttcttcggcgatttctatgaggatttcgacgcggacaaggcccgggagatgctgacgcgcctgggcatcaaccccaagcagagcttcaagaccatgtccaagggcacccgggagaaggtgcagctgatcctggtgatgagccgcaaggccgggctctacctgctggacgagcccatcggcggcgtggaccccgccacccgggacttcatcctggataccatcatccgcaactacaatcccgacgctgccgtggtgatttccacccacctgatcgccgacgtggagcaggtgctggacgaggtcatcttcctgcagcaggggcgcgttgccctccaggcctcggtggacagtatccgggaggagcagggcaagagcgtggaccagtatttccgggaggtgtacagatgttaggaaaactgctgaaacatgaattcacggccaccgggcgcatcatgctgccggcgctggccgcggtcacggggatcaccctgctggccaacctgctgctgcgcttcggcgacgccctggcgcagaagctgcggctgctgagcgccctcttcgtgctggtgatcgttgccgccgtcgtggcggtgatcgccgtcgagatcctgaccatcgtgctgatggtgctgcgcttctaccggcacatcctgggccccgagggctatctgacccacgccctgccggtgaacgtgcaccagctggtctggtccaagatcatcgtctccgccgtgtggatcgtggtcaccaacctgctggtcttcctcctgttcatgctgaccctgagctttgccgggcagctgaacctggcggagatcttccgcggcttccccagctggcgggagatcgtggaggtcctgggtcaactggggatctccgaggcccggatcagcacccttatcctcgagatcgtgctcatgatcctggcgtccctgctggtcacctgcctgcacttctacgcggccatgaccctgggccacatcttccccaagaacaaggtcctgctgagcgtgctcatcttcgtgggcatcaacgtggtcttcagcgtgctcagcatggtcggcagcttcggcctgcaggccctgctgcgcgacagcgtctacgccggctttgacgacgccatggtcatgctggtgcggatctttgatttcgcgctggtgctccagctgatccaggcggcgatcctctacgtcgccacggtgctgggcctgaagaagggcctgaacctggcatgagccgcctgctcctggccttcgacctggacggaaccctgttcgacgacgacaagtccatccccgcggagaatctgcgggcgctggaggcggcggcggagcggggcttcgtcctggtcccggccaccgggcgcatggttccgggcatcccggaaaacgtccgctccctgcccttctgccggtattacatcgtctccaacggcgccggggtctacgacgcccgggaggacaaggtcctgctccgggcggagatcccggcggagctggccatccgctgctgcgagcacatggacacgctgcccgtggtctacgactgctaccagaacgaccggggctggatgacccgcagcatgtatgagaactgtgaggactacttccccttcgagccccacatgtaccggatggtcaagcgcctgcgcgttcccgtggacgagctgaaggagaccctgcgggcccggggcgagccggtgcagaagatgcagatgttcttccggccccgggatctggagctgcgggcgcgggagctggagcgcttcccggcgctgtttccggagctctgcggcaccacctcggtgtccaacaacatcgagatcaacagcgcccgggccggcaagggcaaggccctgctggccctggcggcccggctgggcatcccggcggaggacaccgtggccttcggcgacgggaccaacgactgcgagatgctggagatggcgggcctgggcgtggccatggaaaacgccgagcccaggctcaaggccgtcgccgacgagatctgcgcgtccaacaaggacgccggcgtgggaaaaacgattctccgtctgctgggataatgggacaggggacaggggacggttccccggcccgttcacgatgcgcctgcctctcctcacgctgcccgcgcgtcgctatactcctcccctgcgcggtcatggcttcgcgagcccagcgggcgagtcgaaggatcttttttcaatgtcggcaccggccgccgaggagcccgtggccgggcctccgcgtccggagcgccgctttccggtccttttggaacccgtactatcgtgtcaaaaaaggtcttttgtgtggatccgccggaaaaacgcggcggccgcggttttcctccgcgtgtcagaccggcggcctccgcaaacaaacaaaaactggaaaagcgcgggctccggcgcttttgcggcgattagcgaaagcttccaagacgaaaaactccctttgcgcacatactgtcctcgtgcagattttgtgcgcggagggagatttttatgaatctgatcaaaaaaccaatattgacgctgctgaccggcctgatcctggcggcggcgctgcctgtcacggccctggccgaggagctgatcgtgggcggtcaggccgtggggatccgggtgcgcaccgagggcgtgctggtgtccggcacggcggcggtggagaccgaagagggaccccgctccccggcggaggaggccgggatccgggagggcgaccggatcctggcggccaacggccgggaactccacggcgcggcggagctcatcgccgtggtggcggagacgggaggcgagagcgtggagctgagcctgctgcggggcgaggagaagctgcgcctctgggtgcggccggccctggcctcggatgggcgctggatgctgggcatgtggctgcgggacgcggtcaccggcatcggcaccgtcaccttctgcgacccggagaccggcgtctacggcgccctgggccacagcatcaccgatgaggagccggggatctgcgtgcccctggagtccggcgtcatcagcgaggcggtgatcaccggcgtgacccccggcgcgccgggctctcccggagccctgaacggggacttcggcagcggcgcggtgctgggcagcgtggagcgcaacagcgagctgggcatttacggcgtggcggagcggcccctgggcagcatcaccgcggaggtgggcctggcccagcccgggccggcggtcatcctggccacggtggagggcaatcaggtccgggaattccggatccacatcagccgggtctggcgggaggacggccgggagcagctgatgttcagcgtgacggacccggagctctgcgccatcaccggcggcgtggtccagggcatgagcggctgccccatcctgcaggagggcaagctggtgggcgcggtgacccatgtgctgctgaacgaccccacccggggctgcggcctgggcatccgggacatgctggccgccgccggcctggagcccagggcggcctgacggagagaatttttagttcgtagttcgcagtttgtggttcgcggaacaagtcaaacgaaagggatccctcggattgctccgagggatcccttttctacgaactacgagctaagtaaacgctgactaaatcgccctttttcttgcaatacacaaagtattcctgcgaaaaactgccttcatcagaacccaaattctctcgcaatctgctctcgccgatttaatcatcgtttacctaaaaactacaaactcatctcacatggcgccaagagcctccgcgcatttttcctcttgatttttccgcgaaactaagctacaatccaattgttcttataccataccaagaacgatcaggttgctacaataaggtagtacaccgaagagctctaacgccccgattatcggggcgttatctctttaatcccacattttgaaatcgggcctcttgcctcggaacgggctcgatgatatgatagatccaatacaaaacgctcggaaggagaaaaaacatgattccatatgccattggtttggatgtgggtgttgcctcggtgggctgggccgcggtcgctctggacagcaaggaaaatccctgcgggatcctcgacatgggctcccggatcttcgacgcggcggagcagcccaaaaccggcgcttctcttgcggcgccgcggagggaagccagaagcgcccgccgcaggatccgccggaaacggcaccgcaaggagcggatccgggagctgatgctctcctccggtctcctttcggaggaagagctggcccgcctgtacgagggagagctggaggatatctacgcgctgcggaccagagcccttgatgaggcggtcagccggcaggaattcgcgcggatcctgctgcacatttcccagcggcggggcttccgctccaaccgcagcgctgccgccgacaaagaaaacggcctgctgctggaagcggtctcggaaaacgcccagcgcatgaaagccggcggataccgcacggtgggcgaaatgctctggaaagacccgcttttccgcgatcacaagcgcaacaagggcggagactatcaggccaccgtgtccagagacctgatcgaggaggaagtccggcagttgtttgccgcgcagcggggcttcggctgcagcttcgcggacgcttccctggaggaggcctaccttgcgatcctgctcagtcagcgcagcttcgacgagggcccgggcgtcccgagcccctacggcggcagccagatcgagaagatggtggggagatgcaccttcttccccgaggagccccgggcggcgagagccagctattccttcgagtatttcacccttctgcagaagcttgcccacatccggctgcttcaggacggcaagagcgagccgctgaccgaagagcagcgccgggcgctgatcgagctggcgcatcgctctccgaatctggatttcgccaggatccggaaggagctggcgctgcccgcggaatgccgcttcaacgcggtttcctatcggctggaacttgagccggagaaagccgaaaagaaggagaaattcaatcatctgcaggcctatcacgccatgcgtacggcgatcgaccgagggggcaagggccgctttgcgcagatcacgcccgagcagcgggatcggatcggcaccgttttgaccctgtacaagtcggaggagcgggtaaagcaggaactggccgacgccggattggagccctgtgatatagattccctgctgagtctgggcggcttctccaagaccggacacatttcgatccgtgtctgcaagctgctgatccccttcctggagcagggcatgacctataacgaagcctgcgacgcagcggggctctccttccgcgcccacacgaacacggaaaagagcagccggctccgtctcaccgaagacgatcttgcggatatcaccagcccggttgttcgccgcgcggtatcccagaccgtcaaggtcttgaacgcgctggtccgccgctatggcggaagccccgtttttctgaatctggagctggccagagagctctcccgggacttcaacgagcgcaaggccatggagcgcgacatgcgggacaaccgggccaaaaacgagcgagccatggagcggatccaaaaggagttcgggaagcacaacgccaccggtctggatctggtcaaactgaagctctttgaagagcaggacggcgtatgcccatattctctccggcacatcgacccggcgcgtctctttgagccaaactacgcggaagtggaccacatcatcccctacagcctgtccttcgacgattcgtacaacaacaaggtcctggtgctggcggaggaaaaccgcaacaagggaaaccgcctgccgctgcagtatctgaacggacagaggcgggaggactttatcgtctgggtcaataccgccgtccgcagctacagaaagcgccagaagctgctgaaagaacggctgacggaggaggatgaaaagcagttcaaggagcgggccctgcaggacaccaaaaccgcctcccgctttctgctgaacctcttccaggatcatctggaattcgccccctccgctgccgggaagaaaaagcgggtcaccgccgtcaacggagcggtcaccgcttatatgcgcaagcgctggggtatcgtgaagctgcgcgaggacggcgaccttcaccatgcggtggacgccctggtggtcgcctgcaccaccgacgccatgatccagcagatatcccgctatgccggctaccgggagtgccgctatatgcagacggagaccggcagcctggcccttgatgaaagcaccggcgaagtcctccgggaattcccctatccctggccccagtttcgaaaggagctggaggcgcggctgagccccgaccccgcccgcaagatccgggacctgaagctgcccttctactttgaaagcggccgcccgctcccgaagccgctgttcgtctcccggatgccgcgccggaagatcaccggccccgcccatctggacacggtgaagagcccgaaggcgctggacgagggaagcctgatcgtcaaaaggcccttgaccgacctgaagctggaaaagggagaaatcaaaaactactaccggccggacagcgaccgcctgctttacgaggccctgaaagcccggcttgccgcctttgacggagacgggaagaaagcctttgccgagcctttcttcaagccccgcagcgacgggactcccggccccctggtcaagaaggtcaagctgaccgagccgacgacgttgaacgtgcccgtgcacgggggaaagggcgcggcggacaacggctccatggtgcgcatcgacgtgtttcacgtggagggagacgggtattacttcgttcccatctacgtggcggacacgctgaaggcgaagctcccgaaccaggcctgtgtagcgttcaagccacatgaacaatggaagcccatggaagacaaagacttcctcttctccctttacccgaacgacctgatccgcatcacccatcgccgcgggattaagctgagcctggtaaacaaagagagcagccttcctccgaaccaggaatgcacagaggcgtttctatactacgcagcggcaaacatttctactggtgcaataagcgtcagaacgcacgacaacacataccaaatcagcgggcttggaatcaaaactctgggaaagctggaaaaatacacagtggatgtattaggcgagattcataaggtcgagcaggagccccgcctgccctttacgcagaaaaggagctgaatatgtcttttcgtgccgtgatcgtggagaaccccgcccgcatctcgctccggcgggatcagctgatcgtccagacagacagggagcacagtcttcctgttgaggatctcaacgcccttttgctggaggatcgccgctccactgtgaccacagccgctctgtcccgtctggggcagagcggctgcgccgtcttcgtatgcgacgaaaagcactagccctgcgccgttttgactcccttttcccagcacagccgcgcgttggaggatcctggtgtttttcgacctgccggtcaaaaccggcgctcagcgccgaagcgcctcgcgttttcggagttttcttctgtcggatggctattacatggtccaatactccgtctatgcccggatctgcaacggcgtcgacgctgccagcaagcacaaggcccggctgaaagcgcatctgccggacaacggcgcggtccgcatgctggtgattacggagaagcagtatggatccatcgaaatcctgctggggaagctgagcacggaggaagaggacttctctccggagcagccttccgttttttgatcgaaatccttttttcacgcgcacgtttcattattttgttgcatgggaaagcagctcaaagctttgctttgagctgctttttgggatcgtctgttataccataccaagaacgatcagggaactacaacctcgtggcccacaagtggcgggcagagggggttataccataccaagaacgatcagggaactacaaccgccatcaggtcggtgacaacgccgccgctgttataccataccaagaacgatcagggaactacaacgcgtagccataaggagcgctggacacgggcgttataccataccaagaacgatcagggaactacaactggagaacgccctgcatcaccgccgactgagttataccgtaccaagaacgatcagggaactacaacctgctccagcaggtgcgcctcgattttgttgttataccataccaagaaggatcagggtactacccctccgtcatccggcggactgtgacacgccggacgacacctccccttgcacaggggaggtcatgcggacggggcttcgttcgctccctcatctcacatggcgcccaggaagcagtcctggctggccatttcggaatagaggatggcctcccggtcccgcaggtcgcagacccggatgatcccctcgaacatctcgtccccggtgagctcccggtagcggtccgggcaggcgtcgaagaggctctcgtcaaactcgcagcccgcctcgccctggtagatggcggcgtagaagatgccggactccaccaggtcctggaagaagtggctgccgtagctcagctccggccgcagcccgtgggagcgataggccagctcgcagatgcaggcgaagcggttgatctccgcaaagcccaccggcacgcccaggctgggggtggtggtgccccagcggcccggccccagcaggatggcctgctggtccttcagggcgttgttcagcacgccgatctgccgggccacctggtacttgcgctgctccggcagatccagatagggccccaccttcacgaaaaccacgtggcgcacggggatgcaggcgttgccgcccatgaaattgcccttgatgtgccagaagaagtcccgcaccttgggcatgacgccggcctggcccaggccccgggtctggatggtgcggcactgcagcaggttcacccgatattcaccgtcccgggtgaagttgcaggcgtactcgatgtccaccgggtactggtaggtctccgccaccagggacatgatgcgcttcatgacctgggcgaagtccgtgcgcttgagcagcttctggaagttcaggatgtccggcaccggctcgttgtagagcccccactcccggaaacgggccgcggcggccagatccggctccaggaacagagaggggtcggtgttcatgtcccgcttggccagcttttccagggggacggtgacgaagcggttctgcgtcaggtcgatggcgtccaccttgtgctggctgtagcggtactcctcgccgtaggccaccatgggcggcgccgtgggattgtccagccggatgaagcgggcgtagtcgtccgcctcccggtccacggcccgggtgcccatgccgaagaccaggcgcagcatgccgctgttctgctcccggtcctccgagcccatgacgtacaggttcttggagtggcccacgccggccaggtggggatagtagtagtccccgtgacagtcgccgctgacgcgcatcaccagcagggccatctgctcatcccgctccagcaggttccggtcggcccggtacttgatggcgtcggggctgacggtgctggcgtagaccgtgcgcaccgcgttttcaaactcctgatagcgctcctcggggctgccctggttgggacagaacacgctttcgtacttgccggcgaaggcgttgccgatgccgtcctccagaatggagctggagcgcacgatgatgggggactggccgaagtattccagcacggagcggaactgctccttgatgttgtgggagaatttgccgttcagcagcagctcctgcagggcgggggccacccgcagataatcctccggcgtttccatttgggtgcggtattcccagatgttgttctgcacagcataggtatagaacacgtccgcgccgatgaaataggagtcgtggggctcgatgcgccgctcaaagaagtccggatccgtgtcccggatgatgttgcgggccaacagcatgcccacggccttgccgccgatgcagccggtgcccacctcccgcttcttgatctccatcaggtcccggacggagaagtacttgcggcagagctccaggcgctggggctcggtgcccagcaggcagcgcagaatgttctccttcagggccatgccgtccgggtccgtgggctcggggctgccggcctccacagagtcgaacatgctgtcccagcagtcccggtgctcgccggtctgggtgaagatgtcaaagagagcgtaggtctccgcgctggaggagaggatgcggctgtgaggcccgtccaccagcagggggaagtacatggtgggggtgtggcggccgtccaccttcacagggtggatgtagctgcgtccctgcttggtgcggatgttcagcagcacgttggtggcgtggcggatccgggagatggtctcgtaggtgtggcgctcatagcgcagggggatgtaggcgatggcctggcgcttgcgcaggaattccgccgtcaggcagaaaaagttgcagaccatggagtcggaaaaccagtatttctgcaggtcggacaggcagtcgaagagatagaaggcgtcctccggctcggatttgatgatccggtggacctggacggagaaggtctcgaagcccaccgtggcgtccagatcgtactggcggatgttggcgccccgcttggccagggcctcggcgggcaccacctccggatgctggccgaagcgcaggtacacgatgcgccgcccggtgagggcgatgctggtgacgaactgggtggcgatgaacacaaagtcgccgatgcttgccatctgccaggtgacggtgtccccctggcgcagatagtccagggtcttgtccagggcctcgatgccggtggaaatgcggatctcgctgctcatgaacgcttcctccttgcttgatttgggtcctccgggtcagctccggctacagcagcagccagatgaccgcgccccactggagcagagccagcagggggaagcccaggtagaaattgggatgctgggtcttgtggcggaagatctgcatgcccaggatgccgcccaaggcgccgccgaagatcgccagcaggaacagggcccgctcggagatccgatggccgtgcctgcgggacaggcgcttgtcatgctgcatcatgaaaaacaggatcacgctcatgacgccgaaccagattgccagaacggtccccagattgtccagaatcattttcataataacctcccgtagtaccagccggagacgcccttgtgcttgacaaagtagccccgggagcattcctccaccacccggaccttgtcgccctcccgcaggggaagcacatagtccgtacagtcgttgcagtcggtgatgggattgtcggtaaataaatacttggtcaggatatccatctcatagccggtgcggcgatggcggcagcgggaaaactcctcgccccgctccaggacctccacgctgctgtccccccagcggatgtaataggaccgtcccccgccggcctgatcgtccagcacggtgcgcaccgggaagggatcataggacacaaagccgaagtcctcgctgtcccgatgggggatgatgaggcagttgagctgcccgtcatccttcagcacgcagccgccgtcgatgctggcgatgcgcttgttccgatccacgatggggttggcgcagacccggtcccggccgtagagcatcacgggccagtggcccacgatgacccacttggagaaaaagcggtccagcttcagaaagcgctccaccttcaccagctcgtccacgctgtgctgttccagggggatgtccggccgcatgccggcgtggacgaagacaaagttctccgtctccagggcgtggggcaggtttttcaggaagtcccactccgccgggaaggccttcagcagggtcgccttggcggcggtgaagtcccccatctcgaaggggtccagcccggcggcgttgcacatgtcccagagcaggccgcacttgcgccagagaatgtactgcaggaccttctcatcgtccttgtcgtcccagtccgggcggtagatgtcataccagtcgtcgcagttgccgcagagcacccgggtgttgccccggcggctcagctccatcaggatccgcagcatccgcaggctctccgggcccttttccagaaagtccccgtccacgatcagctcgtcccggtcgcagaagcgggccttgcgcagcaccccctcgaaataggggacgttgccgtggatatccgagaccaccagcagccgcttccccggctccggggtccagcgctggatccttggcgtgttcacagctcatcccgcctttccgaaagcgcccgttccaggaccagcagcgtgccggcggcgccgtcctcccggcccacgcaggaaaagccctcccgccggtaaaaggccagggcggcggcgttgtcctccgccgccaccaggcgcagggcccggcggccctgttttcggaagtggacgatggcccggcccagggcctggatgccgcagcccatgccccggtattccgggcggagatacagcaggctcagccagccgcagcccaggcttgacgcccgccgggggtccagatccaccaggcccgccggcctgtccccgtccagaagacgcagcacggactgcccgtcctgccgcaggtgctcccgggcggcgatccagtagggctcggcctgaaaagcgttcagatttccgtgggcggccagccaggcgtcccgatagcaggcgcagtagtagtcccggtcccgatgagggtccaggggctcgtgccgcagggaggggctgccgctccacaccggctgctccaggggccccaggtgggagacgtcgttgaaaagcgtcacccgccagccgcccccttcccggcgcagcaccgtcaccgaggtgttcagcagcatgggcagcgcttcccggtcccgcaggtccaggcccgtgattcgggacagcaggcagcggagggtgaccccgtggctcaccacggccactcgctgcccctcgtgccgccgggcgatctcctccaggcagcggagggcccgatcccccacctgggcaaaggtctccgccccgggctcgcgccagcggaggggatcccggaggaagagctgggcggattccggctcctcgtacaggacgttgccgaaaaactgctgctcccaggggcccacatggatctcccgcagggcggggtccgtgcgcagggggaggtgccggggcctgtacaccgcggcggcggtgagcctggcccggtacaggtcgctggcatagaccgcgtcaaaggaaaggggcagcagccggtccgacagcagggcgatctgccgccgccccagctccgtcacgccgccgtcccaatggccctggaggatgcggaagcggttgccctccgcctgggcgtgccggatcagataaatttctgtcataacttgtcactttccttgaccgaagtggtcgaatacagtataataatacatccagaaaaagcatcacagcaaatcaataaaggcattatatccttttttttcagaatgcacaagcctttttaggaggaatgccgatggttcgcgcggcgatcctggcctccggcgacgggggccggctccaggcgatcctggacgccatgtattttcaagagatcccggactttcagctggtggcggtgatctgcccccggcgggaggattacgccatgaagcgggccgccaacgccggcgtccccgcctatgtggtggacccggagctcttccccaacatgaccagtcacagcatggccgtggcgaacaagctgcgggacatggacattgagctggtgatcctggcgggctacgacctgcccctgggcgtggtgccctatcagttccgcaaccacatcatcggcacctatccggccctctcccccgcctttgaggatgtggagggagacgtgaaccgggccgtgctggagcggggcgtgaaggtcaccggcgccaccgcctatttcgccgacggggacgggggcgtgggcggcatcatcctgcagaaggccatcgacgtgctgccggacgatacgcctgagagcctgggcacccgagtgatggaggagtgcgagtggaagctgctgagccgggccgtggccctctactgcggcggcaagctctccgtccacggcaagcgggtcatcgtgaaagaatgaacggcgccggccgcggtttgaaaacgtgtttttcaagccgcggccggagtttcgtttttagttcgtagttcgtagttcgtagtaggggcgacctttggtcgcccgccgtcccgcgcctacgttcgtaggggcgacctttggtcgcccgcttcttgcctcccccattgggggcggtggcatccggcgtcccacgcaagccggatgacggaaggggtcttccgttccgtcccccgccgtaggggccgacgccctctgtcaagaccgagatagccctcggcggcccgccgatccgcgccaacgccccgccgtccggcccccattgcgccttcgactccgctgcgcgaagccgtgacggcgcgggggagcgcgcgcaaaaaaatccccggttcttgaaaccttttcgactgcccggacgttatacggatgaaaacctgtttttcgggaggaacgccccatgaaaaccctgaaacgctgtttggccctgctgtcggccctgctcctgctcccggccctgggaggctgcggggagccgccggaggagccggaggtcttcgaggtcgcccgggagagcatctccacgacctatacctatttcttttccgacgacgagccctggacggagatccaccgcggggtgacggaatacgacgaacgggggctggcgacgaagctggccgcgaacatggtcgaggacatgatcaccgtcacgctgagctacgacttcaacgagcagggcgatccggagagcttttccttcctgttcgcagggcaggagttccgggtgctgctggaaaaccgctatgaggagggccaactccgggaggcggtgatcacgggggtcctgctggagggagagcccctggagctggcggccgagccggatttcccctggggcgaaatgcaccgccaggtgcttgcgggcatcctcttcccggcactggagcactacgtcggctaccgggactgctgcctgcgcctggaaggaacggagcagcagatccgctgggagggcggccggcaggtatacgtatgccgcacggaaaacaatcggatccagtacgagacggaaatcacccggacggaggacggcggggacctctccacccaatggacccggcccctggtcgagaatgtgaccatacagaccagcggcatcacccgggagatcgacggccaaaactatctgaggcgggtggtgctctactaccccgacggctcccaaatcgagctgcgcttccgccttgaggacggcggtctgaacgaggagggcgaggccctgcgcctggcctacgcggacgagatccgcgtcgaggggcggggcaaggcggaggaaatggccgcgcggctggaagagtaccgggagctccccttcgccgaatataccctgcgggaggacggccgcgtgcgcagctgcctgctgcgcaatcatctgttaaacgccgttttcgaggaaaactacctctccgaggccaggatctggtacgacgagcaggaccggcagctccggcgggagacgctgatcgacacggatacggcccaccttctccgtgtggaggaacgagaataccgatgagcccgcgaaaattgaaacgccccgacgaaagggcgtgcagccaagggatgcgatagccgcaaaaaggatcttttcgcgccgaacttcgttgaaaatgctcggaatacatagccagtattcctgcgcttttcgcctcgtccg

SEQ ID NO: 2754 - DNA, 21390 bp, synthetic construct
  misc_feature 1..21390: note = Synthetic
  source 1..21390: mol_type = other DNA
ttgatatgggattttctgcaacggctattgccgaccgagtaggacacgaaagcattgatataacttacaactatgcgcacttgttcccgtcaaagcaggctgaaatggcggataagttagatatggaaaggggcgagtaaaatgtcacttaaaaacagagatgagcataaccgctggagaaacaaaaccgtagcgtttcgtgtatcgccggaggaagataagcaaattgaaacttatgtgcggctctcagggcttactaagcaagattatataacaaggcgacttacccacaaagatattgttgttcagggcaatccgagagtgttcaaggccttgcgaaatcaacttgccgaggtgcttgcagaattacagcgcattgaggctggcggcgaagtaaatgacgaactacttgacttaattgaaatgatagccgatattctcggcgggttaaaggaggaatcagaatgatagataaaaaagaaaagaccgctccgaatgtatctgttggcgcagatacggagcagtcaatccaaaaatgcactaacattagtataaacgataacgatgaaaatatcaagtgttttgaagaaatgcaaagagagttgatgttaagcttagacccgttatatctcaaaacaatttcaatgagcgagctatacgacaccgtgtaccagagcaaaccgccgctgattgacggcttactctaccccggaacatatatatttgcaggagcgccgaagctaggcaagagttttcttatgcacagcttgcttaccatatcagcacgggtacgccgatttggaattataccgtccgaaaaggaactgtgctgtaccttgctcttgaagatgattatcacagattgcaggaaaggctgtaccgaatgtttggaacggaaagtacagacaatttgcatttttctgtttcggcaggtcagcttggaaacggtctcgatgaacagcttaccaagtttattgatgaacaccccgatacaaaactgattatcatagacacgcttcaaaaggtgcgagagatcggcggagatagttacagctatgcaaacgattatgaaattatcacaaggctcaaaaagtttgcggacagctgcgggatatgtctgctgcttgttcaccacacacgcaagcagaatgccgatgataaatttgatatgatttcaggcactaacggattgctcggcgccgctgacggaggttttattcttcggaaagaaaagcgtacaagcaatgccgccacgcttgaagtatcaggaagagaccagcccgaccaaaagatttatctgaaccgcaatcccgaaacgcttgtatgggaacttgagaaaacagaaacagagctatggaaacaaccgcctgatccgttgcttgaaaacatttctgataaaatcacaaaagaaaattcagaatggcaaggcactcccacagagcttgtagactttctgggcgttgatataaaagcaaacgctttgacgatgaagctgaatatcaatgcagggcgtttgttcaatgagtatggaatccgttatcaaaacaaacgctgtcacgatgggcgcagggttagtcttgcgttggaacagcgtgacgatgcgtgacggtcgtgtcggtgttttaggtggtacttaaaacatcgtcaccatcgacacagaccgacacggataaagtttttgcagggtgcaggtggctttttttaaaaagccgctcctgcctctcggagagcgcaaaacctgcttgcaggttgcatttttgataggctcgcctgtcaaaagtgcttttgcgttactcttgacaagagtaacagaaccccggctacgccggataaggaaaggatgtgagattttatgaaaagaacgataagcgcaatggtcggtaaaggctctgtaaatcataacagccgcaagttcaaagctgaaaatgtagacggcagccgaacacatctcaatatcgactactgcaatgaaaatatcaaaaaagtctatcacgatttgtttgatgaggctcttgaaagatataacgataagcagaccagagccgaccgcaagatagaaaactattatgaaaaaatcagaaattctaagcaagaaaaaccgtttcacgaactcattttgcagattggcgacaaagaaaatatgagtgcagaaagtgaaaatggacagcttgcaagacaaattttagatgaatattacagtggatttcaagagagaaaccccaacttaaaagtgttctctgctcatcttcatatggacgaagcaacaccgcatttgcacattgattttgtaccgtttaccaccggaagcaagcgtggacttgatacaagagtatcactcaagcaggctcttgccgcacaaggttttaagggcggggcccggggagataccgagtggaaccaatgggtaagcgcagaaaaatccgtactcgcatttgttatggaacgccacgggattgaatgggaacacaagggtactcacgaaaaacatctgtctgttttggattacaaaaaacaggaaagagaaaaggaaatcgctgtattggacaaccaacttgccgagaaaaaagacgagtttcaaacggtgcaaagccgtattaaaaactatgataacggcacgcaggttattggagaattggagaaacgcattgaaacagacagcgaatttcagttgcccgatccacctgctttaatgtcgacaaagtcctataaacagaaattcgttgacccgctgataaagaaactgaaagatgtaatcaaagaggtgttttaccgttattatcacgctcttgatagctatcaccgacttaataatactaacgcaaatctttatcgtgagaacgagcgtttgagcaaaatcaatgaccgcttgactgatgaaaatactacgcttcgggctgaaaacaaggattttagattgctccgcaaggtattcgggagtcagcaaatcgatgcgctgatctcacaggcaaaggagcaagaacgacagcgaaagcacacaaaacaaccgtctaatcagcgcacaaagcgcattagaaataatgattttgaaaggtaggaaaacaaaatggcaaagacaatttttgaagaaatgggcggcacttacacacgggttggggattattatctccccaatttgaaactgcccgaagaagaaaagcaagcaaatatcggcgtatggggtatgaggcataaacggtttttgaaagaaaatcatcgtgtactatatgctaacctgatgacttcgggaaagcttgttgcatatcttgatgatatcgagcaacaggcaaccgctatgtttctccggctagtaaaagaactcgctgaaaatgaaaatattacagaaaaacttaaggcagaaaatcaaatgctgtgggttcagaagatgaacaatatccgtaatcgcgcaacggaaattgtaaattcagaattgatttatacagtataaacacaacggcggcagggagaaatctctgccgctatttgccggttgttgcttaaaaacagttgacttatttacggatttaatatatacttaaaatgtgaaattgtaaactgcgatatttatactttgacagaggttgcaatatgattacagctaaaatcggcaatagaatacgtgaactgagaacccaaacaggattaagccaagaaaaatttgctcaaaaaataggtatggatagaacgtattttgcaagtgttgagcttggcaaacgtaatatttctattgttaacatcgaaaaaatagcgaacggtttggaaatatcgctttctgaattgtttaaagatatttaatctgagtccgttttggcggacagaacgttttatataatatagttagaatgattgccggaggacttgtaatgagcgtagctgaaaagacatataaaacctcattgattaataatagacgttacttaggtaataaatataagttgctttcatttattaccggtgttgtaaacgaagaatgtgctgacatcgaaacagttgcggatatttttgcaggaaccggtgctgtttcctctgcttttgcagataaggtacttattactaatgacttgatgtatagtaattatatttgcaattatgcgtggtttggcgctgaaagctatgaccaacaaaaaataattgactatgttgttagatacaatgcaaaaacaaattgcggtgaaaattatatgacacgcaattttgccgatacctattttagtaaaaaagattgtgcaaaaataggatatgttcgtgaggatatagaaagaaattataaaaaaggaaatttaaacaagcgagaaagagcaattttaattacatcattgctatatgcaatggacaaaattgctgtaacctgcggacattatgatgcatacagaaaaggcgcaaaatttgagggctcattagaactttatgttcctctggcagaggttaaaaataatccgaaaaatcaatgctttaatgaggatgctaataatcttgttaagagaatagaggctgacattgtttatatagacccgccgtataattcaagacaatattgtgactcatatcatttgcttgaaaatgttgcacgctgggagaaacccgaggttttcggtgtggctaaaaagatggatagaagcggtatgaagagtaaatattgtacaatcggagcaacaaaagcatttgaaacacttataaatgatataaaggctagatacattttgctttcgtataacaatatggctgaaaaaggcaactgccgttctaatgccaaaatttccgatgatgacattatgagaatacttagccgaaaaggaactgtaaaggtttttgaggaaagctacaaagcgtttacaaccggaaaatcagacatactggaaaacgccgaaagattatttttgtgtatttgctttgatgaggagtaaatcaatatgatacaatcaccgcttaattataccggtggcaagtataagttgttacctcaaatattgccgctgttccctaaagatatagatgtatttgtcgacttgttctgcggtggctgtaatgtcggtatcaatattgattgcaaccgagttatatataatgacttgaatgaaaacttgctgtatttatataatactttcaaaaaccttgataaagaatctgttttggaatggatttatgaaattatagaaaaatatggcttatcccttgtaagtaaaaacggctatgattattacggttgtgaaagcagcaaaggacttggagattataacagagaaggctatttgaaattgcgtgcggattttaatcagaaacacgcaaatgggaatttcgattattattactatgttatgctttatgtaataatcgtatatgcttttaataatcaaattcgttttaattcaaacggcgaattcaatttgccggtcggtaaaagggatttcaataagaaaatggagcaaaagctcattgactttattgatagaatccaagaacaaaattgcatttttacctgccgtgattttagagagtttgatacatctgcattaacaccacaagatttcgtatatgttgatcccccatatttaattacttgtgctacatataacgagcaaggcggctgggatgaaactgccgaaaaagatttacttgcctttttagatgacctgaatgggagaaatatccgatttgcgttatccaatgtactgagaagcaaaggtaaggaaaacgacatattaattgaatggcttaaaagaaatgctgacagatacaagattgtacgacttaattacaactattcaaattcaaattatcaaacaaaagataaaacttcttcttcagaagaggtactgataataaattattgaggggaatatggctatgccaaatgtaattccatataaaagtttttgttggagtttgggaaccaccagtttcagaacaaaaaactttaataaaaccattgaagaacaacttgctctgttagatgagttttggacgctcgaagagaacaaaggccaaagttggtcggggaacaaagagttgcaaactcgttattacgattttatgaaaacgaaagggtttgttgaaggtgaagccgggaacaaaccaaaggacgctcgtgaaaaaacatcagggttagttgatattggcttgattgatgacggaagaaaattgagtgatgtcggaaaggcgttgcttaaaataagtactgaaaatgatttttcttctgacaatcaatttcaaatagataaggatagttttatatatcttaaacagcttttgaaaacatattacaatattgacggtcgtatcgttcgtccttttttggtgttgttgcatttgcttagcaattttgattacttaacacttgatgagtatacatatcttttgccgctatgtataggagagaatgaaacagctgaaatcattaacggcatttcacgattgcgttccaatgctacatctattgatcaaattattataaaccgattgatgggaatgtctaactacaaaacggcattagattattttttagaaaacgaagttacagaagaattagtatgtgaaataggtctcaacagaaaaagtcgacagtatgacaaaccatatctcaagttatatcaagctctgtataaagtctttgtgttgaatgatgttgatagcttgatctctgtttacagtgcaaccagagatataaaaataggcaaatggtggcgtaattatttatttgacactacatctgaaaaagccattagtaatcatcctacgacacatttaaaaacaacattgtttagtgaagtcgaagatgataattctttcaaaattgcatttttcaaaataatgcatttgtttaaagcaaaggctacactttcggattatctagatctcaatcgaagatatattaaaacgacagatgttgttttgtttgaagatgacacgataaagtttgatattgttccgaagcatttcttcaaaacgatagcagaagatttctataaagacacatttactgtttctgagttgttgtatgaaaactgtgatatggttgaaatatccgattgccttgtagttgatgatagtgctattgttgccggaattaacgaagaactaggaataaatgtttcagatatgcaatcggcacgtgttgctcttgaagatacacgttatcaaagattgcagcaccttattgatactaaatttaccgatgacaagatattgtcgcttttggattgctttgaaagcagaaatgatgacgaaatcaggagtatggttaccgacaacgccgatataccaactatatttgaatatgtgcttggtatcttatggtataaaacaagcgagcgacacggcaaaattctggactatatgaaactttcacttgacgccgatttattgccaaaaactcacgcagcaggcggcgaagctgatatagtttacgaatatgaagctactgattgttatccggagcacacacttttgcttgaagcaactcttgctgacagtacaaatcagcgcagaatggaaatggagccggtatcaagacatttaggtatgcatttgatacgtacgggtaatttgaattcgtattgcgtgtttgctacaaattatcttaacataaatgtaatttccgacttccgtagcagaaagacaactccattttatgatccgcaagactattcaaagtctgtaaacggaatgaaaattatccccttgcaaacatcggaattgaaaaagattgtatcaaacagcaaaacttataaggagttgtatccaatatttgaggaggcgtttaattcaccattgcctccacacgagtggtatgaaaactgcgtaaataaatcaatctaacttattttttagaaatacacctatatattagaaaggaggcgacaacaatggggaaaagcatacctgcaatagtaaccccagaagttttacagtgggcacgtggacttgaccggatttccatcgaagaaattgctctaaagctaaaagttgatgtcgccaaaatagaggcgtgggaaaatggaagcgagtatcccactttgccacaagcaaaaagacttgcgaagcaatatcgtgttccatttgcttacctatatcttcctgatactccgcaaaaaacaaaaagattggataaggttgattatagaacatttggcaattggggaattgaagaaatgtctcgtgaacttagatggtttcttagagatatagaagaacgacgtgatacaatgatagaattgtaccaagagaccgaactagagccattgtcatttacattgaatttgtctctggacagtacagaagaaacacttgcaatccaacttcgtaaaatcttatcactaaatgatgataatcaaatcaaattcagaaagcccgaagtagcgttatcgtattgcattgctaaactggaagaacaagactttcttgtgtttcaagctactaaaattcaaccagaagaaatgcgtggcttgtctgttgcatatgatactttcccaatcattgcattaaatcgaaaagatgagccaagtgcgagattgtttacattgctacacgaattggttcatattgttacgaggacatcgggaatttgtaatgatatgagtcaagataagtctaacattggtcaaacggaactgttctgcaataaaattgccggattggctttagttcctacagaactattatttcggaataagcatatacgatctatacagaaatatggacttgatgatacctatatatctgcaatcgcaagagattttgcggtcagccgtgaagtaattttgcataggttatgggatattggcattattaaaaaaacaacgtattttgatattttgaaaagatattccgatgagtatattgcctataaaaacagaagaaaagcggatggatttttgcctcctgctttggataaaggaactcaagtaggtaaactatatacaaaaactgtaatgtcagcttatcacgccgacaagttgagcccacgagaagcaagtagttgtctcttaggtttacgtatcaagcactttggagctatcgaaaggtggtgctactgatggctaaatacgttttcgatagcaatattttcataaatctacaaagacgtcagccaattgatatttatccttcattatggagcagaataggcgaattgatggatgagggaactattgtatctagtcaagaagtttatgatgaaataatgattggtggggatgatttggaaaagtgggcaaaatctcgaaaggaatgcttcgttccatccagtgtaccggtgcaacaggaagtcagagcaatattggcaactcatcgtggattggtcgaaggcggaactaaaaagaactctgccgatccgtttgtgattgccttggcaaagcaagaacattgtaaagtagtcacagaggaagtgcgtacacgaaacgaaaaagctccaaaaattccagatgtttgtgatgcatatcaagtagaatgtatcgatttcgtacactttgcaagggaagtaaaatttgcattttaaaccatcttatattattcgttcgtggcaacgaaatggcaacaaaaaatcggatagcgtatgctttaccaataatacaaacaatgtggatactctctgctaaatctcataaacaaatgcgtttaaaattgatttacagggagcgagtgggaataatacaatgaactcaacaaacccactatttatgcaagtttgcgagtaaaacacaatatattaaaacaaaaaaggcattattgacttttgcagtcggtaatgcctttttcgtatattgattttattttgatgagcaaaaattatacactatttaaaataatatttcaaaacattttatttaacagtatcaaaaattgtactacaaacaatcagagttgacaaatttacttttgttggatataataaaattgttcttataccataccaagaacaattaggttactacaaaaaggtagaaaaccgaaaagcgctgacgactcacttcggtgggtcgttatctttttagtggaggagtttgttatgaaatatgctattggtttagactgtggtattgcatctgtaggtttttcggttgttgaattgttaaatgaccagccatacagaattgtaaaactcggttcaagaattttcagcgaagcggaaaatcctaaagacggctcgtctcttgcatttccgagaagagaggcaagaggaaatcgaagaagactcagaagacacaatcacagattggagcgtataagatttctcattataaaagaaaagatattgactgaagatgaattggcaaatctttttgatactccgctcagtgatatttatcaagtaaggacagaggctttagacagacctttgtcaaataaagaatttgcaagagtgctgattaatttggcacaaaggcgtggctttaaatctaacagaaaaacagacagtacagacaaagaaaacggacttttgttaaatgccataagtgaaaatgaagaaacaatgcaaaaaaacggctatcgtactgtcggcgaaatgttttttaaagatgaaaagtattctttacataagagaaataaaggcggaaaatatttaaatacagtttcacgaaatatgattgaagatgaagcagacaaaatttttaatgcacaaaaatcttttggctgcgactttgcttcagatgaaataaaagaacagtataaaaatattttgctttcgcagagaccgttcgatttgggacccggagaaggtcctgaaaattgcaggagcccgtattttggaaatcaaatagaaaaaatgattggtaaatgtacattttttcctgaagagccgagagcagcgaaagcaacatattctttccaattatttaatttgtggcaaaaaatcaataatataagaattgtttcagataatggaagttctcgttttcttacagaaggtgagagaacaaaagtctttgaattgtgtcacaaatctccaactgtgaattattcaaaaataagaaaagagctggatatttcaactgataaaagattttcaacagtttcttacggatttaaagaagttgaagaagtagaaaaaaagacaaagtttgaatatttgaaacagtatcacaatatcagaaaagcacttgataaattccaaaaagggtacattcaaaaactttcaagggaagaattaaattgtatcggatatgctcttaccgttcacaaagacgatgcaaagattttaaatgcgttgaaagattttgaaatagatgaatttttatatgattatattttaaatataagttcgttttcaaaattcggaaatctgtctgtaaaagcgtgcgatatgcttattccttatttagaaaaagggctgacttatgataaggcgtgtgcagaggttggttttgatttcaaagcacacgataaaagcgaaagaagttttactttgcctgctttttcggatgaattgacagatattacaaaccctgttgtaagaagagccgtttcacagacaataaaagttgtaaatgctattataagggaacaagggacaagtccaacatacataaatattgaattggcaagagaactttccaaaaactttgcggacagaaaagaaatagaaaaagaaaataagaaaaacaatgaaaacaattctaaaattaaggaagaattgtatgagaatttccataaatcaaatgcaagcggattagatatagttaagttgaaattgtggagagagcaggacggaatttgtccgtattctcaaaagcctattaagtatgagttgcttttcagtgacggatatgtcgatgttgaccatattgtaccttacagtatcagttttgacgacagttacaataataaagttcttgtttttgcagatgaaaacagacaaaaaggaaatcgtttgccattgcagtatctcacaggggaaaaacaagaaaattttaaagtttgggtaaatgcaaatatcaaaaactttaaaaaaagacaaaatttgcttaaagaaagcatcagcgaaaatgaatttaaagggtttaaagaaagaactttgaacgatacaaagtatttgagcagagttttgtacaattacattaatgaccatttgatttttgaagattttgaaaacggaagaaaaaaacatgttactgccgtaaacggtgctacaacttcgtacttgagaaaaagatggggcattaagaaaataagagaagacggcgacctgcatcatgcagtcgatgcaactgttattgcctgtacgacagatgctttgatacaaaaagtttcaaagtattctaagtataaggaacttcaatactctgaaaatatagttgtcgattctgaaggggaagttgttgacagttttccgtatccatatccgactttcagaaaggaacttgagataagaacttgtactgatgtcaataatatgattaaagaattgtatcgtttgccgaactattctgcagaagatatcgaaaacattaagccgtgttttgtttcaagaatgccgaacagaaaaacaaaaggtgcggctcatgaggatacaattcattcgggaaaggtcaaaggctattctatttcaaaagttcctcttacaaggttgaaactcggaaaagacggtgaaattgaaaattactacgacaaagagagcgatttattgctctacaacgctttgaaaaagcgtcttgaagagtacggtggcaacggtgaaaaggcttttgctgacttcaacgatgaaaatcctttctataagccaaagtcggacggtacaaacggaccgatagtgaaaaaggtgaaaacaatcaaaaagtccacaatgaatgtttctgtgagaaacggaaacggtattgcagataacggtcctatggtaagaatagatgtatttcatgttgaaaatgacggctactattttgtgccgatttatacggcggataccgtaaaaaaagagttgccgaatttagcgtgtgtacaaaacaagtcatacgatgaatggaaagaaatggatgaaaaagacttttgcttttcactttatcaaaacgatttgattcgtgttactgcaaaaaaagatatgaaattaagtttagtcaacaaaaacagtacgcttccaaaagagatttacggtaacggtatgttcttgtattacaataattctgatataggtacagcatctataactgtttttaattctgacggaacacacaaaataaaaagtttaggtataaagacgcttttaaatatagaaaaatttactgttgacccgataggtaatgttacaaaagtgaacagtgaaaaaagattaaagtttaatacaaataaatgatatgccgtacagaaatatttttattgcaaacgaagcaaaaatgagacttaaaaacaaccagttggttgtttttaacggaaatgagttttcttttccgattgaagatattaaaagtattgttgttgacaatccgagaacaacgctcagtgccaagttagtttcgtatttgagtgaacaaggcgtgtgcttgattttttgtgatgaaaagcatacgccgagcgcaagtcttgttcccatagggtcatattgtcgttctttgaagagaatagagttgcaaatatcacaatctaaaccaaaattaaaacggatttggcagcagatagtggtacgaaaaatagaaaatcaggcagagtgtctaaagataaataatattgataacggaaaattgattgcaatttcaaaaagcgtgcagtcaggcgatacaaataaccgagagggctatgctgcgtctgtatattttaaactgttgttcgggaacaattttacaagagaccaagactgcgtgataaattcagcactcaattacggatacgctgtaatcaggtcttttattgcaaaatgtttggtttgctatggtttagagcctgctttgggaattcatcataaaaaccaactgaactcgtttaatttggcagacgatttgattgagcctttcagacctgttgtggatgtttttgttgctcaaaactatgatggttgggaaaactcttttgacacatatcaaaaagcagaacttcaaaaacttttgaacagtgttgtaaatgtaaataatgaacgatggtctttgacaaaagcaatagaggttttgattcaaagtcttgtaacttcatttgaagaagaaactgtaaatttgaagttgccaaagatagttaaaacgacatattttgattatgactaagtttatgagaatgattgtattttttgatttacccgtaaaggaaaaatcagaacaaaaagccgcttcgaggtttaggaacttccttttgaaagacgggtatttgatggttcaatactctgtatatgctcgagtctgtaacggatatgattctgttaaggcgcatacaaacagactgaaacaaaatttgcctaaaaacggctctgtaagattgctgacaattactgaaaagcaatatgagtcaatagaaatattgcttggagaatacaagcagtgtgatgtttcggagtcttttgaacaattgactttgttgtaaaaaagataaaaaaagagaaaacatgggtgaaaattacctgtgttttctcttttttatttcactaaaaattcttaaatttggctctgttccttaattatttgttcttatattataccataccaagaataattagggaactacaattgcgagcaacaagacggcgtttagattgtgattataccataccaagaataattagggaactacaataaatttagataatgtaattgatgattttaaattataccataccaagaataattagggaactacaatatatcaacttcacttatctgatgaaaagcaattataccataccaagaataattagggaactacaatttgccatattcaagattttatttgtttcgattataccataccaagaataattagggaactacaatatgagaacttgatttttaaatttaaagtcgattataccataccaagaataattagggaactacaattaggcaagactatttaaggggtgttgctaattataccataccaagaataattagggaactacaattgaagaaacaattaatcaaattcaaaaaatattataccataccaagaataattagggaactacaattaaattacagacaagaaataacaaaatagaattataccataccaagaataattagggaactacaataaaaaaacccactgtatatgaatgtacataattataccataccaagaataattagggaactacaattggtattggtgcagttattggtcttttcctattataccataccaagaataattagggaactacaattattttagtacctttgaaaatgcttgttaaattataccataccaagaataattagggaactacaatttgcaagtatttcttccaaatggtcaacgcattataccataccaagaataattagggaactacaatttttttcattcctactactgtttttgatatattataccataccaagaataattagggaactacaattaatataaaacaatggtttgatgatttagattataccataccaagaataattagggaactacaatcgagcagttggctacccgttagggcgacttattataccataccaagaataattagggaactacaattcctacgataacagttcccgttgttgatatattataccataccaagaataattagggaactacaataaaactgcaacaatggtttgacgatgtgggattataccataccaagaataattagggaactacaattgctgttgctgtcggtggtacattaactgtattataccataccaagaataattagggaactacaattttggggaatagtggcttttttatatattaattataccataccaagaataattagggaactacaatatttataacttcaatgaatttgtgtttgatattataccatacctaaataattaataaagcaaaactatctatgttgattttaatattcaaatggcgagctatttgaatattattttactgcgattaagtcaagaagaagagagactctttcaaaattgttattgtttgcaagttttattgcattgcgtttttgttttaagtgtttctttttgccttttttactgtttttgccgtgtttttgaggatttggattttcctttttgtaactttccaatcgtctggttcgctcactttttggaaacggtgttttaatttgtcttaaaatataagggtcgatatttacacggcatctgcctattttcatagaatcatagttaatgttgtgagcttttctgtaatcgtcgtggcagatgatatagtttattatactgtgaacattttttaacttgtttgtttgaaaatgatagccttcgattttagaaactgtactttggacatagtagtcatttttatgataaagaacaggcttatctccataatatactattttccatttacttacaggagtttcaatctctgtactgccgtcatcactcaactgatatacaatattattttcttccatcaattccgtaaaattttcaataatattgtttttacaacaacatttacaaaaacggtgtccgttgcttaactcgtcgcaaacggaagatacatataaagaattattttcaagcgttctttttgaatatgaacaagtatttttgtgaataatcccacttattttatttatatagtatgacaaatgctcgcttcctttcttgtcctgcattgagcatatcataccgatattttcatttcaattaaaatacaaacagagtcctgttttatgtacactgaattgttttcttttgaagataaagtaacatacaaatttatgaatttataattattgacatatattcagcatattttaaatgcttgaaaactgataaaaaacgctcctaatacatttttgatatttttacagtttttgcttttttattgtcaaaaattttcatttgtattttgcgtatttcaacaaacaatacttttgcaaacgcaaaaagaaatgaaaaggagtgttcacaatggcaagtaacaaaagcgtagttccggaggctaaagaagctctcaacagatttaagatggaagctgctgctgaagttggcgtaaaccttaaacaaggttacaacggcgacctcacatctaaacaagcaggttctgtcggcggtcagatggttaagaaaatgattaaagcctatgaagaatcaatgaaataagccaaaatgtgatttttattgaaaatgcagaaatattaaaattctgcttaaagtcggagccttgtgttccggctttaattttattttatattgaaaatattgaacaaaaactgtgtgagtgatataattcatatatcaaaacagaaaaataagagtgattttatgaacatacttgtaacgggcggagcaggatttatcggctcaaatttcatatattatgaacttgaaaattaccccgacgataaaattatttgcttagacaaattgacatacgcaggcaacttatcaaatcttgacaatgcttttaaaaacgaaaattttaaattttacaaaggcgatatatgcgacgaaaaatgtgtcgaaagcatttttaatgatgaaaaaattgatattgttgtaaattttgcggcagaaagtcatgttgacagaagtatcagcgagccgaccgtgttttttaaaacaaatgtcatcggtgttcagacattgcttgaagtatgcaaaaaatacggggtaaaacggtttcatcaaatctcaacagacgaggtttacggagaacttcctcttgacagaaaagaccttttgtttactgaaaaaacaactctttctgcttcaagcccatactctgcgtcaaaagcgtctgccgatttgcttgtgttgtcgtattttaaaacatttggtttgtctgtaactgtcagtcgttgttcaaataactacgggccgtatcaatttcctgaaaaactaatacctttggttattttgagagctatgaaagatgagcgaattcccatatacagcaaaggcgaaaatgttcgtgattggatatttgttaaagaccattgtattgcagttgacagtattataagacatggtacatcaggcgagatatacaacataggtgcaaacaatgaaatgtcaaatttggaaattgtaaatcttattttagaaaaacttaaaaagccgaaaagccttatttcatttgtaaaagacagaccgggacacgacttgagatacgctataaactcaagtaaaattgagcaggaattaggttggtgtgccgaaacagattttttaacgggtcttaaaaaaactgtcgaatggtatattgaaaatgaaaaatggataaactcaatcattacagaagattatataaattattttgacaaaatgtatagtgaaaaattttaaagtacggtgaaatctgtcgtacttttttcgtaagtaacattttgatattgctgcataaactatacagaggtgatatttatgtgcggaattgcaggcatactcagttcaagcattaatttgaaagacgaaaagcagaaaaacatattggaacaggtaagcgacaccttaaaaatgcgtggtcccgatgaacacggggagtacattacggaagatgcggcgttgcttcatcgccgtcttgcaatagtagatattgaaaacggcaaacaacctatgcattttgggaaatatgtaattacttataatggagaaatatacaactccgatgaactgcgaaaagaactcatatcgcttggtgaaaattttaatactcacagcgacacagaagttgttttaaaatcttttgcagtgtggaaagaaaaatcatttgaaaaattaaacggaatttttgcgtttgctatttatgacaaagaagaaaaagaactttatgcagtgcgtgacaaaatgggcgtaaagccattttactattatttttcaaacggcacttttgcatttgcaagccgtgttccgtcgcttttaaaatttcctcaaataaagcctgttgtaaataaaacaggacttatggaaatgtttatgctcggtcctgctttttctcctgacaagacggtgtttaaaaatatttatcaactaaaggcatcacactttttgaagtttaaaaataacgaacttacaataaaaaaatattggtctttaaaagcaaagcctcacaatgaagatttgagcgatacgattgaacatacccattttcttgtcagtgactcaataaaaagacagatggtaagcgatgttgacctttgtgcttttttgtcaggcggtcttgactcgtcaatcatttgcaaagttatgagcgatgaattgaaaaagcagggcaaaacgctttcgacatactctgttgactatgatgataatgacaaatatttcaaaaaaagcagttttcaaccgaacaaagattccgattttattgatttaatatccgactatataggttctgaccacaaaaatatagttctcgacaataaaagcgttgctaaagcgttgattgacagtgctgcagcaaaaggataccctgcttttgccgatgttgactcaagtcttttgcttttctgcaaagaagtgaaaaaagactataaagtttgtctgtcgggagagtgtgcagacgaaatattcggaggatacccttggtatcataacaaagatattttgtttgaagaaacttttccttggtcaagaagtacaaatgtgcgtcaaaagattttgaaaaacggaattttgacaaacacagaggaatatgtacacgaaaaatatttgaaaacagtaaatgaaacagactttctcgacaccgacactgctcttgacagacggatgagagaaatgtttatgctgaatttgaattggtttatgcaaacgcttttgatgagaaaagattctatgagtatggagagttcactcgaaataagagtgccgttttgcgatacacgccttgtcgaatatgcttacaatatgccgtgggagtttaagtcgctttatacgagagaaaagggaatagtcagaaaggcttttgaaaacgagttgccctatgatattgcttggcgtaaaaaaagtccgtacccaaaaactcacaatcctgttttcttcaatacggtctgcgatatgacgagagaaatattaaaggacaatacttctcctttgttcgatatgataaatattgatacggtaaatgctttgattgaaaatccggattgtataaaagagccatggtacggtcaacttatgaaaggtcctcaaattcttgcctatataattcaaatttattattttattaaggaatacaatgttgaatttgaattataaatatgatatattaaaattaaacataatattgcagtgatttattttaaaattcagcaattttctacaatttataaaaattattgcaatgaaaaggggattttaatatggcagaaaagaaaaagctttcaaagggaaaaatagcggcgattgttattgcgtccgtcatagcatttttgctcatacttgcaatagtgggaggaagtattgctcttcatctttattgcaaaccaaaagaatatgaaattacatcaatcagtgaaactcaaaatgaaattaatttaattgcacatcgtggtttcagtgcaatggcacctgaaaattccgctcctgcttttgaagaagcaggaaaggcaaaatattggggtgcagagtgtgatatttacagaactcttgacggcgtttgggtagttactcatgacattcacacatataggttgatggatgaaaatgcatttatagagaaaaagacctttgatgaattgcaggaatttactgttgattcaggttctaatattgataaatatcccgatttgaaattgacaacgcttgatgaatatttggatatatgtaaaaagtacaatatgaagcctattatagaacttaaaggcgaaaacaacacggaacattacgatgaagttgtaaatgccgttagggaaaaaggtcttgaaagtgaaacatattttatttcgttccaccttgaaaatctgcaaaagatatatgaattgacagatgtatgtccgctttggtatcttgtaaaagtaattgacgatgaaaaaattgcagaggcaaaaacactcggaaaaaatgcaggtatagactttgacggcaatcgtgaaaagaatacaaaagaacttgtgcaaaagtgtgcagatgaaggtttggcactcggtgcgtggacgattgacgatgaagaaacgatgaacagactcatttcgtggggcgtaacaacaattactacaaactgtttaacatattagtataaaatgagatatttatatagcccttgcatcttcaaattataattcaacaataggtgttgaataagaagataaatccacaaaaagaaaataagtaaagaaaaaacaagcga

SEQ ID NO: 2755 - DNA, 19891 bp, synthetic construct
  source 1..19891: mol_type = other DNA
  misc_feature 1..19891: note = Synthetic
actatcattttctacctcgttaacgttgatttccattagttcgattatactttatatttaactgcaaatcaacatttgaacgcctaagtatatatacaatatttaaatttcgcagaatttctaaatttcctggtctttttcctaaagttaaaggagtttaaaaacgataaaatgagggtgaggtgaaatttatgaataaaaaatattttataaaagcctgctgttctgtacttgcaggcgtaatgatgattggttcattttcggcttgtcatggaaataaagacgaggtttcccctgatcccgaatatacaaaaaaggtaggagcttatgaaatatggaaaaacactcctgaaactgcaattcctcaatataagatttataatttagtccattcttatctcgatgaatgcgagatttctcaagccaatgctgtaaaaggcgacaaggtgagaaaagttctgtttttgggctacgacggaatgagagcagacgcagtagcacagcttcttacaaacacaaatgaatttgacggaagtaaaagtgcaaccttaaattcaagcggtataaatacggtagcccagcagggcggagtttatctggcatactgcggcggcgaaaaggggacagaaacggaacagacgacatccacatccgcaagctggacatcggaatttacaggggtttggggtgtttcccacggaattaaaacgaacgacgacagtaaaaatatgaaatataaaacctttatgctggaatacgctgaaaaaggtttgaatactgcagttgcgtttgactgggatcagtattttgacgtcaacataaaagaagaagttaagtatgtaatggaaaatgataatattcctatggtattctgtgatactgatagggaaaagaaggataatctggaagatacatacgcagaaactctcgaactttacaattatgttgctcccgacgagccttctccgtctgcgccgtatgattcaggaatacgcgattggacaatagcgcagattgaaagcggaactgatattgtatgcggaattttccataacgttgatactgccggacatacatatgaattttcagttaataatccgcattatatgaattcagcctattcatgcgacagagccgcttacgacattttacaggtggtttatcaaagagaaaaggaatataatgaagagtggctggtaatctttgccaacgaccacggcggaataaaccagggtcacggagaacagtctgatgaagaaagaacaacatggattgccactaaccgtgaaatttcagatgatattttatctggtcagagctgataaggagtaataagtgatgaaaaaaagtaaagctgttagatggataaaaacgggagtttgcatttttctcgttatggctttagtggttttaggagtaatgttttttcccttaaagggagaaaaacatattgaaatttggagtgcagatcaaaaatttgatataagtaaaatacaaactgtcgataaaacgagagaagacttcaaaattcttatgtttaaagatacgcagctttggtcggatctaaaagttaacagcaaatgctatgatgaaatggatgctcttgttgaaaaaactcagccggatttaatagtcctccagggagataatttatccgctttggcaagcagattttcaattcataattttattagccatatggactaatacaaaatcccatgggcacccgtttttggcaatcatgatgctgaaattcctacaacttctaaaaactggcaggctgatttgtatattaagtcagaatactgccttatggaaaagggaccgtcaaatctttggggctgtggtaactacgtaataaatataacagagaatgatttaccggtgtatactttgtttatgtttgacaacagtgagtataccgaatacgaaaacggcgaaaaccgagaaatatggatgggttatgatcaaattgcatggtatgaatggaatgttaaaggaattgccaaatctgccggtagaacaatcgactcaatgactttttctcattttgctatgcctgaatttagaactgccgtagaggaatacggtgttttgggagaaaacaacagctatacaataccccaagaatacggctacggatactgcgattatcttcccggagcagctccggtcaattcaggctttgttgacaaatgcaaagaactgggatcaacaaaatatattttttgcggccatgatcatgaaaataacgcaagtattaaagttgacggaattacttatacatatggtctgaaaaccggtccgtctcccgtaccatggaatcacgctgaagaaacaggtggaacgcttattacaataaacggacaaggcgaacagcaaagtgttaatatagaaaatatagtaattaccgtaaataaataaaaaatgaaagcacttacaaaaatgtaagtgcttttactggctccccaagttggactcgaaccaacgaccctgcggttaacagccgcatgctctcattagtgtcgaagtaaacaccagaaaacatcgtgtttaatatatatataatatgtatattaacttgctactttaagttcagtcggtatattgccttcttcttcgcattcaaggaattgcttgtagttcatatccattactatgtcaatattatagcctttgcctatacgtacttctttaatgagtttgcaggcaatcatctttttctgctctttggttgcaaactgatattcgtctgcccagcttctgaagtcatcatagtaatggtcaaggttgttgatagctgcctgctgattaccgatttgcaattcgtatttagatattgaatcggtattatcagaaattttcttctttgtagattcgatagcatttgaaagcatttcaggcgtaaatttactattacccataagggcatttgcaatttcatctgataattgaacaagctgctttttgagattatcattgtctgctttaagtccattgactttctttcgcatcgcttgaagttctgcttggtatctcttttctacagcaatagattttggagtttgctttattttttcgagatactctaagatgacagattcaacagctttatcaaccttttctgctgaatacacagattgtgcatctttacaggtttttgaatgggttcgattcagacacatatatcgtgttcttctagattcacgaatagaaccgtcagcacaaacatatttatcaatatgacttgttgatatcatgtgaccaccgcaatgggcacaatagatattgcctgacagcagtgcgtgacctcttgtggtcttggctatctgttgcttttcatcattcttccttgagcgctgtttaagaattttttgtacttcattaaactcgtgctcatcaattatctgtagataaggaagatgaggagaggttgttccaccggatattaaatatccgcaatacattcgattctttagaatacggtttattgtattgcactgaaatttacttccgttgtgtgacctaatacctctattgttaagcagggtagctaactgatgcgaacctaatccttcttttaaagttttgctgaatattagttttacaatctccgcttcatcttcatcgatgacaatctgcttgagttcttttcctcttttgttggttttgccactcggaataagtttataaccgtgaggaacattgccaccggtatagacaccatcagcagttaattggctgagcctcgttttaacacgagttgaagttttacggctttcgccgttagcctgccaataacgcataaagtttataagataatcggcttcgctttcgaatctctgctgaccttcctgcgtgctccatacttcaatgccttgttgattgaaccactcaacaacgaatggtgtttcattctggcgtctgccaagacggtcaaacataaaaacaagaagaatatcaaatttcttttgctctgcatcagtttttatgtcctgaatggcatctctatcctcagcagatactttatatcctgatattcctttttcaaaaaattcttttgtaataatccattcgttttgtctttcggcaaattcgtggcaagcagttttctgcatgggaatatcatctttatctacttgtccttttgtagatactctgtataaacaataaactcgtttcattttatcgtcctcacattctttggtgtttaaaatgtgggactgcacttattcacttttcaaggtgcactgaattttgttgttctatacctattatatataatatatgtttcagcgtccagcgaataaatgaatttaattgatacaaccgccacataatttattccttctttcaaatgtttcatataaattacttactatgtagcattctacttgctgattttctttttccgtaaaaaacacacgaacattacaacctaaaacttttcttgtttcacattgcattattttttcatcatgattcatactgttactccttttatgtatttaaatagcaatgctgtctgcatattaacagatagcattgctctgttgttatgtttttgcgtgtaatttgctttcatcacatttgtccacgacgcccctgatgattgggtacatagtaaacggtcatggctttaaccttcattggaatctcaccagccccttcgcgcggcccgctttgcggaagtatcattatcacttagctcgtcatcgcctttgccttttaccattgacagctcggaatactaagcaatgtatttactatatcgtatattcacttttcaaggtgcaaagtatatttgccataaaatgcaaataagtgaagaggaattaaccccttcacttatttagccgttaactcgaatgccttgaacaatctttttaataatttttatattttagtaaaaatagtattaaaccattgatattacattgtctaaagaaatataatgatcctcttccatttcattctttaataatgagtaatataaacagtcttcataaccgtaatctgttttatccctcatacgtaatacagcttcaaatttaaagcctaaacgttttaatacattttgagaacgataattactttttgcacaaaaagttgtaatgttattatatcctaattctttaaagccatatcttaaaacaactgataccgtttctgttgcataacctttcccccaatattttgaacctagacaataagaaataaatcctaatttagcattgctattttcagtgtacaaataaatagtccctatcaaaacattattttcctttaaaaaaactccccagtaacattctttttgatgataataatcctgccatttcgttaagtaatcttttacatcttcaatatcagtgtaacgttcccatgacatatattgtgaaacttttgaatctgaaaaaacattttcaaataattgagtagcatcactcaatttaagttttcttaagtaacaacgttctgattgcaatgtttttgttccaaacctattcaaattaatcccttcttattcaatttatttaataaaattctacacttaaattcatataacgattgatttttaatagacgaattgagatctaaaaattcgttcaatttatacattttagtcttactaaaatcacctaatattatatcggatacatccatatcaaaagaaacatctaaaatattagcccactcgcattgtttgggtatgaaaaaagccttacaacagaatttgttgtaaggctcgtggctccccaagttggactcgaaccaacgaccctgcggttaacagccgcatgctctaccgactgagctattgaggaatattctcaatgctctaatataatagcagattagaggtcgtctgtcaatcctgttcacacaaaatattttgtgtcagcgcaaaacaaggtggagtaatttgtcctttatcggtgtgtatggctgatagcgaataggcaagtcaatccattgatactttttaattacactcttatggttgctgaaaatcttaaaactttcctgaccgtggtatttgcccattccgctgttgccgacgccaccgaagccaagatgagatgacgcaacatgaataattgtatcatttatacatccgccgccgaacgggatatccataagcatttctttttcacgttctttgttattagtaaagagataaaaagcaagaggcttttcgtgtttaagtatgaactcttttgcttcactgatagaattatatgaaataacaggaagcaggggaccgaatatctcgtctttcataagaggagaatcttcagatacgccgtcgataacagcaggcgtgattttgtttgtatcggcgtcgtattggccgccgatgacaacgttttcgttttcaagcagagctttaagccgcaaaaaatgtttttcattgataattttcggaaaatcctctcgggataggggatcagtagaaaacattttttcaatgctggccctcatttcagcaaggaatttatcttttacttttctgtctacaagtatatagtcaggggctacgcaggtttgacctgcgttaagaaatttaccgaatgctattctgtctgcggaaaggcgaagatttgcggtttcgtctaccagacacggatttttgcctcccagttcaagtacaaccggcgttaaattttgggcggcctgcatcattatcttttttccaacgttgacgcttccagtaaagaatataaggtcaaagttaagctgcagcaagaggtcgttttggccctgtttcatgcgcactacggtaacatattctttaggaaaggcgtctgctattattttttctattatgttcgaagtagcaggagaataagacgatggctttattacagcagtatttcctgcacacaatgcgccgataagcggatcaatagaaagcataaacgggtaattccacggagaaatgatcagggttaccccgtaaggttcagaaactataaaacttttggaatgaaaatgtgcaatgggagtaggcactgtttcgtacttcatccattgttttaagtgttttttaacatatcttatttcgctgagcactatgctgatctccgtcataaatgactctgttttagatttattgaggtccgctttcagtgcagcgtaaatttcctcttcatgtcgttttatgctgttttccaatgcatccagtgctttcattctggcttcataggaaaaagttcgtttttcagagaaatattttttctgattgtttactatatcttcaaacataatatcaccctttcaatttccattatatagcacaataaacaaaataacaaataaaaacgagcaaataactgtacaaaatagaaaatgaaatgtttatacatatatgatactgacaaagatataacaatatcgtttctttgattatcaatctaagttaacaagatacgcggtaaaccttatttaataatttgtattgttaatcgtttgataaactattatctttgtataatgtaatataactttttaggtcattaaagtgacaataaattaacaatagagctaaacgacacaccagcaaaaatgacgattaaaagtatagttggctgttctttcgctgtcttgatataatattacgtatttatagtgaaaatcgggacaaatataacatatttattaactttttccctcttgctttacattttttgtctgcgtgatattatgtaaaaaaatgatggattgttcggggtcaaaagttctatgaaaacggattttatcaacggaaagccaatcaaaaatatcatcctttttgcagtgccgattatgctcagttcgctgatgcagtatacgtataatctggttgataacataattgtgggaagatatgtttcgacagatgcactggcggcagtgggaaacgtcagtcccatcaacagttttattatcggtacagcgcttggtctgaccgcaggttttacaattcctgttgctcagtatttcggcgccgggaattaccgtgagatgaatagacaggcaggtaacgcaatatctgtttcaacgattataggtgtgcttgtcattgtcattgcccattttatctcagatcccatattgcgtttgataaatactccggacaatataatttcactgtcagccgactatataaatattctctattttgccgttccttttcagatgctgtataatatttttacaagcattgcccgctcggtaggagacagccagaaaccgctttattttttgttgataagcatttttgttaatcttgtacttgacttgctgttcgttgcaaaacttggtatgggtgtaaaaggagctgcttgggccactctcatttctcaggtggttgcggcaattgcagcgggcatatatgtttttaaatataataaacatattgatataaaaacttccgacctgttgcctgataagaagattacttggcgccagcttaaacttggcattccggtatcgcttcagtttactattaccagtatcggttcaatgattctccagagcgctgttaacggtttcggctcaaatgttgttgcggcgtttactgccgctggaaaggcagagagtattaccaatataccaatgagcgggctcggcgtttctaccgctacatttgttgcccagaactatggtgctcataaattcagaagaataactgacacggttcgcaaagtgtttgtccttgatttggccgtttctgttgtttgttcggtaattttgggaacctgcggcgatcagatcgtccagttgttcatgacaacgtataacgcagaaataatggcggctgcaaagcagtatctgtttgctatttcactttgctacagtcttgtggctgttttgtttgtcctcagaaataccctccagggtcttggctttacctactcaaatatgatagccggagcaggggagttaataggcagaatcgctgttgcgtatcttttcacaccgctgattggcttcaatgcggtatgttttgccggtcctatggcgtggctacttgcagatataccccttattgtgatatacttgaaaaaaagccgtctgtttaaaaagatgtcggcaaattagggggattttcatgacatattatattgccatgagcatcggtgttatcgtttctcttgcgttcgtttttgtaaggtcaagcggtaactccgtgcgtaatctaattttcaaatcggtgtccagtctgttttacatgctttccgctgttttcgccgttattgaaaattacaatgcctacaaatatggctcgcttattatcatgggcggtgcgctcggacttgtcggcgacattttgttggaccttaagggcgtttataagcaggatgccaatgattacctgaaaggcggatttctgtttttccttgtaggtcatatcttctacttcggcgcaatgatttattacaaccgtatggtgtggtggcaggttcttatctgcgcggtaatatctcttgcagttgcagccggaagcgtagccagcgcaaatatccttcatgtccattacggaaagtaccgccgtatcgtgtttatgtacgtaacgttccttgttatgacaaacagcacagctatttgcgccgcaataacaacgcagcataaatcaatgattttagttgctatcggcgcaacactgtttacaatttcagacgttattctcaacagtacatacttcagccgcggctgcgacacaaagccctggcttttcctcaaccacttctgctattacgccggccagtaccttatcgcatcttccgttttcttcttcggaaaataagattttgtcaagtgatttttttatttagtactcttttatgtactttttggaatatattgaaatattttcaaaataatgtttacaaaagtaaatttatgttgtacaatacaattgttcttataccataccaagaacaattaggttactacaaaaaggtagaaaaccgaaaagttataacgactcgcatttgtgagtcgttatctttttataatgaaagaggagtacaaaatgaaatattcaataggtcttgattgcggaatttcatcggtcggctttgctgtaatggaacttgattccaatgatgaaccatgcagaattatcaaccttggttcaagaatttttgataaagctgaaaatcctaaggacggatcatccttagctttgccgcgccgggaagccagggggacgcgaaggcggattaggcgccaccagcatcgcttggagcgcatcagatacctccttgttgaaaggaatgttttgacccaaatagaattagacgagctgtttagcggtaatctgcaagacatttatcagctgagaacagaagctttggaccgtaaggtttcgaataaagaactggcgagaattttgataaatcttgcacagcgcagaggcttcaaatctaacagaaaatctgaggcgcttgataaggaagccggaaaactgctgaatgctgttgaaaacaatcagcaaattctcattgagaatcattatagaacagtaggtgaaatgttttataaagataaaaaattttctcaatttaagcgaaataaggcagaatcatataataatactgtttcaaggagtatggtcgagagtgaaattcatcaaatcttttctgcccagagagaattaggcaatagcgcagctacagaggatttagaagaaaagtatacggaaatagtattatctcaaaggccatttgatttgggacccggcaaaggaaacaaaaattctccaagcaaatattctggtagccaaatagaaaaaatggtgggcaaatgtactttaataaagggagagcaacgagcagctaaagccacctattcatttcagcttttcacattatggcagaatataaataatattaaaatagtttctttcaatggcgaaaaagttaaattgactgatgaagagaggaaaaaaatatttgacttatgccataaatcaccatcagtaacttatgaaaaaataagaaaagaattagctttatcagctgattgcatttttgtgggattgccatatggcgataaatctattgaagaagttgagaaaaaaagaaagttcgaatatttaaaggcttatcatcaaataagaaaagctcttgataagatgaaaaaaggttatatttcatctttaagcgttgaagaacttgacgcaataggagaagcgttttcttttcatagagatgacagcaatgttgttgaatatcttcgtagtaaaaatgtaagagaagaaatatatgactgcttgcttgaaaacatttcaggatttgcaaagtttggccatatttctgtaaaagcgtgtaagatgcttttaccttaccttgaaaaaggaatgacttatgataaagcctgtgatgcagcgggattagattttaaaagtcatgtatcagaaaaatcgctttatctaaaatcaaatagtgaagaacttgaagacataaaaaatcctgttgttcgtcgtgctgtatctcagactgtgaaagttgttaattcgatttttcgcagccagggccattctcctgtctatatcaatatagaacttgcccgtgacctctcaaaaacgttgcaggaacgtaaaaaaatagagagccgaatgaaagaaaacagggaaaagaacgaaaagattgttgaattactcaaaagtgattttaacattaattatccaacaggcatggatatcgttaaattaaaactttggagagagcaggacggtatatgtccgtatactcaaaaaagtatcgcttatgataaattatttgacaatggctatacggacgtggaccatataattccctatagtatctgttttgatgatagttataacaataaagtgctgactttttcaagcgaaaaccgccaaaagcgcaacagattgcctttggaatatttacatggtcaatcagccgaaaaattcaaggtgtgggtaaattcaagcgtaaagaactttaagaaaaggcagaacttgcttaaggaaagctttactgaagaagatagaaaagaattcaaaacaagaaacttaaatgacactaagtatctaagcagggtcctttataactatataaatgatactcttctgtttgaagaatataaaggcggtcgctcaaggcatgtaactgctgtaaacggtgccgttacttcttatatgagaaaacgctggggtattgaaaaaatacgcgaaaacggcgatttgcaccatgctgttgacgcctgcgttatcgcctgcattacccagggaacaataaataaagtaacaaattattctaaattcaaagagcttcggtattcaaacgatatagtggtaagttctgaaggcgaagttattgactcttttccgcttccttatcgtgaattcagaaaagaattggatattagaacccttgatgatcctgttcgtgttctcagagaggttcggcttaccaattattcttcagaagatatagaaagtgtaaagccctgttttgtttctcgtatgccgagtcataaaaataccggcgcggctcataaagatacaatacgttccggtaaaaaagaaggatatacgattacaaaaacaagcctgtgcgatttgaaaataggtaaggacggagaaatacttaattactacaatcgtgaagatgacagattgctttatgatgcgattaaatttcgattgcttgagttcggcggcgacggtaaaaaggcttttccgcctgattttcagttccataagccaaagtcagacggtacacccggacccgtcgtaaagaaggttaagattgttgagcgctcctctcttaatttgcctgtaagaagtggagtggcggcaaacggttcaatgataagaattgacgtgtttaaggtagagggtgaaggattttatttcgtgcctatctatgtttccgatacagttaagccaacactgcctaataaggcttgtgtggctcacaaagattatgctgattggaaagagatgagcgataatgacttcttattctcgctttatccaaacgaccttgttaaaataaccgcgaagaaagatatgaaaatgtcattaatacatgatgacagcactttgccgcctgaaaaatacggcaatgaactaatgatgtattatattggttctgatattgctactgcttcaatagcgttagaaaatcatgacggttcatataagatgagaggtttaggcgttaaaactcttgtaaatattgaaaaatatgttgtggacccaattggcaatataagcaaagtaaataaagaaaagagaatgtattttagataaggtgccgctatgccatatagaaatatttttatcgccaacaaatctgacctgcgtgttaaaaaccaccagctaattgttgacaacggtgaggtcttttcttttccgctggaagatatacgaagcgttcttattgataattgctgctgcatgttgtcgtcaaacctgatttgtgctttatctcgctatggggtctgtcttattttgtgcaacgagaagcatatgcctgtttgccagttgcttcctatttcttcttactgtagaatgaataaaagaatttcgcttcagtttaagcaaacgaagccaaaactgaagcgaatgtggcaggctattgttcaagcaaaaattaaaaaccaggcgcgctgccttgaaatgaattcaattgaagaatgtaaaaaattatattctatatcgtcctccgtgttatctggcgacactacaaatcgagaaggttatgccgcaaacctatattttaaatcgctttttggcagtaactttacaagaagcgaagaaaattctaccaattctgcattgaattacggctatgcaatcattcgctcgtttatttcaaaaacgcttgttgcagagggatttgaaccttctttgggaattcatcataaaagccagctgaattcttttaatctttctgatgacgtgattgagccgtttcggcctgttgtagataattttgtttttaataatatttcagaatgcggtgatttctcaacatgcgaaaaggcgcagcttttaaagcttcttaattgcaaaatgaaagttaacggcgatatttgttctctgtctactgcagtaaatttaatgatacaaagtataattacttcctttgaaaattctgatattgaattaaaattacctgaaataacagaaacagagtattttaattatgactagatttatgagaatgattgtatttttcgatttgcctgtaaaagaaaaagcagaacagaaggcggcttcaaaatttagaaatttcttaataaaagacggatacttgatggttcagttttccgtttattctcgtgtgtgcgctggttatgacgctgttaaaacccacgaattgcggctaaaacgcaatctgccgcctaatggctctgttcgattattaactataacagaaaagcagtatgaatctatgagcatcttgcttggcgaatataagcaaagcgaccttccggtttcttacgaacagttgactttgctttaaaaaagagagagaagaaggaataatttccttttcctctctctctttttttgcccttgtttttctgatttttggcttagttccttaattttttgttcccatattataccataccaagaaaaattagggaactacaataatttctgatgtagatacaaatcttatttcattataccataccaagaaaaattagggaactacaatcagaacctcacattgtttctggacttactattataccataccaagaaaaattagggaactacaattgccataactaccttaaagggtctgggctgattataccataccaagaaaaattagggaactacaattcggcgggtcaactatattttcaagattttattataccataccaagaaaaattagggaactacaattttgtatttccctttgaatttctttggtgtattataccataccaagaaaaattagggaactacaatcttgcggctgtttcgagattgtcccaaaccattataccataccaagaaaaattagggaactacaatagagtaacagtcccccgcaaaaaattttcattataccataccaagaaaaattagggaactacaatttcttcgactaacgtcttagcaattggaacattataccataccaagaaaaattagggaactacaattcattcacaatcgcccttttctcaaattttattataccataccaagaaaaattagggaactacaatttctcgtcttcgtccatgcgatagactagaattataccataccaagaaaaattagggaactacaattttatgcatcagtgatgctgcttctgcaaattataccataccaagaaaaattagggaactacaattaaatcatggactagtgcttgacgttaatattataccataccaagaaaaattagggaactacaatcgcctacacttccgtaaagcagcaattagattataccataccaagaaaaattagggaactacaatgaagcagcgcaaaaggcgcttaatcatacattataccataccaagaaaaattagggaactacaatggcatttcatcacttaaaatttattttgctattataccataccaagaaaaattagggaactacaatattttcggcattgtattcccaagtaacataattataccataccaagaaaattatgttttttattcaagccgttttcaatcttattttaatataatgatgattattaggcaatggataattttaatgtgtataaaaattggattatctaaatttattgcaagaatgttattaaaaagtattgactatttactcgtgtagtggtattatatctaagtcgcattggacacatgtgggccattagctcagttggtcagagccaccggctcataaccggttggtccggggttcgagtccctgatggcccaccatatatttaggggtatagctcagttggtagagcagcggtctccaaaaccgcgtgccgagggttcaagtccttctgcccctgccataaaaaaagcctttatttaagccaaattcggctaaataaaggcttttttctttatgtgattttcaattgtttcaaacactcaatttaacaaattttttgtctggtttcagaattttcacacttttccgtctgctacagcatcaaaaaagcatcaaactttcttgtattatttatgtttagatagtataattgacttatggttaataaatgaacattagtttacaaaagttttggtcaagtattctaaaatattttgtagtaataattggaaaaggaacactgatgacaaacgaagaaatgatgacaattgtttataatcaacttgctattgattataattgcaatcctgatgattttttaaaggatgagattatttttacaattgctgctatgttgcctggaagacgagcaatgccgtttgttaatcctagacttgaaatggtaacatttggaagaggcgttattgtgaatgtttcatctaatcttatgccatttgtaaaaaagaaacttgctggtaaatctcgttatgatgttttgaatagtaaattcgtctatggaataaatccatattttttgcctaatgttaataatattaaggttataaatattaataattacgattttaatcttgttgataatgatattaaacgctattataaatataaaaactttcacaatgctttgcaatataatacatgtagtagcagaccagaagtacttgcgtctgtagcaaaacaggatggcaaaatagttggtattgcttgtgcgagtgctgatagtgatactatgtagcaaattggagtggatgttttgcctgaacatagaggtaaaggaatagcagttaaacttgtgaacatgcttacggttgaaacgcttaatagaggtgttgtaccgtattatactacagataatagtaatatttcatcgcaaagagtagcaataaagtgtggttattcccctgtatggtcgcattgctttaaaacaagactgccaaaaataaaattatggtgaaatgagaaatataaggtatggaaagatattatgcatttactgatgagtacggtgcttttggatggaatattgataatcctacagtgtcaactcactttattataactgcaattattgtcaaagagagtgatttggaaaaatacactcaaatggctgaaaatttaagaaaaaagtattttcaaactggtgaaataaaatctaaaaatgttggtacaaatcataaaagaagaaagaaaatattaatcgatatgcaaaaaatgccgtttaatatatactcggtttgtgttgataagaaaaaatgtttagaaaatatgaattcaaagggattgaattataaaaaaacattttataaattcatgaataatattgttcataaagaactgcgaagagctttcgagaaagttaccattgtagctgacgaattaattgataatgattatatgcagagtttttgtgcctatgtcgatagacatcaagatatgccagatttatttggtgatgctaattttaaatatgaaaatagcaaatatgatgtaaagatacaaattgcggattttattagtggaacattagcctatgcttttgatagtcataaaaaatcttcaaataatccagattatttaaaattattggacaaacaaataatttccattcaattatatccaaaaacttttgattcgtatattcttgaggaaagtccaatagctgaagattatgacgagagaattgcgaaactttgtttttcacaggttgtaaaatatgtcgaaaaacattctcaatccgaagatccagaaataaaagcacaagttattgtattaaaccatatgttgtttaggtttatgaataacgacacaagaggttatatatatactcatgaactaaaagaaagacttaatggtacagaatatgctggggtatcagatgcaactttcagagccaatattattggaaaacttagagacaaagggataataatcgccagttctactaaaggatacaaaattccatcaaaagaatctgaaatatatgattatgttaatcatgatgcaaaaattgttattcctatgctggaacgtttgaaaaagtgtagagacttaattaaattaagcaccaacaatgatttggatccacttgatcacattgaatataaacaattaaaaaaatattttgataatttcgatatctaaattataaatacaatgtttatgttaagaaatattgaaaaatgatattagatataactaattttttcatatctcaaatccattggtaataccattcagtaaatcatcatctctctttacataatacatctcagtaatatcagaagtagagtgaccgaggaggtcggcaacttgtcttggagtcagtgatttgattgttccgtcaggctgttttattccgtttacaaggtttgtagcgaatgtgtggcgaagactgtgtaagcctttcttttctatcttagcaccgtcaagtattcgatagaatctctttctgaaattagacggcttggtgtagttgccgttttcatcgcagacgagaggggagtcctcaccgaagtagaactcctctcttaatttttttatcatttcaatcgcagttgagtttagcggtacaactcgtctgcttgatgcagtcttgagtttaccaacggcgatttctctgcctggttgtttttcagtgcctactcgtttacctacttctttaacaccacgctgaatgcgcataatcttgttttctaaatctatgtcgctgttgtgaagcccaagcatttctgcagtacgcagtcctgtattaagcattagtatgtaagctgctgattgttggtaaaacggtttgcctgttccccaagttttgaaacattctttcttgaatttttctatttcttcaggtgtgaatatcgtaattgtttcacttgcagggagcacttctttgccttgatttgcatagaagtttgctttctttataacacctacgctgcgcatagggtttttaaacagtatttcttcctgctcaagataacggaagtattcgttgagcagattatatgttttctttaccgttgataaagcgtaacctttttcagtcagcgtgttgataagtgtttttatgtcaactgcagttatgttcgctatgattttgtcaccaatgtaaggtgctatttgattgttcagcagttgctccaatctgtcatatgaaactctttctactgacggatacttaaatactttaagataattatacatactgtcttttagccgtttattgctctcattgttctctgatatttctttattgaatttagaaatgtatttagtaatctttttgttgacttcagctttggtggttcctgaaaaactctttcgttttctctcacctacttcgttcatataccaaactacaccgccccagcggttatcagttcgtttgaatatattgccgtttgtaagtaatcttttctgcattttatcactctccttgcaggacaaacactaccataaaaggtagtgtttatccagataattatttctcagtttgcaaattaatccattcaataaatttatctctaggtacaattattcgtccacctacagtcattgacggaaaactctttgtgtgtgataattcataagcacttgttttagaaattccaagtacttctgctacttgaacaatagatagcattaacggtaattcgtcaaatgatttatatttactttccataataaatctcctttcagccagcaaaatatcggcaggcatttgttttttacatattcagtgtgtaatcatagtcatcatattcttcataacctgaagtcttttgtcctttagcaagacgctttttgatactatttttagataacttgtatctttt

SEQ ID NO: 2756 - DNA, 18708 bp, synthetic construct
  source 1..18708: mol_type = other DNA
  misc_feature 1..18708: note = Synthetic
gcttgtcggtgatctcacgcacggagtggtcaaggccgctcatctctgcgatgccgccggcgttgtcggcgatggggccgtaagcgtcaaccgcgacggtgatgccggtggtggagagcatgccgactgccgcaagagcaatgccgtacaggcctgcaaacttgtaagcaaggaagatgcctacgcagatgaggatgacggggacccaggtggacatcatgccgactgcggtgccggagatgatggtggttgcggaaccggtctcggactgctgagcgatcttcttgacgaacttgtaatcgccggaggtgtagacctcggtaacgataccgataacgaggccgacgaccagacctgcaacgatcgcgatggcaggaccgtagctgccgagcatgaccttgctgaggatgatggcggctataacaacgagaagggcggaaacatacgagcccatcttcagtgccttgtgggggttggagccttccttgccgcggacaaagaaggtagcgataacggatgcgaggataccgcatgccgcgatgaccagcgggaagataacggacagatcgccgaactcggcaacgacaactgcgccgagggtcattgcggagatgatagcgccgacatagctctcgaacaggtcagcgcccatacctgcaacgtcgcctacgttgtcgccgacgttatctgcgataactgcagggttgcgggggtcgtcctcggggatgcctgcctcgaccttgccgacgaggtctgcgccgacgtcagcagccttggtgtagataccgccgccgacacgggcaaacagagcgatcgagcttgcgccgagggagaagccgaacagaacgttggtgtcctcgaaaatgaggaacaggacggatgcgccgagaaggccgaggccgacaacgcacatgcccatgacagagccgccggagaatgcaatcgacagagccttgttcatgccgcttgtgcgtgctgcgtttgcggtgcggacgttagccttggttgcaacattcatgccgatgtagcctgcaaggatggagaacagagcaccgaacaggaagcaaagcgcggtgatccagctgcccagaccgaggccgatggcaataaacagaacgactacgaagatcgcaaggatcttgtactctgcaaaaaggaaagcctttgcgccatcgttgatagccgctgcgatttccttcatgcgctcggtacctgcgtcctgcttggagacgaatgctatcttatagaaagcaaacagcagagcgaccactgcgagagcaggtgccaggaacttaagggattccataaaattcactcctattaaattaattactgaactgggagtcgcaacggacacggtgtttataagccgttaacaactcgtttatgtattttatactattgtagtgtaaaaatcaattttaaaatgcgtgtctttcgttcaaattcaacaaatttatcaatttttacgaaagatgcgcgtttttagcgctcaaggtgtgcaaaacacacaaaaatgcatcgaagaagataaaaacactgatattttaataacaaacacagcccgtttttaggcaatccgtcggcaaagaccgaaaattgtgtttttacacggaagcgaaaaagttaaaaattattaaaatgttcaaaaaattaatgttggaaaatcacgaactcgtggtaaaatataaaaataccatacagcgtatacatttataattttaagtgggaggctcgttcatgcttcttagaatatttgccgctatcggagccgcaggctctgttctgcacacgctcattgccggtcaggcggggggcgcattgaaggtcaccggcgttatgctgctgcgttttcttgaatacttcttcggcgctcacatcgcctacgcgctcataatgctgatctcaacagagcttttcataaacaagaataagccgcaggaaaagccgtcaaagttctggctgtggcatctgcatgccgtggcggatcttctgtgcttttatgcgcgcgcggatgtttcgataacgggaacggagcttatcccgaaggatacgcgctatctcatggtggcaaaccaccgttcgcttgccgaccctgtcgtcatggtacacaagatgcccaaggaggagcttaccttcgtatcaaagccgggcaacctgaagatccccatcatcggcaaggtcatgcacaagtgcggctgcctgccgcttgacagggaaaataaccgcgaagcgctcaaaaccgtcaaggcggcgaccgagtatatcgacaaggactatgcctccgttgtcatttatcccgagggcacgcgcagcaagcaggaggatatgctgccgtttcacgcaggctcgttcaagatcgcgcagagagcgaacgttcccgtcgtgtgcgttgcgctgcgcaataccgacagggtcattcacaatttccctcttaaaaagacgaatatatacatagatgttgtcggcgttatcgacgcagagtatgtcaaggagcacaaaaccaaggaaaccgcgcagcttgctcagacgatgatcgaggagaagctcgatgcggaaaagaaaaaggaggatgctgccgctaaatgctgaagctgttgaaactgtttaggtatctgagagcgaaggaatggctgttttgcctgttcagccttgtttttgtatgtgctcaggtcgttcttgagcttatgatacccgattatatgtccgagataacgacgcttatcgaaactccgggcagcgcgatgggcgatgtctggagcgccggcggaatgatgctgctgtgtgcgttcggaagtcttgtctcatcgatcgcggtgtgcttttttgcctcgcgcatcgcggcaaatttctcaaagcgtctgagaaaagaaatgttctacaaggtcgagagcttcactctcgaggagataaacgctttttcaaccgcgagccttataacccgttcgacaaacgacgttgttcaggtgcagatgctggtcgttttgtcgcttcaggttgttgtcaaggcgccgctcatggccgtttgggcgataatgaagatcgccggaaaggcgtggcagtggtcgctggcaacgggcatcgcggtcgtactgcttgttgcgatactgagctttgccgttgtgcgcacgtttccgcgctttaagcgcatccagtggcttcaggattcgctcaaccagtccgcgcgcgaaaatctcaccggcatccgcgtcgtgcatgcgtataatgccgaggagtatcaggaaaagaagtttgaaaaggtcaacaccgagcttctgaacaactccctgtttgcaaaccgcaccatgacgcttctaagcccgttcatgagccttgtcatgaacagccttaacatgtcgatctactggataggcgcggtgctgataaatgccgttgccataaacggcgcggcctcgattgcctcgcgcgttgatatctttgcggatatgatcgttttcatgtcctacgcgatgcaggtcataatgagcttcataatgatcgtcatggtcattatcatcatgccgcgtgcgctggaggctgcaaagcgtataagcgaggtgcttgcaaccgagcctaaggtcgtaagcggctctgtcaccgattccggcgacgtgcgcggtacggtcgagtttaaaaacgtaagcttcacctatcccggcggcagcggcagcgtcatcagcgacgtgagcttcaaggccgacaggggcgaaacggtcgcgttcatcggctccaccggctccggcaaaacgacgctcatgaacctaatcccaaggttttatgacgcaagcgagggagaggtgctcgttgacggagtgaacgtcaaggaatacgacctcgaagcactttatgccaagataggctacgtctcgcagaaggcggtcatgttcacgggaacggttgccgacaatgtcgcattcggacaaaacgcggataagagaaagctgaccgacgcgctggagatatcgcactcggcggactttgtctccgagcttgaggataaggaaaacgcgcacatggcgcgcggcggcacgaacttctccggcggccagaagcagcgcctttccatagcgcgcgcactctgccgcgactgcgagatactcatttttgacgacaccttctccgcgctcgacttcaaaaccgaccgcgagctgagggatgctctgaaaaaccgcaccgacgggcagacaaagcttatcgttgcccagcgcatcggcaccatcatgtcggccgacaggatcgtcgttcttgacgaaggccgagtggtcggcatcggaactcacagggagctgctcaagtcctgcgaggtctatcgccagatcgcgctcagccagctttcggaggaggaacttgccatatgagacacggaccaccgggaagaggcgccgacgaaaagcccaaaaacgtcaaaagctcgatgcttgagctgctgtggtatttaaagccgtggtacaagcccattgttatttcgctcatcttcagcctcgtcggcacgcttctgacgatcatagcgcccgataagcttgcagacctgaccaacaatatcagcgacggactgcaaacgggcatagatatggaccttatcataaagtccatcctcatcatacttgcaatatacataagcgcaaacctcgtcacctgcgcggcaagctatatcatgataaccgtcatgcagaagcttgcgtggagcatgcgcacgagcatcagccagaagataaataagcttccgcttaaattcttcgacaaggtcacagtcggcgacgttttgagccgcatcacgaacgacgttgacaccatatcctcggcgctcaactccagcataacgacgctcgttcaggctgtcgtgcagttcgtgggcgttactataataatgtttgcaaccagcggccgccttgcactgacggcgatcggttcgtcgatactcggctttgtgctgatgttcttcatcgtttcgcgctcgcgcaagtacttccgccagcagcagcagaatctcggcgatatgaacggccacgttgaggaaatgtattcgggccacaacatcgtcagggcctacggcgcaacggcgcagtcgaaaaaagagtttgaccgcataaacgataatctttacaacagtgcgtggaagtcgcagtttttcagcggaatgctgatgccgctgatgggctttgtcggcagcctcggctatgtcgccgtgtgcatcgtcggcgcaacgctcacgatgagcggagccatccgcttcggcacggtagttgcgtttatcagctatgtaaagctcttcaccaaccccctgagccagatatcccaggctgtcagcagtctcatgtcggccggcgctgccggcgaaagggtgttcggcttcctcgccgaggaggaaatgcctgacgacagcggctgcaccgcgcacatcgatcatgttcgcggcaaggtcgagtttgaaaatgtacgcttcggctatgacgaggataagccgataatccacgatttttctgccaatatagagccggggcagaaggtggccatagtcggctacaccggcgccggcaagaccacgatggtaaatctgctcatgcgcttttacgagctgtggagcgggcagataaagatcgacggtgtgctggtttcgcagatgcgccgcagcgacgtacacgcaatgttcggcatggtgcttcaggacacatggctgttcgacggaacatatcgcgagaatatcgcctacggcaagcccggcgtcaccgatgagcaggtcgaggccgcatgcaaactcgtgggtcttgaccactacataaagacgctgcccaagggctacgatacggagcttaacgaccgcagcagcctttcggcaggccagcgccagctgctgaccattgcgcgcgcaatggtcgaaaatgctccgatgataatccttgacgaggctacaagctctgtcgatacgcgaaccgaggtgctcgtgcagaaggcgatggatcgcctcacgcgcggcagaacgagcttcgtcattgcccaccgcctgtccaccatccgcgacgcagaccttatccttgtcatggataagggtgatatcgtcgaaagcggaacgcatgagcagctgctcgaaaagggcggtttgtataaggagctgtacaccagccagtttgaaaacaagtgaggtagagcgttgaaaaaggttgcactgataaccggctcgtcgcgtggcatcggcaggtcttgcgccgtgtcacttgcccggcgcggctacgccgtgtgcataaattacatcgagcgccgcgataaggcagaggagcttcgcgatgagttgcttgccgaggggcatgaggccatgtgctttggagccgacgttgccgacagagccgccgtgcacgaaatggtcggcgcggtgaaggcgcgctttggagatataacgctgcttgtcaacaacgctggcattgcgcgccaaagcctgtttcaggatataagcgaggaatactggcgcaggatattcgatgtgaacgtaaacggtgcgttcaacaccattcaggaggtgctgccgagcatgctgcatgagcactcgggctgcatcgtgaatgtgtcgtcgatatggggcatgcacggcgcgtcgtgcgaggtcgcgtattcggcaacaaagcacgcgataatcggccttacgcgctcgctcgcgcaggagcttgcgccgactcacattcgcgtaaactgcgttgcgcccggcgtcataaacaccgacatggtgcaggtgctcggcgatgaaacgctcgatatgctcgccgaggacacgcccctcggcaggctcggcagacccgaggacatcgccgaagccgtcgcgttcttggcgtccgacagcgcctcgttcataaccggccaaatactctgcgccgacggcggatttataaaatgacattaggcggccttttgcgcgcgttatattgtgtcaggctaataaaaagggctcgctgtctgccaagtgcagacggcgagcccttttgctttgatgcgatgccacattcatgttacgcaaaacgttaatgtttcctccgcaccctcgaaccgggcaaccgcaataaatgtatccgtagctgcgtcaaatcgcctctaaaaaaaggagtctccggggggcggagactccatacgattggggggtggagaaggagatttttataatgttgaacgtaagaaatgctccgttcacttataatgacgcgattttcagcggaatattgcgcccacggtgcaaaaacgacaaaaaagctcccacggcttgtccgtgggagcttaaaatttaaaaatcagtcggtcacatagggcaggagagcgatctgacgggctctcttgatagcctcggtgagctggcgctgatgcattgcgcaggtaccggtagtacgacggggaaggatcttgctgcgctcggaaatgtagcggcgaagctttgcagtatccttatagtcgatgctggtggccttatctacgcaaaactggcagacttttctgcgcttgcggtttttgggattgttcttatcgaaagccattagctgtatcctcctatattatttttaaaacggcagttcgccgtcatcgtcgccaagatcggaaaacgccgacgcgcccatcgacatcgagggggccggagcatcgtagcttgaggagtgacggggctcaccgcgcatgtcgccgccttcgcggcgcttgctttcgccgaaatacatgttgtcaacgacgacctcggcgctgcggcgcttgccgccctcgcggtcggtccagtcgcggatctgcagtctgccggaaacgacagccatgctgcccttggcgaaatacttgctgacgaactcagcagtcgaacgccatgcgacgcagtcgataaaatcggtctgcttctcgccgccgtcgcggccgccgaaatcgcggtcaacggcaagggtgaacgatgcgacaggggtctgtgactgagtgtatctcagctccgggtcacgggtcaggcggcccatgatcgtgatgtgattaagcataactcgtctccttactcagcacgcagggtgatcaggcgacgcatgatgccgtcggtgatgccgaggatacggtccagctctgcggggaaatccgcgccgctggtgaacttcatcagcacatagtagccttcagaaatgtagttgatctcgtaagcgagcttgcgcttacccatctcctccagttcgtccagggtaccatgagcctcaacgagcgccttgaacttctcgacgacagcagcggtctgctcctcggtgaagttcgggttgatgatgtacattacttcgtacttctcagttgcttttgccatggtttgcacctccttctggtcttttggcccccgatttcttcgggagcaaggatagcctgcgcatatacgcagaccataatattatatctgattttcctcgtttgtcaagtatttttagaggctctttaacacacctacggatacgcttattgcggtggcccgaccggagacaatggaagaaaccgtagcgttttgcttaagagagccgaattgctatccgttccgaatgctgcggtttggtctgtaccgcactgcagcaactcgcctctaaaaaatcggtacaagattatctaatattcaatattaggtcttgacaagcggcacattctgtattatagtgcgattatcgcgtacaaccgacgaaattggtgggattttagatgcgtttttgcgctcctaccgatacgcatattgcggttgcccgaccggaaacaacggcatagaccgcatcgctttgcgtaacttaaatgcggcaaagggttttgagacccggttcgagcctgccgactaaaccgcggttgcatgcgcaacgcaaaattgtgcgaaatcagcacaaaaaatcggctgtgtcaaatgtgttcaatggtgagcaaaattgcctctaaaaaggaaagcagccccggatttctcggcagagtcgataccgggctaccgcaaaaaatgtattcgcaggtgcgtcaatgcgcctctaaaaaaaggagaaggacaatgaaagacaatacgatcaagaaattagtgttcgcggcgctgtttgctgcgctcagctgcgcggcgacaatggtcatccgcatcccgacgccgatcggcggctatatccacgcaggcgacgcggtcgtgctgctttcggcgtttctgctcggtccgtggtggggcgcggcggcggccggactcggctcgggccttgccgacctcatagcaagctacggcctgtacgttcccggcacggccgcgatcaagttcatcgtggcgctgctggcagggcttctgctcaactgcaagttcataaaatccgtgcccgtgcgcgcgatcatcgccggcgttgtgggtgaggtgttcatggtgctcggttacctcgcgtacgaggcgcttatcctcggctacggtgcggccgcagtcggcggagttcccatgaattgcatccagggcgcattcggcgtcgttgccggtgcggctctttacgcagcgctgctcaaaacgaagtatttcaagccggtttgacgcgctgcggcaaaaagccaatagcataataaaaaggctcgaaaaccgatgttttcgagccttttgcttggtgcgcgaggcgggacttgaacccgcacgcccggagtgagcactagaacctgaatctagcgagtctgccaattccaccactcgcgcatttaagtgcctgataataatagcattaccggccctcattgtcaagaaaattctttcgccgggcgtttaatattttgtgaagggcgtaaattctatagcaacaattaattctgccgggttaaatgcaaaaatgtgttgcaatttgacggggggtattgtaatataaatacagttcttataccataccaagaactatttaggttactatgataaggtttagtacaccttagagctctgacgcctcgcttttgcgaggcgttatctctttatattgcccaaaatacaaatatagcgtataattatggcataaattacaaaggaggcacagttatgcgcccttatgcgatcggacttgatattggcataacctctgtaggctgggcggcgttggcgcttgatgccgacgaaaacccgtgcgggataataggtctgggttccaggatttttgatgctgccgaacaacctaaaaccggagaatcacttgctgccccaagaagggaggcacgcagcgcaagaagacgcctgcgccgccatcggcacagaaacgagcgtatcaggagcttgatgctcgaggagcaactgatatctcaagacgagctggcggcccttttcgacggccgacttgaagacatttatgcattgcgtgtaaaagcgcttgatgagatcgtcagccgaaccgattttgcaagaatattgttgcacatatctcaaagacgcggatttaaatccaaccgcaagaaccctacgacaaaagaggacggcgttttgttggcggctgtcaatgagaacaagcagcgtatgagcgagcacggctatcgcaccgtgggcgagatgtttttgcttgacgagacgtttaaagatcataagcgcaacaaaggcggcagttatataaccaccgtgacaagagatatggttgccgacgaggtgaaagcgatattttccgcgcagcgtgagtttggcgcgagctttgcaagcgaagaatttgaagagcgctatcttgcaatattgctcagtcaacgttcttttgacgaaggtcccggaggaaacagtccctatggtggcagccaaattgaacggatggtagggcactgcacatttttccccgaggagccgagagcggcaaaagcaacctattcgtttgagtactttacgcttctgcaaaaagtaaatcacattcgtatagtcgaaaacggagtcacctcaaagctgacagacgagcagcggaggataatgattgagcttgcgcatacgaccaaagacgtttcctatgcgaagatacgcaaagccctcaggctttctgacaatcagttctttaacatccgttattcggacagcgcatcggtcgaagataccgaaaagaaagaaaagctcggccttatgaaggcatatcatcagatgcgcagcgccattgaccgcatatcgaaaggccggtttgcaatgatacctcgagcgcagcgaaatgcgataggcacggcgctgtcattatataagacgtcggacaaaattagaaagtatctgacggacgcaggactcgatgaaattgatataaacagtgcagattctatcggaagcttttcgaaattcgggcacatatccgtaaaggcgtgcgatatgcttattccgtttcttgagcagggcatgaactacaatgaggcctgtgccgccgcaggacttaattttaagggacacgatgcaggcgaaaagtcgaagctgcttcacccgacagaggaagattatgaggatataacaagtccggtagctcgcagggcaattgcccaaacgataaaggtgataaacgccattatccgcagggaaggatgcagcccgacctttataaacattgagcttgcaagagaaatggccaaggacttcaaagagagaaacaggatcaagaaggaaaacgacgataaccacgccaaaaacgagcggctgctggagcggataagaacggaatatggcaaaaacaatcccacggggcttgatcttgtgaagctgcgcctgtatgaagagcaaggcggcgtctgcatgtattcgctcaagcaaatgtcgctggaaaaactgtttgagccaaactatgccgaggtcgatcacattgttccatacagcatcagctttgatgacagccgcaagaacaaagttcttgtgctcacagaggaaaatcgcaacaaaggcaacaggctgccgctgcaatatctcaaaggccggcgcagggaggatttcatcgtttgggtcaacaacaatgttaaggattacagaaaacgcagactgctgctaaaagaggaactgacggctgaggacgagtccggcttcaaggagcgaaacctgcaggacaccaaaacgatgtcgcgatttcttctgaattacattgcagataatctcgaatttgcggaatcaacgcgcggccgcaagaagaaagtcaccgctgtcaacggtgccgttaccgcctatatgcgcaaaagatggggcataacaaaaatcagggaggacggagattgccaccatgcagttgacgccgttgtcattgcctgcacgaccgatgcaatgatccggcaagtgtcacgctatgcccaattccgcgaatgcgagtatatgcagaccgagtccggcagcgtggctgtagataccggtaccggagaggttcttcgtaccttcccgtatccatggccgaatttcagaaaagagcttgaagcccgactcgcaaacgaccctgcgaaggtgataaacgacctgcatctgccgttttatatgtccgcaggacgaccactgccggaaccggtcttcgtttcgcgtatgcccagacgcaaggtcacgggtgctgctcacaaagatacgataaaaagtgccagagagcttgataacggctatttgatagtcaagcgtccgcttacggatctgaagctgaaaaacggcgaaattgaaaactattataatccgcagagcgacaaatgcctttatgatgcactcaaaaacgcgctcattgagcacggcggcgatgctaaaaaagcctttgcaggcgaattccgcaagccgaagagcgacgggactccgggcccgatcgtaaagaaagtaaaactgcttgagccgacaactatgtgtgttcctgttcacggcggaaaaggcgctgcagataacgattccatggtcagagtcgatgtgttcctttctggaggcaaatattatcttgtgccgatctatgttgctgacactctgaagccggagctgccaaacaaagctgttacgcgcggcaagaagtactcagagtggctcgaaatggctgacgaggattttattttctctctgtatccgaatgacctgatctgtgcgacaagcaaaaatggcataacgctcagtgtatgccggaaggacagcacactgccgccgactgttgagaataaatcgttcatgctgtattatcgcggcacagatatctcaacaggaagcatttcatgcatcacccacgataatgcttataaactcagaggcctcggcgtaaaaacgcttgaaaagcttgaaaaatacacagtggatgtcctcggagagcaccacaaggtcggaaaagaagtaagacagccgttcaacataaaaaggaggaaagcatgcccttccgaaatgttatgatcgaaagcccggcgcacataagcagcacctgccgtgcaacggttcaatacgtatgctcgttataaccgaaaagcagtttgaagcaattgagatacttatcggaaaattaactgaagcggatgatagctttcagtgcgagcaattatcgattttttgataaaaaaactccgccttatccattgataaagcggagttttctcgatagtctattataccataccaagaactatcagggaactataactaaccgtctggaactttgcgccgacttcatattataccataccaagaactatcagggaactataactatttgacttcaaccacgcgcagcccatcgattataccataccaagaactatcagggaactataacatatcctccatcgggcattgccgcctcgcgcattataccataccaagaactatcagggaactataacccgagctgcctatcttcgcggagtagcccgaattataccataccaagaactatcaggggaataaaattcaaaaaaaggatcaaactttttcatcagttgaggaaatctctgagctttttgcttctgctggggtggcggagcttgcgcagcgccttggcctcgatctggcggatacgctcacgggtgacgttgaactctttgccgacctcctcgagggtacgggtgcggccgtcaactatgccgaagcgcagctcaagcacctttttctcgcgcggcgtgagcgtgtcgagcacctccatgagctgctccttgagcagcgagaagcttgccgcctcgctcggctcggatgcgtcctcgtcggggatgaagtcgcccaggtgggagtcctcctcctcaccaataggcgtttccagcgaaaccggctcctgcgcgatcttgagtatctcgcgcaccttttcgacgggcatgcccatctcggcggcaatctcctcggcgctggggtcgtggccaagctcctgaagcagctggcgcgatacgcggatgaccttgtttatagtctcgaccatgtggacggggatgcggatggttctggcctggtcggcgatggcgcgcgtgatagcctgacggatccaccacgttgcgtaggtcgagaacttgtatcccttggtgtagtcaaacttttcgactgcctttataaggccgaggttgccctcctggatgaggtcaaggaacagcatgccgcggccgacatggcgctttgcaatcgaaacgaccagacgcaggttggcctcggtcatgcggcgctttgcctcctcgtcgccctggctcattcttatcgcaagctcgacctcctcctcggcggtcagaagcggcaccttgccgatctccttgaggaacatgcgaacggggtcgtcggtgctgtagctgtcatcgaccttgacgtcggacatttcctcctcggtgacctcttcgatctcgttgagctcctcaatctccggcatgtcgatatcatcaaggatcgtggccgcgtcgtcatcgctgatgtcgatatctatcttattggcttcgagggcgtcgtaaaacttcgcgatagagtcggcgtcaacgcccttttcctcgagcgctgcgatctccttcgtggagatcttgccggcttttttagccttttccatgagctcattgaggatatcctcggtgtttttagtctctgctgtttcctcggcaggctcttcctcggcggccttggtgcggcgcgtgctctttttcttcggcgccggtttcatggcgtctgctgcacgctcgagaccctgcgtggtcatggtttcaatgtctttatccatagttttacccctcatatcctttggtttctttaagtctgtttgcaagcttgcgaaggtcctcgcccgactgcttcagctcatgccgggagcggatcctttctatgtaatcggcaagcgccttatcgccgttgcgcagcgcctcaggtttttgcagcacggaagctaaaagcgccgcctcctgcggaagaagcaccgcgctcatcgaggccatactgattatctcgccgttttcaaattttgatttaagcacggaatatatccgcgcgagcaccggcgacgagaatatctccggcggcgggagctccttgccgcggcagatgccctgatcgagatacagaagccttatgatgccctcctcggccgcggcggattcgggatcttcatagcgcagctcctttgccttgggctgaaactgccgctcgggatgtgaggcgctttttgcgtcggcgcgctgagccgtgcgcacaaggcgcttgcgccttcgctcaacctcctgcgcgacaacgtcgctggcaacaccggccattgacgcaacgcgcatcgcatagacctgacgctccacgctgcccggcaggtgcgcgaccatatccgaggcttccttcaagaatgcgaccttctgctcgtcgatgctcagatcgtatttgtccgtcacgttttgcagctgatagtcgatgtggttttccgacttgtctatcagattgcggaacgcatccgcgcccttggtctttatatactcgtccgggtcctttgcgccgctcatagaaagcaccttgaccttcagatcgagcttttcaagaagcccgatggcgcgctgcgaggcttttttgcctgcgccgtcgttatcataggcgatgatgacctcgttcgtgtaatgcgagatcagccgcgcctgctcgggcgtgagcgacgtgcccagcgacgcgaccgcgccgtcaaagccggcctggtgcatcatcacgacgtcaacgttgccctcagcaagtattatatgtccgctcttcgattttttagccagattcagcgcaaaaagattgcggcttttgttgaacaccatcgtttccgggctgttcatatactttggctcgccgtcgccgagtattctgccggaaaagccgataaaatcgcccctgacgtcgatgaccgggaacatgagccggttgcggaaggtgtcgtaatgtccgccgtttttgcccttgcggacaagtccggcgtcgaacatctcgtactccgagtagccgagcgtcttcatcgcgtttatgaggctgtcccatgtgtccggcgcgtagccgaggccgaagcgctttgccgtgtgcggcgttatctgccgccgcgccatgtagtcaagcgcaggcttgccctcgggcttgctgagacatgagtagaagaacctcgccgcgtcgcggttcaagtccagaagccgacggcgctttttcgcctcgcggttatcctcctgctcgggcatggtcataccaacgcgctttgcgaggaactcaacggcctccggaaagctgaggttttcgatctccattatgaaatttataacgcctccgcccttgccgcagccgaagcagtgatatatctgcctgtccggcgacacggaaaacgacggcgttttctcgctgtggaacgggcacaggccgaactggttcgagccggagcgcttcgttaagcgcacatactcgcccacgacgtctactatatcgtttttttcgacaagctcctgaaggaagctctccggtatagccattacccatcctttcttttagaggcgctttagcgcacctacggatacatatattgcggtagcccggtgtcgagacaatggagaaaaccatggctgcctcgcgctacagcagtgcgctgccgaatttttcgccgccaccctgtagggaacggatttatccgttccgcttgccacggttttgcctgcacccaccggtcgggacaccgcaataaacgtatcggtacaatgtgaatgcgctattgaaaaaatgcgcttgcgcacacattaattattcatcattcactattcattattaattttacttcaccgtccacgacatggggataaatatctcgctgtatttttccatggcgtagccgtcggtcatgccggagatatagtcgcaaacggcgcgcgaaacgccctcgcggcttgcgataagctgcatctcgtccggcattttatccggatgcttgaggtaatagtcaaaaagcgagccgatgatgccgtcaaccttgctctcctcacccttggcgatcggatttgtgtacacgtccgaatacatgaaggcgtggaagaaatcgaccgcctcctgcatgtaatcgctcatttgaatttttccgccgccgctgttttcgatgaggtcgagcatgatggaatttatcctctcgctgttgcgctcgccgcagcgcgtgcggatcatgtcgggaacgtcctcggcgcggagtattcctgcgcggatggtgtcgtcaaggtcgtggtttatgtacgctatgcggtcggcaaggcgaacgacggtcgcctcggtcgtatcgtccggcgcgccgtgcgtgtgatgcaggatgcccatgcgcgtttcatagcacaggttaagcccccgaccgtcgcgctcgaggatatcgacaacgcgcagcgactgctcatagtgcttgaagccctcttcgtatattttgttgagcgcgcgctcgccggcgtgaccaaacggcgtgtgtcccagatcgtggcccagcgccatagcctcggtgagatcctcgtttaagtcgagcgctctggctatcgtgcgcgcgaggcgcgatacctcgagcgtgtgcgtaaggcgcgttctgtaatgatcgccctccggacgcagatacacctgagttttgtgctttaatctgcggaaggacttggagtgcgttattctgtcaacatcgcgctggaagcaggtgcgtatctcgcactccggctccggtgcgcgccgaccctttgagtcctcggctctgacgccgaactcgccgacgagcgttcgctcgatcatctcgcgcttttctctcggacacgccatgcatttccctccaatcaaaaggcatcaaattttctttcaatactttatacgacgcaaatttatatttccctgcaatttattttaaattttctcgaaaaaattttcggaggcacggctgtacccccgaaaaagttaagctgacaagagccgaacacatatcgcctgtcggctttcattttattctgaccggcataagctcctcgccgacagccagcgcgctgcatgcaccggcgctcagctccgtaacgcgcgcggaaaacgcctcggcgttattctccggcagcagcagcgaaagcagcacgtccgcgccgtagtcaacgttttgcacggccccgtcaagcgaaagacactccgttttcatgcgctcgaaaagcgaatacgggcagccgacctcgagcttcacccagcggcgcacggcggcgataccggccgcgtccagcgcgtcctttgcgcttttcgtgtatgcgcgcagcagtccgcccgttccgagcagaactccgccgaaataccgcgtgacgacgcacacgacgttttcaacgccctcgcgcttaaagacctcgagcatcggcagtcctgccgtgccctgcggc

SEQ ID NO: 2757 - DNA, 15866 bp, synthetic construct
  misc_feature 1..15866: note = Synthetic
  source 1..15866: mol_type = other DNA
gttttcaaggattgcctgcaagccgttaagagtagtttggtcatagtagtttgtcgcatcaatacttgaatatccacttccgcaaggagacttgtagttcgtctgtaagcagtaagctacctgacccgtactgtctatgacatgaaggggagtgcctataccgcgccactggcctgagcttgtatagtattcaaaatatgatgggcatggggtggtacttacgctgacttcctgtgcatacgctgtagaagcaaacagggagcacaacataagtaacagcagaaagattgtctgcagccttataaatttatgagtcttttccatttcatcaccttccttttaaaattaagactcattataaaagcttaaatagtaatcaccccctttcatcaaaaaatggtataaaaaaagagtcccaataaatggaactcttaatttagcttatttaattcatttaataaacttgcaaagtaattcatctacggcatcagtatatctgccctgttgaatgagtgaattgcggaattggtttaggacttgaatgagtaaattgtactcactgctgcttagcgaaacatagtatttgggctttctcataactgaacctccttttactgtattttagccagttttaagaaattcagcaagtatgcgaaaaaacagaaaccctgaaaccattgaaaacacagacttttttatcgcaatggctgtgttgtatgcgccacaggcagctatcaagtttccccgcggttaattcataagtaattttaaagctcagcgcttcggcgctgagctttgttatatgcatactcctacatcgtgccatgtacaccgtctgaattgctgtaagggcatactttcctgcttacaaaatttctttggtgaatagatagagcctaaagctggctgtcttcatccgatagagctggagcatgaggctgaaagaaatggtaaatgcgcttaaagcagattacagtcgggatgtttattactattatgagaataaaagcaaaaagaaatgaatttatctgaaattataaaaccggagcaatttagtaactaccggtataattgtcatggcatagccgataatcagggcataaaaaacggagtgcaaatttagcgctccgtttcggtttttttatgaaagagaatagaaattatccagaagcccttcagtaatatcctcaccgcagcttccggcatagatcattacaatgtggttttctactttgaaaagagcctgagagataaatacggggacatccgcaaaaacggcactgatctttattactcgacagtcctttccggcaatctctttctccagcagttcaacgtctgtatcttcaaagccctgagattccagaccattggcaatgtctgaaaaaatggaatttacatagtcatcaatttcaatcgcgtttccgagagctttgcccaaattttcaaccgaaacattgagggtggaagcggtctcagaatcctcagctgcgtacatttcgtagtagttggcttcttggagcattttctgcctgtaatcgtcatagtctgaaacttcggcttcaattaccataatatccatcatctgcttataatcatagaaaacccagttctcgtccagtgtgcagcctatacctaagtaggggctttcataggtgctgccgtttactacgccgagagcatagggcggggtatcgttgtttgccggtgcatcttccttgctgctgccgcaggcgcagagagaaataagcgttaacacggcaatcagcagcgcaagggattttttcatttctttcatgtgcccctcctttaagttaaaaaaattacccgctgcaaaatgcagcgtaaaccgtaaaaaagtacgtgtactttccaataaatacataatgccgcggaaatggcgaattttcaataggcaatcggatattttaagcggattttcgattaaaataaaaagcgcggtataagtccgcgcttttcagtctttttgtacctatgaatgttctgccatataaaggcttatgcggctctgaatttgggcagcgcactcctcgttattccctttgcccccaagaaaggcgttaatttcctcaataacggcttcaagtacagctttgtcgctgcaaacggatttttgggtgttatatactgcctcctgtgtcagttctatgtcctcgggctggattttcgtaaactgatagtcctctggatatgaggtattcagagtgcgtttaagcccggcttcaaagcgctcctttactggtgagatactgtgattgtttccgcgtagagcataaaggttttcataaagcgccatgccccgtctcggttagggccggatgagagaattccaagccttgtgcagctttcgtttataaagtggctgtggttatctgggccgtaaagggagatcattagctcagcatcgcatttcataaggtagctgcctgtaccctctgaaccggggaaaccggccagaacgtaattaccgccgtagacatcccggcagtccggcccgccgcagctgaaactatccgcaaatttgtatagagaattctgttcattatagaatcctgcggggtccattttgggaaccggttttgaattcagctcttttataagatttaaccagctgatgaaaagggggctgtcaaaattacagctcatattgtcccagtccataaattcaccgatggatgcatggataaatgcaggaagattattttcagcgctgtccggaacatggtcggaattttcggcaataagccttaaaaggctgtctacgttccgggcctccttgcccggatagagcttttcgggcatatagagtgttattaactggaaactgtctgcatattcgtaaatgccgccctgcttttccatggctttaaggagagaggggatgaaggcatctctgcccagatccgaatctgcatctatgtatggcagaagatttacaagaaagccctcatttaaagcgccctccggcagcagacctgtatctataaggtcggcaccgcccgctgtggctgtatctattatcagccgttcacgctgggcctcgtccttataaataagggggcttagctcaatgtaaaactcagggcggagttattaaagcgtatgattgcatcctgaagctcccggctcaggcgcgggccggattgaaaatagtattcttcccctgccttacccataacaatgagtttaaggggctttttaaccggcagctctgcggggcaggtctttcctaaatcccgtataaattcaacatctgccggatggttaatgtcgtattcggatttaataagcgatgcccgcaaagctgccggatttcccgataccaccggaatttcctgcaccaacagctccagcattaagcttttgctctcaccatcgtatgagttttcaaaatactctcttattaccgcctcttttttaggctgacgccacggtgtgcccgtcgctgttatatataatgtttctctctgcgtctttttccggctcacccatgtcatccggggagtattccacaccgtttgaataggtggtggcgcttacatttgcattgccctctgcctgtacatttatgtacatataatcacccttttcatcgttatccccgaaattatatgagaaaaatgtcatggcttcttcttccgatatgggtgataccgccgcgtatacccggtaaaactccccgtctgcaagacaggagagaattttaaagccgcaggactcgtcaacagtgtattcctcgtaattaaaacctgattttcctctaccatgtaatgcgctttaagctcctgctggtgtttaaggtaggcggaaagaccgatggcggaggccgtcaccgcaagcatggcgcagataatggccgcaatcagcagggtgcggcttattttcatcacttttctgccggagacaggccgggtgagattaaaaaattcggcgcagtcggctatatcatgctcatccgcggcgctgagcgattttaaaatatcaaatccgtttagcataagccctcctttttagctcctgagccagcttttcccttgtccggtaaagacacattttggttttgctgagaccctcgttctgtcgttttgcgatctcctttatgggcagcataaaatagtagcgggcgagaaaggtgcgcctttcgtaatcaggcaggctgtgtataaattttcccaccgctgcctccggctccctttcctccacaatttcctcagggtctgacggagcggagatgcactccgaaagctcctctaaggcaagctccgtttcacctctgccccgcttgccggtatttttacgccgccacaggtccagagaaagattgcggcagatgccggcgaaaaagctctgcaatatcgccgggcgcttgggcggcatggtattccatgatttaaaccatataatggttcctgcggcctatggctttccaaggttcgatttcaagggcaaaaacttattgttcggtattgtactgatagcatttatgatgccgaatcagatagtgttcattcctatttatctgatgatggcaagatgggatttactcagaactctgcttccgcagattttaccttttgctgcaaacgcattcggaatattcctgctgagacagtatttcatacaggttccggaggaaataatagaagcagccaagctggacaatgccaaagaaagccagataatgttcaaaattatgatgcctatggcaaaatccgcaatgatgacagctgcacttttcagctttatcagcagatggaacgattacttctggccccttgtaatgacaaatgatgataagctcagaccgtttaccgtaggcattgcaatgttgaaggatgcagaaggaatagttaactggcatgtaataatggcaggaaatactatcctcgtcattccgattatcattatttacatatttgccagcaggcaaattgtaaaagcctttgtgtactcaggcattaaataaggactgaatccgaaaggagtttcagagaataaaaaaattttaggaggatgatcaatgaagaagtttagaagaagcctgtgcgttttactggcactggtaatggtactggcactgtcagccccgacgattttgtcgaaggcttaatgggttactcctattacaatgatgacagcaagctcatttcaattcctttctgccgttcaactcttatcttctactataataaggacgctttcagagaagtaggcctcgactctgaaaagactcccgaaatccaggagctgtgggcatccaaccccatgtacagagtagcttatgaccagctccagtatgctgttgacctgagcagcacccagagctcaagagcgaaatcagagctgccgagcaggcaatcatgaacgacaacaaagaaagaactcacgaaaccgttgatctggccttcgaaatcctgcgggagttcgatttaatgagccgatgcgtgtttacctgcttcgatgctgaaatttcaggttatatgcatgacacatacggagtgaaatgtcagggatttcccaaagaatatatggataattttgttgagggagaaaacggaacctattcaaaacttttctctgtcggtatcggcatgacaccattcaaagaccatcctgactggagaacccttaccccagaactgtgcagagcatttgaggaaatcggtattgaaccatggtgcttctgcactgacagcgacgacatggtggaagaagctgttgcttgcggcgcaaggcttatgacctgcaacaatcctcttcctgcactcagaatattaaaagaaaaatcactgcatccccgatgcatttcaaagcctgagaaataaaaaactggcgtgggatctcataaataaaatgcttgcagcatatgttatgtgcattttgctggttgctatggcaagctcgcttcttgaaagcagcttcggtataattataatgcagtttattatgatgtgcatatttttaggactgccgttcttcagtttgtgggaattgcatggtttctggcgcctgaccccactgttttaagtgtaggctggggcagaatactgtgtttcgttcttcttcccttgctgtacctgctgactgtggaggcggcatatctcataggctataaagatgacagctggatttgaaaattatcttacgatgacaggcttttggccgtagcgcatgagctcagaaggacatttgaaacgaaatattgttgaatataggatggaacttatactatggaaataatacctgacaggtttagtgttgaggactacattggcaatgtcttctcatgcaaatgtgggaatcggcatactattgctttaaaaaaagttgtaataaagtcaggagcgataaatgatgtagcagacatcatcaaggaactaaactgcaaatatcctatgattatttgcggaccgaatggcgggatgcggccggcactgctgttaataaactcgtaagtgagagcggatttaaaccgatttttcatgtcatggacgaagaaaatcttgttcccaatgaggaagcactgggcgagataatgatggcacgcaagattgatgtggacatcatagttgcagtcggcacgggtaccgtgaacgacatatgcaaattcataagcttccacatgggtattccttacataattgttgcgaccgctccctctatggacggttttacctccagcggtgcaccacttgttacctagaagcttaaaactacctacgagtcacatgtaccggcagcaatagtcggtgatgtgggcatactcaaaaaagctcctatggagatgatcacagcgggaatgggcgatatattaggtaaatatatctgccttaccgactggaaaatagcgagaatcgtaaatgacgaatactattgccctgtaattgtggaaatggtacagcaatctcttgagcgggttgcggcaaatgcgaaaaaggtgcatgtcagggatgagcagaccgtaaagcgccataatggaagcgctggttctcacagacattgcaatggcttttgcgggcaactccagacctgtttccggaagcgagcatcatatctctcattaccgggaaatgaagttccagcttgatggcaaaaaagccatactgcacggcacaaaggctggcatcggcacgatgctaaccagtcacatgtataataagcttaagaccataaagccggactttgaaaaagcccatcagcatgccgaaaactatgacatgaaggcatgggaggataatatgcacagaaccttccagaaagcagctcccggtgttatcgaacttgaaaagaaaacagggaaaaacagcgcggaggctcattgtgccagaattgcagttatagagaaaaatgggataagataacagagcttatcgatacttgcgttcctgctaccgagactataatcaacattcttaaggagcttggtgcgcctgctttcccggaaatgatcggaatagattacgatatggtttatgacagcattatcgttgcaaaggaagtgcgcaacagatataccctcttgcagcttctctgggatttgggcatagaggaagagatggcacatgagctggttgactggcttaagacacaaaagggctgagcagatcccatatctgatgcagattgccggagccggaatgcaaatggtaaaggctgattttttaaaccggaatttgtaaaagcagcgaggctgcctatctgccttgacttaacgataaaatttcaccaaaaaactctcagccgttaattaaacctgaaaggggaaaatgatatgaagaatatgccgaaggttaaaataggcattgttgctgtaagccgggacagctttcccgaaagccggtctgtcaaccgcagaaaaaaacttgcagaggcttaccgccgcaaatatgacgcagaagaaatatataaatgccctgtatgcatagttgaaagtgaaatccatatgcagcaggcccttgaggatattaaaaaggcaggctgcaatgcattggcagtttacccgggaacttcggccctgaaattgcggagacccttctggcaaaatgcttccaaggctttatgaaagctatgagccgataggtacactgtgcggcgatatagccgaagagcttggattaagcaaaaatgttaaaattattgccggagccgatgacaatgctgcggcagccataggcaccggaactgtgggacagggaagctgcaatatatctttggaaagctcaggcaccatattcatttccgacagtaaatttttgccgcccagaataatgcgctgcatttattcgcccatgctgacggaggctatcaccttatgggctgtatgctcagcgctgcatcatgcaataagtggtggagcgatgacatactcaaaactgcggattatcaggcggagaagagcaaaataagcaaatttggaagaaaataaggtgtattttctaccctgccttatgggtgagcgctctcctcacaatgactccgatgtgagagctgtggtttataggcatgtcaatgagtacaagccgtgaggatatgactcaggctgtgctggagggcgtggcctatgggctgagagattcaagggagcagctcccaatgccgaaacggtaatgtaattcatgatgcaaagtgcagtggaataagcataggcaaggaaaaatctacgggcgacaatgattgcagcctgtaccacagaaaacccggctatcagtaccagatggaggcagtgtttaaggcataccggcagggctggagcaaggacagcataggctcccatattatccgcagaatcttttcctgtatgcagcctatgagctttcggcaaaggactttttcgcctctacggtgcccctgactctggtgagccttttgtgccttggggcggcatcgttttttgtactgccaaagcagctccctgcacccaagctttccggggaaatcggttctgtgaagcagctttcggtttatgcaggactttttgtgctgtgcctgctgacggttttccatgtaattccatatggaattaccgcaagcatagttattcttgtaatagcacttacggacagaaaagttctgagaaaggttgactatgcgttgcttgcaacctttgtgtgcttttttatagtgtccggaaacttaggcaggattgaaacagtacagaattttctgcaatacctccttaataaaaatgccctgcttaccgcagtcggtacaagccagattataagtaatgttccggcggcggtgctgctgtccacttttacggagcagtggaaacctctgcttcagggtgtgaatatcgggggactaggtacacccattgccttcctcgcaagcctgattacgctgaaactttatttcgcgtggccggatgcaaaaagcggagcatatatggcagtatttacaggggataacattttaggacttgtaatcctgcttaccgttactatgatttgaatataaaaaagccgcctcggttaagaggcggcttttgtgcgtttattatattgagctgatgcaacgacggaatctttttcctcatggagctgttttatacggctttcggtatcagcgtccatgtctttaagcttagctataagtgtttcaattttatgcttcgttttgcgaatatcatttcctgcagcttatgtaaacactggttatattccataattatatcctttctgcttgttacggttgaattaagccaattataacaccgcctctgaatatgcgtcaaattaagaaatattaaacagaaaaacttaaaaagcctcttgcaaaaaatcagaaaaagatgtaatatacaagcagtaacagttcttataccatacctagaactatcaggttactatgataaggttttacaccttaaagctctgatgccctgtattttacagggcgtcatctttttttatccggaatgttgaaaacaaaaataaaataagatataattttataaaaagaaaaaggaggcctcaaaatgcgtgattatggtatagggcttgatataggaataagctccgtaggctgggcagtagtggcacttgacgataatgaaaatccaatgggaattgtcaacatgggttctcgtattttcgacacggctgagcagcctaaaacaggcgcatctctggcggcaccaaggcgggaggcccgctctgcaaggaggagactgcgcagacacagacacagaaatgagcgcatacggaaacttataactgagagcggcgttctgacacaggaggagcttgacggactttataatggcgtacagaaggacgtatatgagctgcgggtaagggcgcttgatgaaaaagtgagccgggaagactttgtgcgtatacttattcacctttcacagcgccgtggatttaaatccaacagaaaaaatgcagcggacggcgaggacggtaaactgcttaccgctgtgaatgagaacaagaagcgtatggaggagcatggctggagaacagccggagaaatgctctataaggacgaatttttctcagagcataagcggaatgtgggcggagagtacctttccacattatcaagagacatgattgaaaatgaggcaaaggctattttttcggctcagcggaaattcggcgctgattttgctgcggaagtttttgagaattcgtatctgaacattcttttaagtcagcgttcatttgatgaaggcccgggagggaacagcccttacggcggaagccagattgaaaaaatgataggctattgcccctttgaaaaagatcagctgagggcggcaaaagctacatactcttttgaatatttcaatctattgcagaaagtaaatcatataaggctgctttgtgacggagaaagcgttcctctgagtgagggacagcggaaaaagcttatagagcttgctcataaggtggcgtcccttaactattcccgcatacggaaggaactgggaataagtgaaaatcagcgctttaatacgctccgataccctgccggagcagagcttcaggatgtggagaaaaaggaaaaattctgctatctgaaagcatatcacgaaatccggaaagcggtagagaaaaacggcaagggcagatttgcacttattacaaaagagcagctgaattctatcggcacaatactttccacatataaaagcagtgaaaatgtacagagaaaactgcgtgaggccggaatagaggagtatgatataaaaactcttgaagcgcttaatttcagcggcttcggccacttatccgtaaaggctctggataaaatcacgccctatcttgaaaaaggcatggtttattccgacgcatgcaaagaagcgggatatgatttcagagggcacagcagcaaaaacagcaggcttctcccgccgctctcagacgataataatgaaattacaagtccggttgtactgcgtgctgtgtcccagacaataaaggttgtaaatgccattatcagaaagcaggaaaagagccctatgtttataaacatagagcttgcaagagaaatggcaaaggatttcagcgagcgcaagaagctggaaaaggatatggagacaaaccggaagaaaaatgaggcggtaatggatcgcatccgcactgagtacaaggtttcacacccaagcggaattgaccttgtaaagcttaagctttttgaggagcaggatgggcgctgtgcatactctcttaaaccaatctcaatcagccgcctgtttgaaccgggatatgcggaaatagaccatatagttccgtatagcattagctttgatgacagctataaaaataaggttctggttctgacagaagagaacagaaataagggcaaccgcctgcccctgcaatatctcagcggcaaaaagagggatgatttcattgtctgggtgcagaacaatgtgagaaattacagaaagcgggatttactgcttaaggagcagctcagcgaagaagagcttgcgggctttaaggaaagaaatcttcaggacactaaaaccatgtcccgctttatgcagaattatatccgtgacaatctggagtttgcaccctcagccaaggggcgcaaaaagagagttacggcagttaacggcgcggttacatcctatatgcgaaagcgctggggaataacaaaaatcagagaggacggcgatctgcaccatgcagtagacgcccttgttatagcctgcacaacagacagccttatccagaaggtgacaaagtactccagatacagagagtgccgctatgttaaggatgaatccggcagctatgtatattctgaggcaacgggagaggtgctggataaattcccgtacccatggccccatttcagaaaagagcttgaggccagaatgggcaatgacccctcaaagctgattgccgatctgcgcatacccttctatatggagcaggatgcaccggaagtaaagccgctttttgtgtccagaatgccaaacagaaaggttggaggcgcagctcataaagacacggtaaagagtgccagatatgcggatgaaggtattttgctggttaaaactccgcttaccaagctgagccttgataaagagggagaaattgccaattattttaatccagacagcgacagacttctttatgaggcgctgaaagaaagactggctgcttttgacggaaagggtgaaaaggcatttgccgagcctttccataagccaaagcgggacggcactccggggcctgtggtgaaatccgtgcggctaaaggaaaagagcacattgaatgtgcctgttcaggggaaaacagctgtggcagataacgataaaatggttcggctggatgtgtttaaggtagagggagacggatattattttgtccccatttatgttgccgacactctcaaaaaggaactgcccaataaggcgtgcgttgctggtaaatcttttaatgaatggaaaactatgaatgacagtgattttgtgttttcactatgttctaatgaccttgtaaaggtaacacacaaaaagacaattaccctttctgtggttaacagtggaagcagtctggcgaaaacatacagcggcaatgaaatgcttttatattataaaggagcaaatataaacagcggagcggtaaaacttataaatcatgataacagttactgtatagagagcatgggggtaaaaactctaaaatctattgaaaagtacacagttgatattctgggtgagtatcatccggtcaggaaggagaaaaggcagccttttaatataggaggtaagtgaaatgccgtttagaaatgttatcatccaaagcccggcccgtataagcgtccgcaacaatcagctcgttataaaaacagaggcagaacacagtctgtctccggaagatattactgccattttgcttgaaagtatgcagtcaactattacaacagccgcattgtcccttctgggacagtgcggctgcactgtttttgtctgtgatgaaaagcatatgccatgcggggtattaacgccttttgaaagccacagcagaagtcttgcagttttaaaatcccagattgatatggggcctactttaagaaaacagctatggcagagcatagtaaaagcgaaaattaaaaatcaggggttatgccttaaactctgcggaatggaaaaggccgctgagggactttttaaaatggcagatacagtacaatccgatgaccgaggcaatgtggaggctgcggcggcacagagatattttacttcgcttttcgggaaaaattttgtaaggagagaggataacggaataaacagcggcttaaattacggctatgcaatattgaggggctgtattgcaaggactcttgcagtgtacggatttgagcctgccctcggcatacaccaccgaaatgaactgaacaggtttaatctggcagatgacctgattgagcctttccggtctgttattgatatgctggtatatgtgtgctttgacacagagggggagcttgacagcgcgaagaaaaggcagctttttaactgccttaatctggaaatcttatccggaaaacagcaccacagcgtttcgtatgccatagaccgccttgtgcaaagcctgagccgctctttaggtgcagggcaggcaaagcttatgctgcctgagcttctggagctgaaacagcacagttatgaataaatttatgagaatactggtgttttttgatttgcctgtgcagacaaaatctcagcggcgggaggcttcaaggttcagaaattttctgttgaaggacggataccacatgattcagtattctgtttatgcccgagtctgcaacggtactgatgcagttgaaaagcacagaaaaaggctgaaaactcagctgccggataacggctctgtgagaatgctggttataacggaaaaacagtatgaatccatagaaatactgctgggaaatcttacggaggaagatgaggatttccagtgcgagcagttgtctatattctgaaaaatataaaaaagcctatccggaaaccattgtccggacaggcttttttggatagcgtattataccatacctacaactatcagggaactataacaacatggaaccatactaagcagttcttcggattataccatacctacaactatcagggaactataaccgctcctgttgccgccttgactgccgaggaattataccatacctacaactatcagggaactataacgagaaggaaaatcactgatgtccgccttccattataccatacctacaactatcagggaactataactatgggagtgttgaaccagaaatcaacaccattataccatacctacaactatcagggaactataacaacctcaggataagaagaggcgcggtcataattataccatacctacaactatcagggaactataaccaagacgcataaatatatattatctacccgattataccatacctacaactatcagggaactataacatcaatcggcatacttccccaagggaaaaaattataccatacctacaactatcagggaactataacactggccgatttaaggtgaagtccagggctattataccatacctacaactatcagggaactataacaatcagctggattttggggagtagcgctgcattataccatacctacaactatcagggaactataacatcaagcggcatacttccccaagggaaaaaattataccatacctacaactatcagggaactataactcgacacatattttatcacaatccgcatttattataccatacctacaactatcagggaactataacaattcggactagatatttcagctgaaacagattataccatacctacaactatcagggaactataactctgcacgttccaagcatacgaaaaaatatattataccatacctacaactatcagggaactataactactagttgagccgcttttaaaactcgaccattataccatacctacaactatcagggaactataaccgtgagagtgggagaagaatgcagtaactgattataccatacctacaactatcagggaactataactaatcatgccgtctttgacttcacagacggattataccatacctacaactatcagggaactataacattcttttaagcatttccccattaaaaaatattataccatacctacaactatcagggaactataacaacggccttgttaagaaatcgggcaatgtcattataccatacctacaactatcagggaactataactagactttacgcgggggattgctcccccaattataccatacctacaactatcagggaactataacaaattcagtcatgttaaaaactcctgctatattatacc

SEQ ID NO: 2758 - DNA, 15800 bp, synthetic construct
  misc_feature 1..15800: note = Synthetic
  source 1..15800: mol_type = other DNA
gcgtgaatggctttcgacattcagttcaagctgatttatcaaggcatacgggatgttttccgtgtgcgaagtttgagttattaaagcggataaaattgactaacgagcagagggaatgggaacaatatatttttttctttatttctctagctgggattatggcttcgggtttaggtgataatttaaatataacttgcagctactggattctcatggggcttggttatgcattgattttatttcccaataaaaaggaacaaaatgaacgaacgtaaaattggtatcttactcagctatctgaatatcgcccttcacgccatcgtcggtttcctctacgtccccattcttctgcactatattggcaaatcggaatatggcctgtatcagctgatcgggtccctgattgcttatttcagtatcatggattttggtctgacggcagcggttacccggttttataccaagtacaaggcgttaaaggacaaggtggggatggagaacatcctggccatttctctgtatgggtatgggggtgccacagcgctttctctgctggtggggattgtctgttactggaacctggatgggattttcggggccagtatgacggttggggaactgctggaagcccggcagatgttcctgttgctgctgttcaacattgcggtgagcctttccaccatggtgttccggtcggtgattaatgcccatgaaaaattcctgttcctgaaagggctggaaacggtacagttgattctgcagccggcgctggtaatcctgattctccagaagtatcctacggccatggcagtagcggtggcccagacggcgctgaatgtagggctgatcctggcacggatttactactgttttgtcaggctgcacattaccatccgattccattactggaaccaggagttgttccgtgatttcaagaagctggcattgagtgttttctgtgtcagcctcattgaccaggtattctggaagaccaatcagatcatcctggggattgtgcaggggacggcggcagtggctgtgtattccatcgcttccctgatctatatgaattatatggctttatccacagcgatctccggtgtctatctgccccatattacagaaatggtggctcagagaagaccaatgagggagctgtctgctttatttatccagatcggccgctggcagtattatctgctggcactggtggccaccgggtttatgattttcggccggcagtttatccagctgtgggccggtaaggggtttgaggattcttattggatcaccatcctgatcattctgccttttaccatcgacctgatccagaacatcggcctggccattctccaggccatgaaccgctatgatttccgggcgaagatttatttccttaccggggtgctgaatctggtgctggctattcccttgggcatgaagtacggcggcattggatgtgccgtggccactggattttccatgctcatggggaatggtgtggtgatgaattatttctacaaaaaatatatcggtctggatattcctcaattctggaaacagattggacggatcagtctaagtgtggggctgtgtggggctgtgtctggttgtgggatatggagtggatcatgtgtttcccggtaccggaaaacttgcctttcttcttaaaatcctgggatatacggtgctttatggagccgtggtgtattttatggccatgagcccggaggagaaggagaaggtgcgagggattgggaggaaggttaagtgagaagtgaatgtcaacgaaaaagtaagtcacgtgattgccaaaaattgagccacccagggattccaagggggaaagaacctggttaagggattaggtggctaagtggttatggaaccaggctccttcttagagtcgggttaaaaacgccaatttcattcggatcaaaacagccagtggccgggaaggacgtgccgcggcgcgcccctacagcgttggggtcgtatgttgtttgttcgatcggagtggacggggatgtcgttgaaccgacgaatgtgggccggctaaacggccggtgccatgcaatgacgttgaccaggcggagaatatcgttgttatcctcagttcgacggagacggagtaggggctacccgcaggggagcccatcccggcctcctgttttttacgttcaaaggcagatgctcagcatctggtatccaaccacgcaatgcaaattaaaacaaaaatattgttttaatttgcattgcgtggtattattgtctaataaagtacaagtgtaaaatggctttatggttttaagatggttgaaggagttgttgaattcagaagggaggaagatatatgcgtctgcttaaagtcatttttagaaacgaagctatttttaaggagggcgtggttgttgattttaccaatgggaattctgttcgaaaatctcctaatgaaccagatactcttctaaaggcatttaaactgaaaactggtatctattcccaggtccttatgggctttacgggactgaatggcacagggaaaacaacggtgttggaaatgctttctgttgtagcccaagttttgtttagacatgaaagcctcaatatgcctgcaatccaaagtaaattggtgaaagttgtttccagtcatgtaccttttgaatgggaagtgttctttctgcataggggtcgtatgtatcggctgaaatccgagattattgaacaaataacggcagaagaacctaatagggaattaaaatttgtgtataaggaagagattctgcaggaaaagagcttttcttcggttactcgtaaaactttgtttgattttgcaaagagtcaatcttccctccgctctcagatattgatggattcaccttaccttcaagatgatgacagtattgcctcaagaataaaggatataaaggagaacattcatcctctgggtcttgagacgaatattaacgttgctgcattcagaggagcacctcctgaattttttctaaatgtttttgatcccaatatcaagaaattgaacattacaaaaggggaagatggtaaagtaaaatcggaactgctttttaaaaaccaggaaagaaaagtttatggcggagatccttctggcttgctgttttttctttcagcaggaactatcaaaggcttgtctcttggccctgtgatcttgggtgcgctaaaaagcggcggatatgtttttattgatgagatagaaaaccatttcaataaaaagattgtggaatggtttatggaattgttttcagatactcggaccaatccttatggagcctgtctggttttttctactcattaccctgagcttttggatactatggatcgaatggataatatttatattaccaggagagataaagagaatttctgcagctgtgttcgctatagtgatatgatcaagagaaatgagctgtcaaagagcagagtgattcttgaaaatgccattggtggcacagcgccccgtttccaggatttgcaggctgccaaaaacgtaattgctgattttgtaagaaagggggaatagcattgtcagctttggatcagtactcatatttatttttcgtatgcgaaggaaaaaatgaagaagcgattgtaaaatggctggctgaagcggacgcaatcgatttccccaaaaagcagtattcccttgatttctgcagagcacgaacgaaaagtacccgacctaaaatactacgagcagcgacccaatttgattatggtgggccggttgccataatttatgtttgtgattctcatggagagaaatggtcagtggggaaagattgcatggggaatgaaattccggtaataaagatagtaacaagtccggaaatcgagattcttctggtgcataaggctcattgtattgagaaatggaaaagtgcccgggcaaaaaatccaaaactccatgtatcagctttttgcaggcagatgttcaagatggatgtaaaaaatggcgaaaactttgtacaacagttttcgtcagttaaagatttcaaaaaaatctgtctagaatataaaagtgcctccgacagccgaaaattcaagaacgagttgacatggtatgatttgttgaagtaaaaaataatgcggaacatttctattgagaaaataaaagaatttgcgcatcggcaaggaattggaattgtagttggcaggctgcagcatgacggaatgatttctttccggacttataatcagtataagagcaaatagggagcttgatcgattaagcgggccattgggggagaaggatggcgcctagccggtttgcggctctggggcggtatgtgattaccccggaagtgttcgatatcctggaagaaacccggcctggcaaaggaggggaaatccagctaacggatgccctgcgggtcatggcccatatggggcatgtgtatgcgtacaatttccaggggaaaaggtatgataccggggataaattggggtatttgaagtctgtggtggaatttgctttgagaagggatgacctggggccggggttccgggagtatctgcgggaacttgttaatgttcagctgtgaccacccacgaaacagggattccaaggggaaaagaacgtggttaagggattaggtggctaagtggttatggaaccaggctctttcttagagtcggtttaaaaacgccaaccctagtcggatcaaaacagccaatggccgggaagggcgtgcctgcggcgcacctctacagcgttgaggtcggatggcgtttcttcaatcgagtggacgaggttgccggtgaaccggagaccctcattgttatcctcagttcgacggagacggcgtaggggcttcccgggggagcccgtcccggcctccgtttttttgtattcaaaggcagatgtgggagcatctggtattattcttctactcttgcatattctgaaaaaatatggtaaagtaaaattaaccttagaggtaaatgagatgacgtgttggatgtccggtataagaacaagaaattgcagaagatatgcacagatgcagagacagcgcgggcttcttatggcaacgagatggcgcgtaagcttcatttaagaatagatcaattggaggctgcagattccattcaagaattaatattgaatcatattggtcggtgccatgggctgagcggaaatcgtcaaggacagtatgccatggatttagcacagccatatcggttgattttcaaggaagtggaatcaggaatccagattgttatggttatggaaattgtggattaccattgaagagaaggtgatcattgtgttggaggaaagcagacattacattgcaacgccgccaggagctacaataaaggaacagattgtagatcgggggatgactcaaaaagagtttgctatccgtatgggaatgtcggaaaaacatatcagcaagctaatcaatggcgatgtgcatttaacgccggatgtggctgaacggttagaattggtcctgggaatccctgcttctttttggaataaactggaagctatttatcaggagaaactggtaaaggtcagaagagacacagagctggagcaggaagaaagtgttgcaaagagatatccttataaggatatctgcagatggctggggcatgaaccttcccgtaaaaaagggcaggaagtcattgacctttgccgcttctttgaagtaagtcgtttacaggttttagagaaccaggctctaacacctattgcctgccgaaaaatgggtgatacggagaaaagccattatattcttttatctttggctcagctggccaaacgacaagctcgggacatggacgtggctgcgtttagcaaagaaaaaatgaaaaaggttataacagaaattcgcagactcacagccaagataagtctggattttaaagaacaacttattcatgtgtttaaaggctgtggtgtggcattggtttttttgccagaagtaagaggctccttccttcatggaattacctttgagggagaaaaccataaagtcgtcctggggattggtttgcggggcaaagatgcagatcgtttctggttcagtctctttcatgaaattgcccatattttgttgggccatatttatcaggaaaaaggcatttctgaagaggatgaagccagtgccaatgccatggccgctgatttactgattccgagggagtcaattagaaagttttataacgagagattattttccattgaaaaaataaagaaatttgctgatgaacagggaattggagcaggaatcgtaattggcaggttgcagcatgacggaatgataccttttcacatgtataatcagtataagagtaaatacggagtttaattggataggagagtgcggcccacatgggccacactctgcagggcgttgaccaggcggagaatatcgttgttagcattagttcgacggagacggtgtaggggcttcccggaggggagtccgtcccggcctctgtattgttatttatgggcgatgcctttattatagaaatatcaagataactgtcttacctcaaaaatcgcgatttttgaggtaaaactattttctgacctcaaattttgcggattttgcggtgtgggattaacggatgggcgggctgcccggcgtgcagcccctacggcattggaactggatgctggatacaacgattttcgaggattttgcggtttgagattaacggatgagcgggcttgtcagtttgtccagaaacgggcgcatcgggcgacacggctttgccggtcttgattctcctttacggcattggagccggatgatggatacaacgattttgaggaactatttttaaactgggagtttttttacatagctggtgtggtatagttgagggagaagattcaatgaagaagaataggccttcgggtgaagaaaaagccgaaatatgatacaataatcgtaatattctttactttttgtggtaagtgcgctataatatcatcggttgtaccaaaccaatgatcagtgggttactatgataaggtaacacaccgaggagttctaacgccttgccatttggcaaggcgttatctctttatagggagaaaatatggaggaaggcgggaaggttatgaaatatggcattggactggacattggtatcggatctgtggggtgggccgtactggctctggatcatgaagaaaatccctggggcatcattgatttgggcagccggatctttgatgtggcagaacagcctaaaacaggggcttcactagctcttcccagaagagaggccagaagtatgcgtcgccgtctgcgtcggcgcagacatcgtttggaacggatacggaatctttttattaacggtggactgttgacggaagaacaactggagcatctgtatgacggaaatctgaaagatgtatatggccttcgtgtcaaagcactggacgcccggctgacagatgaagagttggcacgggtcctgctgcatctggcccatcggaggggatttaaaagcaatcggaaagcagaatctctaagtacagaggcaggagaattgaagaaagccatcagtctgaatcaaaagactatggaagaaaaccaatatcggacgataggggaaatgttctttaaagattctcgctatgcagaatacaagcggaaccggggcggaaattatcttaatacggtggaccggagcatggtggaagcggaagcctgtaaaatactggaaacccaggaaaagcttggaaacagcaaactgacaaaggcattccaggatacttatctttccatcctgctgagccagagacagtttgatgaagggcctgggggaaagagccattacgggggaaatcagatcctgaacaaggtggggaactgtacttttgaggatggatcccatggagaacctgccgaaaagagagcgtccaaagtttgttattcttttgaatactttaatctcctgcagaaagtgaaccatttgcggctaacctctgcaaaagataatcgaggattggacaaaggagaacgggaaaaggtcattgcgctggcaaaagacaaagcggatctgcgttttgaaaaaatccgggaaaccctgcagatttctccggaatatcgatttcagggcgtttcttacagcaccaaagaatctcgtgaggatatcgagaaaaagaataagtttaatttcctgccattctatcatcagatgcggaaaatcttaaaatcaaaggcaaaaatcgatatcagagaatattctttggacaagttggacaaaataggtcaaatccttgccttctataagggggacgataccagacggaaagaactggcgggactggaaattgctccgaaagccgtagaagccctgttggaactgaatggggccagtaagttctcccatttgtcattgaaagccattcggaagattactccttttctggagcagggcatgacctatgataaggcatgcgaggcagctggatatgattttcgggctcatcaggaggacaagtcctttttacttccagccaatgcatcggaactggaagatattaccaatccagtggtacgacgtgccatcggccagactatcaaagtagtcaatgccattatccggaagcagggttccagtcccttgtatgttaatgtggagctagctcgggaaatggccaaagattttcaggaacggaagaaaatcaaagatgataatgaagccaatcaaagccaaaatgacaagttgatgcaggaaattaaagagaattatcaaagattgaatccctcaggcatggatcttatgaaatggaaattatggaaggaacaggatggtaagagtccctattctcaaaaatccatagcgacagagcggctgtttgaaaccgggtatgtggatatcgatcatatagttccctacagcatcagctttgatgacagttttaaaaacaaagtattggtgttttcctgggaaaaccgggataagggaaatcatttgccctatcaatatcttctgcagaagtatggacaggatgcagtagatcggttcaaggtatgggttggcaacaatgtccgggattatcggaaacggcagagacttttgaaagaaaaaatgacggaagaagaaatatccgggtttaaagaacggaatctgaatgataccaaatacatttcccggttcatgtataatttcatccgggatcatctggaattcgctccttctgaaacagggaaaaagaaacgggtattggccgttaatgggatgattacttcctatctgcggaaacgctggggtatccgtaaaagtcgggccaatggggacaaacaccatgctgtggatgctgtagtcattgcctgtactacggataagatgatccgtgacttgactctgtattcggaagaacgggaaagtaagtatgatgtggatgagagaggaagccgcctggtaaatgagtcaaccggagaaatcctgaaagaatttccgttcccttgggacggattccgacaggaactggaagcccgttgttctgaacacccgggccggggattggctggtttgaccttttatatgaataaagatttaaatgacatcaaaccgatttttgtttcccggatgccgcggagaaaggtgactggagctgcgcataaagatactgtccgcagtgccagacatattgcagacggaattacggtttcaaaagtttcgctggccagtttgaaaatgggaaaggatggagaaattgccgattattataacccagacagtgaccgattgttgtatgaggcattgaaaaaacggttaaaagattttgacggagacggaaagaaagcttttaatgaaccattttataagcctaaagcagatggatctcagggacctctggttaaaaaagtgaaaatccaggcaaaatcgacgttggcggtgcctgtggaagaaaaaacaggcgttgcagacaatgacagcatggtccgtgtggatgtattcaaagttgagggggaaggatattatctggttccggtttatgtagcggatacggtaaaaaaggaattgctgaatagggcaattgttgcctataaaccttatgaagagtggaaattaatggatgataaaaattttcttttttccttgtatcccaatgatttgattgaagttgaaagtaaacgagatatcaaatttgccttaactaaggaagcaaaaaaagagagtactttagaacagagctttttgacaagaaaagttctatcttactatcagggaaccaatatcagtactgcagcaattcatttaatcaaccacgataaaacgtatgaacaaacaagtttaggagtaaaaactttaaaatcgataaaaaagttccaagtagatgtgttgggagagattcatcctattaaaaaagaggctcgtcaaaaatttaccattcaacagaagaatcgatgaaggataaggcaggtcttaatcaatgggatatcgctatatcgtaattgcttctgctgctactttatcctgcagggaaaatcagctgattatccttaatgaaaagaacaataaggtccccctggaagatatcagtgccattgttttggaaaaccagcagagcaggatcagcttggcagctttggaccagttggtatccaacaatgtaacagtctatctgtgtgacaagcagcatgtgcccagtgcagttgtgatacccttttatcagaactccaccaatgctgtggtgattgagaaacaggagcaactatctgttccccagacaaaacagatctggaagcagattgttgtgtccaaaatccagaatcagggccgctgcctgaaggaaagaggggatgaggaaggcaaccattatctgacggaactggcaaaaaccgtggccagtggagatatccacaatgtggaggctattgcagcacggtactatttccgccgggcttttggagaaaaatttaccagaacgggggatgatggaagaaacagtggattgaattacgggtatgccattatgcgggggctgattgccagactgctcacaggatatggatttctggtaatcaagggaatccatcacagcaacaagtacaacagctttaatctggcagacgatttcatggagccgctgcggccggttgttgatttgtatgtattgaaccatatgtcgggagatgatagtctgactccggaactgaaacacgccctggtgaatctgctgggggtagacgtgttgtcaggggggcaaattcacagcttgaattatggcgcggaacggatgatccagagctttatgcggatctgccagcaggaaggaaaagaactgatgattcctgaactggttcagctgagacagcatcaatatgaataaatttatgcgtatacttgttctttttgatattccggtgaaaacaaaatatcaacggcatgtggcttcgagatttcgtcatttcttgttgaaagacggatattatatgctgcagtattctgtctatgctcggatctgcaacggcccggatgccgtggaaaagcatcggcagcgcctgatgggagcgctgccggataatgggtccgtcaggatggttgtcctgacggaaaaacagtatgaagcgattgatgtgttggtggggagatacctgcctgaagaaaaggcctatgatgcaaagcacgtttccgttttttgaaaacaaccgaataaggcttcaaaaattccttattaaagaattttttggaaaaagtgaaaagcccttgtgccggatgacacaagggcttttgctgatcaaattgtaccaaaccaatgaccagcagggaactacaacgtcccgcactaaaaaataacgggtatcaacattgtaccaaaccaatgaccagcagggaactacaaccgccgaacgctataaacagcagcaggccaaattgtaccaaaccaatgaccagcagggaactacaacactgtaatggggactgttcctttactggcaattgtaccaaaccaatgaccagcagggaactacaaccaaaacctttaacctcgttcgccgccctggattgtaccaaaccaatgaccagcagggaactacaactattcatggtgccatccgcaacaacttctgattgtaccaaaccaatgaccagcagggaactacaacttcaaaacctcaaggagaagaaaatggtccattgtaccaaaccaatgaccagcagggaactacaacttcgtttctcccttcacgtcatctttaatcattgtaccaaaccaatgaccagcagggaactacaacgaaaaaatcgtgcgtttaaatagctttacaattgtaccaaaccaatgaccagcagggaactacaacccgccccgcccatcccggaaaatcattgatattgtaccaaaccaatgaccagcagggaactacaaccggacaagtagtatagccgctttccagcagattgtaccaaaccaatgaccagcagggaactacaacggtcatgagataatgcatcacgccggataaattgtaccaaaccaatgaccagcagggaactacaaccagagtcgaactgcattatcccgaattgctattgtaccaaaccaatgaccagcagggaactacaactgccaattgggccaaagaacatcaagtattattgtaccaaaccaatgaccagcagggaactacaactcttgatttgtcgaaacaccggcatcttggattgtaccaaaccaatgaccagcagggaactacaactgcggctggattacacgtttaccgttcttcattgtaccaaaccaatgaccagcagggaactacaactcccggacttgtcaaacgcttcaaaaatggattgtaccaaaccaatgaccagcagggaactacaacggcaaggtggcaacggccacgtggaacgagattgtaccaaaccaatgaccagcagggaactacaactccgcaccaaggttgcgccttgcagtacttattgtaccaaaccaatgaccagcagggaactacaacgcgatgggcattagcgcacggacggtttcaattgtaccaaaccaatgaccagcagggaactacaaccaaccgacgtaagcccaagcgggttccgggattgtaccaaaccaatgaccagcagggaactacaacaatttagggctgcctacaatgctataaatgattgtaccaaaccaatgaccagcagggaactacaactctgctgtcgtcattctgtttatttttttaattgtaccaaaccaatgaccagcagggaactacaacccatgttaaatgcttaatctcctgtgggaaattgtaccaaaccaatgaccagcagggaactacaaccacgctggctgccaccatgataccaaccgtattgtaccaaaccaatgaccagcagggaactacaactctgcgacgccgaaaacgtcgccgcaccggattgtaccaaaccaatgaccagcagggaactacaactccgcttccgcgttggcttgcagcgtatcaattgtaccaaaccaatgaccagcagggaactacaaccggcgtgctgcactatctcatgaccatgagattgtaccaaaccaatgaccagcagggaactacaactcccggcgtccaggggcaccagggcagcaaattgtaccaaaccaatgaccagcagggaactacaacagattggactctggaaaagaagttgttataattgtaccaaaccaatgaccagcagggaactacaactcctgcacctcccatgatcagcagatacgcattgtaccaaaccaatgaccagcagggaactacaactgctgatgtgcctggaagttttaaccgagaattgtaccaaaccaatgaccagcagggaactacaactccaatgacggaatcgcagaaggagctggtattgtaccaaaccaatgaccagcagggaactacaacccctgctgagcaatgccggggtcgagctgaattgtaccaaaccaatgaccagcagggaactacaacccgccaacgcttccatcactcccaccccctattgtaccaaaccaatgaccagcagggaactacaacgtcacggtggcatttatatgggcaacgggaattgtaccaaaccaatgaccagcagggaactacaacctataaggcgagatatatccaagaacacgaattgtaccaaaccaatgaccagcagggaactacaactggtacaacacgggggcatatggccgggccattgtaccaaaccaatgaccagcagggaactacaaccctttatccgctccttccattttgtccgggattgtaccaaaccaatgaccagcagggaactacaactcctgatatgttctttgtcatccgccaattattgtaccaaaccaatgaccagcagggaactacaacgacagacacagacgggctggaaacctgcaaattgtaccaaaccaatgaccagcagggaactacaactggagttaccgtctatctatccagacagtcattgtaccaaaccaatgaccagcagggaactacaacttccgcaatgagattgtcgcaattgcaaatattgtaccaaaccaatgaccagcagggaactacaacgggcgatggcgctataggcttccttggcctattgtaccaaaccaatgaccagcagggaactacaacgggttttgaaagacaaaacgaatatcatatattgtaccaaaccaatgaccagcagggaactacaacttcttccatgcacaatagtcatcggcaattattgtaccaaaccaatgaccagcagggaactacaactcggtattgtagaccaaccctctaattatcattgtaccaaaccaatgaccagcagggaactacaacgtggtgtagataatgtacaggatacattccattgtaccaaaccaatgaccagcagggaactacaacaaaaccatccgaacggttgaaagctcttgaattgtaccaaaccaatgaccagcagggaactacaactgttcggctaccttaaccgctcgctcctttattgtaccaaaccaatgaccagcagggaactacaactgtataaaccgtcctctgtccagccggataattgtaccaaaccaatgaccagcagggaactacaacttgaaaatcatctaccagatggcggggcaaattgtaccaaaccaatgaccagcagggaactacaacgaggcccgtatcgggaagcacgtgcagcagattgtaccaaaccaatgaccagcagggaactacaacaggaatttatcaaatccatcgatgttcaccattgtaccaaaccaatgaccagcagggaactacaacgaacgtcagcagcgggaacgtctggttccgattgtaccaaaccaatgaccagcagggaactacaacgtcgagtgatgcttgcattgcttgcatttcattgtaccaaaccaatgaccagcagggaactacaactcatgggaaccgggccgcccctcgtgccaaattgtaccaaaccaatgaccagcagggaactacaacagccggatttcaatctgttcccgcctggcaattgtaccaaaccaatgaccagcagggaagaaaacctttccttgtccattataccaaactaatggtcaggagagaattataatggagtagtgatgtgaatctaaatcagcataatgtgcccttacaccggtcgccccccgcaaggggggcgtaaattgaaattcgtatggtaatccagcggggagccttcgcaggtggatgcacttgtcaacaaaaattggacacaaaactaaaaaaatcaggcataaaaaacgaatcgatgtacaagattcatca

SEQ ID NO: 2759 - DNA, 15352 bp, synthetic construct
  source 1..15352: mol_type = other DNA
  misc_feature 1..15352: note = Synthetic
tctttttgaacaagctggccgagacgttttacgagtcgctcaaatacatacaaagcgacattgagggcctttccgaatattccctgcactacattacgggcggccttgtgtacaccatggtctacaaaatcaaaagcggcgacacggaaaacaaccacaacattgccgaggcgtttgtgcgcatgcatttcggcacgctgaccgaattcataaaaacctacaaaaaaaagaaagctgaactggctccatgagccgaaagcgcaccaaagcggccggcaaaaaggtcaagcacatacgccgccggccgaaggatctgccgatcgtggcgaggctgttcatttccaacgtgtgcatgatcctgatcccgacggcgatcctgatcgccgtctccccgctgctgttctccaacagctcgagcgacgcctacctgagcgcgctgagcgccgcctccaacacctacggcagctattcccagatgcagtgggactacatcacgaacgaaattttggagcaggccgccgaacaggacatggaacaccttgaaaattatgcggcagacgccgaggcgctgggcgccattgtgagcgtttcggaaaacaggcacaccatttacaccacagccggtaccaccgaccgggaagtgtaccgccaggcggccgatttggccggcaagcccgacgagggcaactggttctactttggtgaaaacggcctggccattgtgcgccaaagcgaaaacagcggcccggtttaccatgtggtcattgtgaacgaagcgttcaacctgcgcggccccgcctctgaggagacgaccggctatgaaatgaccgtgcgctccatcgtagtcagcgccatcattgccgccgtgttcatggtggccatgctgatcgtgaccgctgtaacggccgccacgatccgcaacccgatcaaaaagctgaaaaaaggcgttgaagaggtagcggccggcaatttgtactatgcgatcgactacaacagcacgaatgagcttggccagacggccgaagcattcaacctgatgcgcatgcagctgatcgaagccaccgagctgcaaagcgaacgcgaaaaagcgcagaaagagatgatcgccggcgcggcgcacgacctgcgcacgccgctgacctccattaaaggttatgtagaggggctgcgcgacaacattgccgacacaccggaaaaacgcgcgcagtacctgaagatcatctacaactccacgctggacatggaaaagctgctggacgacctgctgacctactccaagctgaacctgagcaccattgtgcttacgccgaagaagatcaagatctgcgaatacatggccgactgcacagacgagctgaaagagcagctggccgccaaagactttcgcgtgcgttttttctcctactgcaaagacgacgtgtgcgtgatgctggaccccgacaattttgcccgcgtgatccgcaacatcgtctccaacagcgtaaagtaccgcagtgaaaacacgcacggcgagctggagttccggctgacacagtacacgcgcaccgtgctgctggagatcgccgacaacggcatcggcgtagacaaggaagagctttcacgcatttttgattcgttttaccgcgccgacaaggcgcgtacacgcagcgactcggccagcaaaaattccagtgggctggggcttgcgatctgcaagcagatcgttacgctgcacggcggctccgtttgggccaccagcgaaaaaggacagggactgaccattcacatttccctgccgatcgaaaaggaagaggataatgagcacgattctgatcattgaagacgaccaaaacatccgcgcgctggaaagcgactatctgaacgcggccggctacacgaccatctgcgctgcagacggcagcgagggactgcgccgcgcgctggaagagaacgtggacctgatcattctggatatcatgatgcccggactggacgggtttgacgtgtgccgcggcatccgcgccgaaaaagacattccgatcatcatcgtcagcgcacgcaaggaggattttgacaagatcaacgcccttggcatcggcgccgacgactacgttgtcaagccgttcagccccggcgaactggtggcgcgcgccaaagcgcacctggcccgctacgagcgcctgaccggcggcaaaataccgggcgatgagctgcgcgccgggccgctgaccatccacaaaaaagccaggcgcatgttcatcaacggcaaggaactgacgtttacgaacaaggagttcgacctgctcaccttcttggccgagcacccgaacacggtgtttaccaaagacgagctgttcaacagcatctgggaatctgacccgatgggcgaaacttcgaccatcaccgtacacatcaaccgcatccgcgacaaaatcaaagagctcgacgagccgagcgcctttattgaaacggtttggggctccggctaccgcttccgcagctgatatggattttgactgtgaaagctgccgctgggcagcagaggacgaggagaccggcgagctttactgcacgctggagctggacgaggacgatatggccgccctgctgtttgaaaaaccgaagagctgccgctactacctgcccgacccgggcgaatacggcattgtgcggcaccagaattaaaagaatcggcagttttctgccgattttttataatcctttaataccttttgccgtgagccatgatgcaagtgaagcggccttaccagctttccaccacagacggcgcggcgaaaatttcatcgagccgctttaaaaacggcgccacatcgccgaagtcgcacacacggtggtcaaacgcaatggtgatgggcaaaatgcttctgaccccgatctccttggtgccgtcggcccagtgcacaacggacggccgttcctgcacggcgccgatcgcaaacgccgcgacctgcggcggaatgatctccaaaagcgtgcactgccccgtctgcgcccggtaaacggaaccaaggttagacacggtgaccgtgccctgctccagatcctttgccgttaggcgttcactttccggcacggccatgtaggcgcgcttggcgccgccgtgcagcgtgcgcacgcggtggcggccggtcttggagccgagcagccgaaaggcggcctgcagcacgcggccgtgtttcagcccgttcagcgtgttttgcaggctgacgtcgtacatggcctggctgaaatcggtattttccgcgcggcggcggatgtcgcctacggcctgcgtcagttcatccaggcttttgctgccgcagtcgggcagcttgacggtcatcatctcgccgcccggcaagatcatcggcatggagatgtcgatgttttcaaacgtgtcgatgcgcccgcgcaccagacggcgctgaaacgtgaggtgtgcattcaaaatcggcgcggctttcaggccctcacaaatgaccttgagcaaaatggtgttcagcgtggcgtgctgtgcgtgccgggcgttgcgccggcggcaggcctgtaaaaacgaagttacgtctgcctcataaacataagtgcagtgcggaatggtgcgccagctttcgctggtcatgttggccacgatcttgcgctggataccgaaatggatggtgtcgcgcacagttcccgtgcggggcgcaccggccgttttttcggccgccggctgcaccgcggcgccgcttgctgcccgcttgccgggtcgcgaagcggtatcggcgcttctatcggcaggacgctttgttttataatgaaccggcatgccggatgctttggcacagacatgctgggaatcaactttattttttgcgatctggtacatattgcttcactcctatagaataatggatcgccggcatgcggccggtatgagatcgcccgctggggctggtaaaagtttccttttgctgcagcgagttcattgtatacccggcgggccgaaaagtcaccctactgatgcgcgcaggcactctacgctttcgttttgcgcctctcctgcagcgctgccacaccaatagaaaggatgaaaaacatggaaaaaatcgcggtcagcgcctgccttctgggcgtaaactgcaaatattccggcggcaacaacaaaaacgaggatgtgctgaaactggccgagaaattcgagctggtgccggtgtgccccgagtcctacggcggcctgcccattccgcgcgagccgagcgagctgcgcggcggccgcgtgtggtcgaaaagcggaaaggacgtgacggccgcttttgaagccggcgcgcaaaaggcgctggaaaaagcgctggcaaacggctgccgcaccgccgtgctcaaggagcgcagcccgtcgtgcggatccggcaaaatctacgacggcacgtttaccggcacactgaccgacggcagcggcgttgcagccgctttgttcgccgaaaacggcattgccgtgctgggcgagagccgcgtgggagagcttttgagatgattttgacgagaccggcttacttcggccgctttgcctgcctgcaggacaagtgccccatgacgtgctgcgccgggtgggagatcgcggtggacagcgaaacgcaaaaacgctggaaacagacgggtgcgccctatgcgcaaacggccgccgcttcggtaaaaggcggcgtttttcagatgcagggcggcgtctgcgcccacctggagcacgggctgtgccgcctgcacgccgaactgggcgaggcctgcacgccgctgacctgccgccgttttccggtgtttcaccacgacttcggcggccgtgtggaagaggggctttgcctttcctgcccggcggcggccgagctgatttttgacacgccatgcgaactgacccagacggtaacggacacgccgccgagcccgaacgacattgaccccgcgcagtttctgcacctgctaaaagcgcgcggcgaactgctgcggctgtgccaagaaggcaccggcaaaaaggctttgctttgcgcactgtaccgggcggtatttggcagcatgccggacatggccgcgccgcaggcttcggccgcgccgtttgccatgctgaaagaaaagctgtatttattagactattctgcgcaaaattgtcgcgaactctacaaagagagtccgtctctaccggcggtagagtttaaaaatctcttcttttattacattttccgctactttctgctgccggcactcggcgaatgcagcgagcgggccatggggcgttttctgctgacagcccttttagcctgcgacctggccgggcgggaaaatgcaccggcctttgccaaagaggccgaacactgcgacgaaaacctgcgccgcctgcggacagaggaaaggccgtttctttcagacgctgctttacaaagcattatagcggcgtacccggcagatcatgcctgaaatttttaaagaaagtgtaaattctgccaaagcatgcacgatttgacacaaactttacacacaaaccttgctatttatgtttttttatagtatcatgttaaagtaaaagccgctctttgccgcgcgcaaaaggcggtatttataaatttataaaggagtaagaaatgagcgaatataaccaggattacgacgccgacgaagtcatcaacgactttaaggcaaaattcaaatggccgaaaagcgatgaggtcgacgagatggtggccccggccaaggtgccgctgaagctgctgctgtcgctgctgatcaccatcgtgggcggcgcggtcgtttactactttatgctgccgccgttcaatttcaaaagtctcgacatgtacctgtacctgctggtgctgctggtgctgttctgggggtcgtttacgctgctgtgccgcaccaagacacaccccgagtacaagccgtacattcagaaaaaaagccgctacccgctgatcattgccgccgtggtggccgtggccatcggcatcggcgcgctgaccggcgtaacgcttttccgcgccaaggactattccgaactgatcaccgtggaacagcgcaatttccaggatgatttcaaatccatcagctacatgaacgcgccaaggctggacgcctccacctcttacacactggccgaccagcagctgggctcgctggccgactacaagtcgcagtatgtggtgacgaacgacacgaaccagatcaacttaaacgaccgtccggtgcgcgtggcctacctttcctacgccagcgtgttcaagtggttcaacaacaccaaagacggtataccggcctacatgatcattgacgtggtgtcgcagaacgtgcaggctgtaacactggacgaggggatcaaatactcgccgagcgagctgtttaacgaaaagctgatccgccacctgcgcttccagtacccgacctatatgatggacaccccgcggttcgagatcgacgacgacatgaacccgtactggatcaccgccgtgctggacaagacgatcggcctgttcggcggcaccgacgtgaagggcgccatcatcaccgacgcagtgaccggtgaaagcacctactaccccatcggcgaagtgcccacctgggtagacaaggtctattctgacgagctgctgctgcagcagtacaactactacggcaagctgcaaaacggcttctggaactcgctgatcttccaaaacgacgtgaacgtggcctccgacggcaacggctacattgcgctggaggacgacgtttggttctacaccggcgtgacctcgccgcagagcgacgcctcgaacttcggctttgtgctgatcaaccagcgcaccaaggaagtgcgttactacgaaaacggcggcgcgatggagagcggcgcgatgggctctgcacaggacgcactgcagaactacaactaccaggcgtgcttccccatccttttaagcattgacggctacccgacctacttcatgagcctgaagggcagtgaaaacaccgttaaagcctacgcctttgtcaatttggaagacaaaacgatcgtgggcacctgcgtgctcagcgacgcggcctcagacgacgaggcggtggagacggccgtgcgcaattacctggccgcgatggaggcgaagggcaaagagatctcccacccgaaccagacggacgggaccccgcaggaggatacaacggcgatcgacccgaacgggcaggtcaaccagccgaccggcggcacggtgaccggtaagatcaccgacatccgcaccgccgtgatcgacggcaacagccgctactacattgccgtggacggcgtgtattactacatcaacgcagccgacgaggccggcgtggtgcttttgaacaccggcgacaccgtgaccgtaacgtttgacgaaaacgcaagcggcagcatgatcgctgcaaaatcagttaacaaagcttaacaggtgcacaaaatcattaccttatataacacaaataataccggctggtttacagccggtatttttctgcgcgttgcaaaacctatttctttttgacctgcactgtcaagcgcgtgatgtaggcagccgcatcgtcggtgaccagactgccgatcaggtaatcctcatacacatcgccggccggctgaaaaccggccgcagcaatgccgcgcagaaaaagcggataagcagacaagacgctgccgtaagtgccgcggtggtagtaaacagcataagtgccggccgggcggggggcggcgcccggttccgtactgggcataaacaaccggtccacacggccgaaacggccggcctgcagatcatcaaacgcaatgaccgagccgatacactccgcccccatggccgaagaactgcgcataaactgcgcatagatctcccaccagcggtcgtccgacgtctcctgtgcgcccgggtttttatcactgaaaaggaatgttgcttccggcagcgtacagatctgtgttcggttcaaaacagccgtctgcgcctcttccaggcgctgcaggttctgcgcaaacagccgcctgatctcacgcaggcgggcgatctcctcctccagccgcgccatctgcacctgtgccatttcggcaaacccctgcggcgaagtgttttgaaaataccggcggatctcctcgatcggcacgttcatctcccgcagcgacaaaatcgtgccgaagcgtgcgatttgggacgacgtgtagcagcggtagccgttttcgcgcacaaaagcaggcgaaaaaagcccaatgcggtcataataaaacaaagtgtctttctgaatgccgaaataccgggcgaacgcaccggtggtatagagtttttcgctctttcgctcgtgatcattcataaaaaaacctcttgactatggagttgctctatagtttatactttttaaccggaaaattcaagcgcaggaggcgaaaatatggatcacaaaacgcttttttcaaaaaccaaaccggtgcggctgttctttatggccgctattccaggctctgtcggcatgctggcctcttcgctctaccagctgatggacggcattctggtcggtcagctgctggaggactcggcctttgccgcactgaacctggccatgccgttcgtgatcgtcaactttgccctggccgacctgatcggcgtcggctcctcggtgccgatctccatccacctgggtgccaaaaacgaaaaaaaggccaacaacatttttacctgcgcctgcatcatgatcgaggcggtgggcgtgctgtttggcgcagcgctttactttgccgcgccggcgctgatcggcctgatgggcgccgaaggcgaactggccacgtttgccgtgcagtacctgcgtgtttacgcgctgagctcgccgctgacaacgatcatctatgccgtggacaactacctgcgcatctgcggcaagatcaagggcagcatgtttttaaacattattatgtctgccctgtgcgccggactggaatttgtttttctttactttttcaaatggggcatttggggtgcggcgctcggcacctgctgcggcatggccgtctgtgccgtgattgccttttggccgtttttccgcggcaaaatgcagctgcgcttcacaaggccgcagttttccatgcagatgataaagcagatcatggcctgcggcagccctgcctttttaaacaacgtggccgggcgtgtgacatccgtgatcatgaacgccatcctgctgcgcatgggcggcgcggacgccgtttccatctacggcgtgctgatgtatgtggacggctttgtgctgccgctgctttacggcatgtgcgactcgctgcagccggccgtgggctacaactggggcgccggcgaccgccaccgcgtaaaagccattgaaaaatgctgctacactgccgcattggtgctttcggtaacgtctgccgccgtcatcatgatttttccaaaacccatcgccgggctgtttatcagcggcggacagacggcactgctcgacgccgctgcgcctgcgctgatgctgtttggactgacttacattacccgctggttctcgtttgccacacagagctttatggccgccatcgaaaaaccgggcgccgcctccgcgatttccgtggcgactgcgctcatcttcccgctgattttcatcggcgtgctgtggccgttcgatctgaccggcctttggctgaacatgccggccacctcactggccgccggcgcactttccgccgtactgcttgtgctcttttttaaaaagcaaaaaaagacgggctccaacagccgctcggccggccggtaaaaatctttttgctgcagccgacggcataaatcgccgtttttcgcaggtgtgtccatctttttgtgcttatttcccggtgtttttgctttttttacaaaaaggcatttacaaatcggcgtttttgtgttattttatatttgttcttataccataccaagaacaattaggttgctacaacaaggtagcagaccgaaaagctctgacggttcgctacggcggaccgtcatctttttttaccattttttaagcggaaggatggaaaatcatgaagtacgggatcggactggactgcggcatttcctcggtgggatttgccgcaatggaactggatgaaaacgacgaacccaggcggatcatcaaactgggatcacgcgtgtttgacaaggccgaaaatgccaaagacggcgcctcgctggccgcgccgcgccgcgcggcacgcagcctgcgccgaagagtgcgccgccatcaacaccggctggagcgtatccgccgtctgatcgtgaccagcggccttttgcacgaggaagaacttgcgcatttgtttgacggacagctggacgacatctatatgctgcgcaccaaggcgctggacgcaacattgaccagcactgaatttgcccgcgtactgatccatctggcacagcggcgcggatttcgctccaaccgcaaatcagacgctgccgacaaggaggccggcaagcttttaaacgccgtcagcgaaaaccaaaaccgcatgcagaaaagcggctggcgcacggtgggcgaaatgttttataaagacgaggcctacgccgactgcaaacgcaacaaaggcgaaaactacgcaaacaccgtttcgcgcgatatggtggaggacgagatccacaaaattttttctgcgcagcgcgcaaacgccagcccttacgccggccaagattttgaaaatgactacaccgccatcgtccttgcacagcggtcgttcgacgaggggccgggcgccggcccggcaaatgcgccgagcccctatgccggcaaccagatcgagcggatgatcggccaatgtacgcttattccggaagaaaagcgtgcggcaaaagcgacgtattcctttcaggtattcaacctttggcaaaagatcaaccacatgcgcattgaagcgccgcaaaatacacgagcactgaccggtgaagaacgcgcgcgaatttttgagttctgccacaaatcgcccggcacgacttacgcaaaactgcgcaagctgctggaactgaccgatgaagagcgcttcaacatctcctacggttttaaagaacgcgatgaggtggagaaaaaagccaagttcgactttttaaaagcctaccaccaggtgcgcaaaacgctggataagctttccaaaggactgatttccaaactgtcgaacgatacgctcgacgccatcggatatgcctttaccgcgtataaaaacgatgacgacatccttgcctatttaagccaaaacgaaacggctgcgcacgaactaacgcacgaaatgaccgcgcagctgctgacaatgccgtccttctccggcttcggccatatttccgtcaaggcatgtcaaaagctgatatcgcacctacagcaaggcatgacctacgacaaggcctgcgaagcggccgggatcgatttccacggccataaccgcggcgaaaagcagaaatacctgccgccgatcaacccaaacgacgacgaaaacgaactgaacgacatcacaaacccggtggttcgccgcgccgtggcgcagacgatcaaagtcatcaacaccctgatccgtgagatgggcgaaagccccagctacatcaacatcgaactggcccgcgaactttccaaaacctttgaagagcgccgcgacattgaaaccgcacagtcaaaaaacgccgccaaaaacgcccaggctgttgcctttttgcgggaaaactgccgcatactctcccccaccgggcaggacattctcaaataccgcctgtggatcgagcagggcgagatagacccctatacacaaaaaaagatccggttagaagatgcgtttggccgcaacagcctgtacgacgtggaccacatcgtgccttacagcatcagctttgacgacagcttcaacaacaaggtgctgacccaccaaaacgaaaaccgcacaaagggcaaccgcctgcccctggcctatatgcccactgaacggcaaaatgattttaaagtttgggtcatgaaccacatgaagagcaaccccaaaaagcggcgcaacctgttgaaagaaaaaatcagcgacaacgatataaaaagttttcgcgaacgcaatttaaacgacacaaagtacctgagccgcgtgctttacaactatatccgcgaccatttggcctttgcagattacaaagaccgcaaaaaccatgtccgcgccgtaaacggtgcgataaccagctatatgcgcaaacgctggggcatccgcaagatccgtgaaaacggcgacctgcaccacgccgccgacgcggcggtgatcgcctgtgtggacgaaaaaatgattcaaaaagtcaaccgttacagcaaaatgaaagaactgcagtactgtgacacacctgacggctctgccgcgtttgacgaagagaccggcgttgtcctcagcgagtttccgcagccgtacccgcatttccgccacgagctggaggcgcgcctgctggacagccgcgaactgatgcaaaaagcgctttgcaagctgccgaactacaactgggacgagatcgaggcggccaagccggcctttgtgtcgcgcatgacgaaccacaaggtgaccggccaggcgcacctggacaccatccgttccggcaaagaacccggctgcaccattaccaaaacggcgctgaacgccctgaagctggataagaacggcgagatccaaaattactataaccccgacagtgaccggctgctgtacgaagcgctgaaagcccgtcttttggcctttggcggcgacggaaaaaaggcgtttccacccggctttgtattgcacaagccgaaagccgacggcagcgacgggccggccgtcaaaaaagtaaaactcatcgaaaaagcctcgctgaccgtgccggtgcgcagcggccacggcgtggcggccaacggcgacatggtgcgtatcgacgtgttttatgtgccgggcgacggttactactttgtgccgatctatgtttctgacaccgttaagccggaactgccgaataaggcgtgtgtggcttttaaaccctatgaagagtggaaggaaatgaacgacaaaaacttcctgttctcgctttataacaatgatctaatcaaagtaaaggcaaaaaagaatatgacactttccgtaaaacttaaaggtagcacattgcccgataaattatacggaaacgatatgtttctatactataattctgctggtattactatagcaaccatcagtgtcgaaagccatgacggtgcatacggtatcagcagcatgggtatcaaaacactggtcagcatagaaaaatacacggtcgatgcgatcggcaacatccacaaggtgcaaaaggaaccgcgccagacgtttgaccgaaaggccaggtgagttttgtgccctacagaagcctgtttattaccaacccggccgggctgcggctgaaaaacaaccagctgactgtagacaacggcgagacctttacctttccggtagaggatctgcgcgccgtcgtcatagacgagccggcggccaccctttcggccaggctgatcagctttttagccgaaaacggcgtttgcctgattttttgcaacgaaaagcacatgccctgtgcccagctgacgccgagtggcgcacactgccggctggccaaacggctgcgcacacagaccacacagtccctgcccaaacaaaaacggctttggcagcagattgttgtgcaaaaaatcaagaaccaggccgcttgcctggcgctgaaccacaagaccgaaagtgaaaaactgacggcgatcgccgcgcacgtgccctccggcgacaccacgaaccgcgagggctacgcggccgccgtttactttaaagcgctgtttggcaaagactttacacgcgaggacgacaacatcatcaacgccgcgctcaactacggctatgcagtcacacgcgcctacctggcgcgtacactggccgtttacggactggagccggccgtgggcatacaccactgcagccagctgaacgcctttaacctggccgacgacatgatcgaaccgtttcgcccggcggtagacctgtatgtagcacagcactggaaaagctgggactgtttcggtacggtacagcgcgccgaactggtgcggctgctgaactgcataagcgcggtagacggtgcacgctgttccctggcgcacgcggcagaacaagccgtgcaaagcctggtgacagctttggaaagcgaagaacgcacaccgctgaagctgccggcactgctgccgaccgattactttaactatgactaaatttatgcgcatgcttgtgttttttgacctgccggtcaaggaaaaagccgctcaaaaagcggccgcaaaattcaggaattttcttttgaaagacggctaccagatgctgcagtattctgtatacacgcgcgtgtgcaacggttacgacaccgtaaggacgcacgaaaaacgcctgcgcgccaacctgccgccgaatggttccgtgcgccttttgacgattacggaaaagcagtacggcagcatggagatcctattgggcgaactgcagcagagcgacaccccggctgcctacgagcagctgacattgctgtaacaaaaaagcaaaaaaagagcagatttttaaaaaaatctgctcttttttattccaaattttcctggaatatggcttggttcccgtcttttttcgttcccataattataccataccaagaaaaattagggaactacaattatgacgggatacaaatgaatggcgtggcaattataccataccaagaaaaattagggaactacaatgcacggcttcggctgtttcgtttgcggttgattataccataccaagaaaaattagggaactacaataaaatcgatttttttcaagacctgtatataattataccataccaagaaaaattagggaactacaatctttcatcccggctctcttcggcgccggccattataccataccaagaaaaattagggaactacaatcgcaatcccgtcctgcccttgcaaggctttattataccataccaagaaaaattagggaactacaatcagccatgcctgtcttgttttcttatttacattataccataccaagaaaaattagggaactacaatgtgcacatcgaagaacactatgggtatgcgattataccataccaagaaaaattagggaactacaatccaagatcgttactggtagccggtacgttcattataccataccaagaaaaattagggaactacaattgtactccgtctaataaaaattactacttcattataccataccaagaaaaattagggaactacaattaccagatggattcagcatttataagattgattataccataccaagaaaaattagggaactacaataacaaccatttaaaaacgc

SEQ ID NO: 2760 - DNA, 15071 bp, synthetic construct
  variation 10335..10444: note = n is a, c, g, or t
  source 1..15071: mol_type = other DNA
  misc_feature 1..15071: note = Synthetic
tcggcgttgacgtaaagttcgatactgcggcaacggtggaggatattctcgcgcgcaagccctatgccgtcgtaatcgcaagcggcggcgtgccggtcgtgccgcgctccatcgcgggcagcgatctgccgaacgtatgcaccgcgcctgatatcatcctcaagaagaaaaagctcaagggcaaggacgttgtcgtcgcgggcagcggcatgaccgggcttgagaccgtcgaggtgctcaacgagggcggcaaccgcgtcacggtcatagagatggcaaacgagatcgcgccggggacatggttccagctcgtggacgatgagctcagccgcattgagggtcacggcacgaagctcttcaccggcaagcgcctgatgaagatattgcccgaccgcgtcatcgtcgaggacgtaaagaccgcggagctgacagagatcaaggcggacaacgtcgtcctctcccttggtgtgcgtccggagaatgcgctctataatgagcttaaggatcgtatggtgaacgtctatgccgtcggcgacgccgcgcacggcggaacgatagccaacgccgtccacagtgcgtgggacaccgccaagaacatacattaagggaggagcgcagagatgaagaagaaaaacatagtcctcgccgtcgccgctgcggcagccggtgcatacgtgatatccaaaaacgacgcggcaaagctgaagataacaaatgcgctgtaccgcgggcacagcatgataatggacgtgggcataaaagccttccccggaatgttccccacgccggagacgaagcttggctgcggcagcaggaaagagataccgggacttctgaaaaagtacgggataaacaaagtcctcatcgttacaggtccgactgtcggcaggacgatagtcccgccgataaaggatgacattgagaaaagcggcatcccctgcgaggtgttcgaccggaccgaggcgaacccctccgtaacgacggtgctcgcgataaagaagcagtatcttgagaccgggtgcagcggctttctcgccatcggcggcggctcgccgatggacgcggcgaagatcgcggcggcaacggttgcaagacccaatatgccgatagtgaagatggcgggcatgatgcgcattctcgcgcccgtgccgcccgtgatatgcgtcccgacgactgccggaaccggcagcgaggtgacgataggcgcggtcatatccgaccatgacgcgcaccacaagtacgccattaccgacccatgcatcacgccgaaggccgcggtcgtcgatgcggagctgacggtcggcatgccgccgttcatcacggcgaccacgggcgttgatgcgcttacccacgcggtggagtcctacgtgacgtgcatgtacaataccgacttcaccaaccgctgctgcgaggaggcagttgccgacatcttcaagtacctcgaccgcgcgtacaacgacccgaacgacatggaggcgcgcgacgggatgctgaccgcgtcctacaaggcggggcttgcgttcactagaaccggcgtcggctacgtccacggtatcgcccacgcgctcggcggtctgtacaacacggcgcacgggttggcaaactccgtaatcctcccgatagtgctggaggattacggcgagtgcgtctatcccaagctcgcccgcctcgcggagacagcgggaataaagacggacggcagcgaacccgagcgcgcaagggcgttcatcgccgctatccgagcgatgaacaagcacctcggtctgcccaccggctttgacttcatcaagcccgaggattatgagacgatcgccaaatgggcgctcgcggagacgaacgtaaattaccccgtccctgtgctctacgaccgcacacggctttggcacgtgctcaaccgcattgtgcttgaggcataaaagcagctatatagaccgcataatggcgcgccgcggcggcgcgccattactatgtaaataatacgtaatatgctcatgccgcgcgggcggcggggatcttattgagaaaccggcggtagaacgccgcgcccgtaagaccggtcagcgtttccgtcacggggaaggtcagccagaaccagttcaacccgaagcgcgagaagacatagccaagcggaacgaacagcacgaccgtccgtatcacggtcagcatcgagcttttcagacttgcgccgaccgcctgaaagaacaccgggaaggtcagcgacgcgaccatcggcagaaagctgatgccgacaaagataaacccgactttgccgatcgcaaccacctgcgcgtcggatgtgaacacgcgcagcatctgctccggtatggagacgaagcacagcgtccccagcgccatcagcgcaagcccgaacagcatcgccgtcgacagcttttttctgcagcggtcaatgttccctgcggcgtagttgtagcttattatgggaacgatgcaggtctgcatagcgccgagcgggatgaagaagaacgtctgccacttgtaataaagcccaagggcggtcacggcctgatcgcagaagcccgcgagtatcaggttgagccccagtatataaaatgtgtatgccgactgcatcagtatgttcggaatgccgaggcggaatatccttgcgatatgaccggggtagacgtcactcggtggggacttgtgcagaccctttttcatcacgacgagcgccgccacgatctgccccgcgacggtcgccgcagccgccccggcaatgcccatttccggcagcccgaacagcacgaatatcaatatcgggtctaagattatatttgtcaccgcgccgaggatctgcgccttcatcggcgttttcatgtcgccgttcgcctgcaaaatcttcgtctagatgctctctaaaaacagcccgaagctgaaaacgcacactatcctgccgtatacgattatgtcccggataacggcttcggagtccgtggacattctcgcgtaggcgggcatgatgaaatagcagaccgcggcgaacaaaaaccacagcgcgcccgcaagcggcgtgcccaccccggcatactcgtccgcctcatcgcggctgcccgtgccgagctttgccgccatgaccgtgtttataccgacgtccgttctcaccgcaaaggcgatcatcagaagctgtattggataaatgatggacagcgccgtcagcccggcgtcagaatacctgccgacaaagagactgtcaacgatgttatagagcgcctgtataagctgtgccagcatgaccggcggcgcgaggcgcagtagtattttgctgattttttcagttgcgaatatatccgtctgatccattcgtatgcccccaaatccttagtggacgacggaattacaagcgcacctatggtgtttgtcaaccggcatttgccaaccgggaaaaatttatcccggatatgcatttcggcatatccgggatcggtgtatgaaaaggaaacgagatgaaagaatccatccaatgaacacatattatataatagaaggtaagccgcgcggcggagcgccgcgggcagccacgtcagcgatggctcgacgcgagggaggatttacccagacccagccctcttgcaataaacgccattgcatcggtcatgctgtaagaacgcacaaacttgtggcggtacatccgcttgccgaggcgctctgaaggaaccgaacgaccttcaatataaccgcagtcatagcacataaacttatcgatcttggtgtgggcatccatgaccatttctttaccgcagcaagggcacttcataacgatttcctcctgatacctgccggcacacaaagcgccggtgattgatttgcgactttgtttgtcttttgtttaacttacgtgcacagtatatatccttgcctgttatttgtcaagcaataattgagaaaaaaatatcacatgcgcgaagtttatttatttcgccgaaagcgcggcaaataagccccacttatgctggacattcatgcccatgtgaggtaaaatgtacaaagatttcagaggcggcgccgcataatgcagctgattttgccgcgctgtgcggtgctgcttaaggatttggaggagcgtatgcgctatattgaagtcagtatcaacacgccggagcgggagcttgatgcgcgctgtgaacagcttgccgaactcggcgtcgatggctttgtaatagagaacgaggcggattttcagagctttcttgaaaataaccgccagtattgggactatgttgacgcggagctggagcggtcctacaagggcgtgagccgcataaagtgttacctgacggacgatgagaccggggaggcggtgcttgcgcgcataaaggctgcgtttccgcagacagtctccggctataccgccgatgaggactgggaaaacagttggcgcggctgctatgagccgatagaggtcggcgaaaaacttgtcgttgtgccggagtggatggacgcgccggacgatgggcgcgttcctctccgccttgaccccggcattgcctttggtactggcagccaccccacgacgaagctgtgccttgccgcgcttgagcgctatgccgcgcccggtgtgcgcacgctcgacctcggctgcggcagcggcatactcggcatcggcgcgctgctgctgggggcggaatccaacaccggatgcgacgttgaccccatggcgcctgaagccgcgatggcgaacgccgcgctcaacggcataggcgcggacaggatgcgcgtttatacaggggatattctcaaggacgcggctctgcgccgcgcgctcggcggtgggtatcagctcgtgctggcaaacatcgtcgccgacgtaataatcgcgcttgccgcctatgcgcgctcgttcatggcggagggcggcgttttcatctgctccggcatcatcgacgagcgcgccggcgaggtgcgcgccgcgcttgagcgcagcgggcttgaaataattgcccatacctcgcaggaggagtggcactgctatgtgtgccggtgaagcggaataatatgtaagggcgcggcggaaagcgaatttcccgccgcgcccctgcgtccgccgcgcttatcttatgcgccgtgcctcaacgtaatagcgcttgtcctcggcatgaccgacggaaaagctcttgcgcgggagtatgccggttttgcgcacgtagctgaaaagctcgtccttgcctatcccgccgtagagaaagcccacagcgccctcctgagcggcaagcgcgcgcactgcgtcctctccgtgtatatagtccacgcggacctcaggatgctcttcaatgtagccgtcgataaagcgctgcacctcgccggtctctaatccgggcacgaacacacgcccgtgctctccgcgcgtgatgtaatccaccgcgcgcccatcctgagccgggaacgcggcgtgcagcgcgcgcaccgcgtctgccgtgtccgcgccgaacagcacccggtatatcggctcgaagcttatcgcctcgctgtgtatattcacaagctctgccagtgcgtaatgtgctgcgtccgtgccgatcacatccgccgccgctttcgccgtggcgagcgaatggttgccgtcgccgaccgcaaaaagaagcctgtctccatctgtgccgctctcattctccaattctgagagagccgcaagtatgcgctgctgctccgcttcatctatcagccagccgcgcagatgcccgccgccgagcatcagctcaaagtcatagagcttcgagagcctggatgtgtctatctcctcgattatctcacgccgccggtcgtccatgaacaccatgatgtgcggcagctcaagcggcgcgtcgcgccgtatcgcaacgcgcggcgggatgcgcgagagcaccgttccctccgtcgggcggatgagagactttgcccccggttcgtagctatagtccgcgagggcgaacgcgccgactatgccgcgccgcactcgcccgtcgggctgcgtgcgctcggtgcagatcatcgcgtttttatactcgtcaaaaaccccgtcggcgagatagcggcgcatcgtgtcgtttatctcctttatgcgcgcttcatcgtgtccgtcgcctaaataaacctccggcagaatgagacgcagggctgacggcgcgtcgcccgctatcgcgtccgcacgctcccagtactccggctgagaggtgaactggtcgcacgcgatgcacgcccagcactcaaaatcggcttttggcagcagtatgtcagcgggaccgaacggcaaattggttaacataatatataatctccattctttttctgttttgatgaatataacacctatatgccgcgccgtcaatcatacatacgcagcaaaaccgacgattgacgcgcggcggatgctgttataaaataatagtgttaagcatattacatttaacgggagataataacatgacaataacaaactgcaccgtagaccgcggcagcgtgtatgccgacatactgctcgcaccggcggacgctgccgcggcgggttcgcggcaggaggcggtgaggaccgcccttgccgcacttgcacaggaaaagggacttgccccgctgatctatatccgtgtcaccgcaatggacgcgcagcccgacggctcgcttgccatcagccttgagggcgctataccgccggaggtcatcctcggtcagtatctcggcgttgaggtggacatcgggcactgcgaggattttgaggatgcggcgctccacgcggcggctaagaacctgcgtgtcgccgtgccggagatcatcatccggcgcaagatcgacagcgctctgctggaaaaagagacagagctgctggatagcctctcgctcaacacgcttgccgacgtccgcgcaattattgcggagctcaacgatacgctgtcgctcgaccttgacgacgaggagatatggcgcaaggcaatgaaggtcgcggagaattacattggcatgggcatgcaggacataggcgcatttgtgcaggcgtttgacggcgtgctcgatgtggacgcgcaggatattgtccgcgctgcggagcgccgcgcctacgcgcgcggcgaaatgcatgccgcacagatagccgatgaggtgtttgatgcttggcttcgcaccgagggtaagacccgcgaagcttggcgcgccgagcagcgcgagtatgccgagcttttgggccgggtcgattttctgcttgccgccgttgcggatgaagagggcgtgaccgccgatgatgaggagcttaagcgcgctgtgcgcgatcttgccgcgcagtatcagatgaacgaggacgaggtgcttgcctcagccggcgcggatgcgatacgctatcatatccgcatgacaaaggcaaaccggataatcgtagagaacgcgaaaaatatataaggcaacgccgcatcgcacggtgtgccatagtacagcttgaggaacgaggattaaatggactatctgaaaagagcggaagaactgaaaaaggaaatagtgagggatcggcgctatcttcatcagcatcctgagctgggatgtgacctgcctgtcacatccgcctatgtggaaaagcgccttaaggagatcggtcttgaggtctcccactgcggtaaatacggtctgacggcgctggtcggcgggaaaaagcagggcaaagtgctgctgctgcgcgcggatatggacgctctcggaatgaccgaggagagcgggctggattatgcgtcgctcaacccgggaaaggctcactgctgcgggcatgacaaccacacggcgatgctgctgggcgcagcgcggctgcttaaggagacggaggacgagctttgcggcactgtgaagcttatgttccagccgggtgaggaatgcgggacgggatgccttgagatgcttgccgcaggcgtgctggagcaaccgaagccggatgcggcaatgggcatgcatgttgacgcaatgctcccgcttggcacatttggctatggcatggatgcggtgttctcatccaatgatgtgtttgagatcacggttaagggcgtatcatgccatggcgcgcgtccgcatcagggcaaggatccaataaacgccgcggcgcatatagtcacggcgctggaaacgctgatcgcccgggaggcagatccctctcaggtctgcattctgaccgtcggctcgatagagagcagcaccaaggcgttcaatataatccctgacagcgtcaccatgaagggcagcatccgcacttacagcgagcatgagcagaaaatgcttgtgcgccgcaccgaagagaccgtggagtacatatcaagagcgttcggctgcgaggggatcgtgagctgggcgacgccgatggttcctctgctggttgacaatacgcttgaaagtgaaatgctttcctatctgaaagcggtgctgggggatcaggcgcgtgtctgcgaacagccggtcagaaagctgggctcggaggattttgccaaccttacggggcgtgttccgtccgcgtttttctttatcggcgcaggaccagacagagagcacggcggagcgtacagccagcataacgccagggtggttttcaacgaggatatgctgccgctgggaagcgccgcttttgccggctgcgccgccatgtggctgcgtgctcacgcacaagccggaaaataaagcgatgcaaaaatgacgacccaatgtatgagatgagccatacattgggtcgttttcaccggcgcggcggagtgacgcagcttcagccgcgcattcgaaattttcccggccggtttacttattgccatagagcgtgttgaagccggtgaagtcaaagctcttcaggcagtccatcatcacatccacatcggcggaacggtcgttgccgatgacaaaggcgtagttgttgtagctggcgtaatagtccgtgtcgcctgagaagatctcgtgctgaagctcgtcataaaaatacatcccatagggctgatctgcacccgtgatgcttacgcttgcaaaaacctcggactcggtccgctcccggtttgagccggcggcgatgttcgactgatcgatgctgtccaccttatatagctggagcatattgatgaacggacggtcagactccgacagcagcgtgtacatcggtccccagttttccagcacatcagccgctgtgaggtcgtccagcaccggagaccattcgtagcccttgttgcgtgcaagccctgtcagcatagactccttctgctccacagatgtgaagtacggaccgaggaaggtgaaatagaacatgacgttattgcgatcaacattgtcgcgcactactatccacatccacggctctgcgccgtcgcgccggtcacgttttttgccggtctcgtcgtaatatgtctctgccgtggcgctgtcgtacacctcatagctcacgccccagcccttcggaatggtgacggtgaaaatatcgcaggtgtataactccgtctccatggtgctttccggctcttcaacgggggcggcggtcgcctcaacggcggggtgcgtctcaacggcggcgctgataacttccgttggcgcgggcacggcggcggttgtgctgccgcaggcggacgccccggcgatcatgcacagcatcagcgaaagtgcgataagctttttcattgcagttgtcatgcgtttgtcctccttgctttatgcgctgcaggtttaacctgcctgtattatatattatttagacgaaaataccaatactttgttctgcggctttgagaaaaaattttgcaagccgcacatagtaaattctgacgggaaagcgtcaagacgcgcaggggaaactgtggaaaatgtcgaaaaatctcttgacaaaagcaggaatgtattgtattatatatgcagttctttataccataccaagaactgctcaggttactatgataaggtagtaaaccgaagagctctaatgccccgtctcgcacggggcattatctctaacagcgaaaaggcaaattttgttgattcacaatagaaatataagcaatgcgggaggggacatatgcaccggtacgcgataggcttggatattggcataacgtccgtcggctgggcggcgctggctttggacgcagaagagaatccctgcggcatgttggattttggctcgcggatctttaccggggctgaacaccccaaaacaggcgcgtcgctcgccgcgccgagaagagaagcgcgcggcgcgcggcgcagactgagacggcacaggcaccgcaatgagcgtatacgccgtcttatggtatctggcgggcttatttctcaggaacagcttgagagtctatttgccggacagctggaagatatttatgccctgcgcacacgcgcgcttgacgaacnnnnnnnnnnnnnnnnnnnnnnnnnnnnnnnnnnnnnnnnnnnnnnnnnnnnnnnnnnnnnnnnnnnnnnnnnnnnnnnnnnnnnnnnnnnnnnnnnnnnnnnnnnnnnngcggcgcagcgcggttttggcgctgaatatgcaaatgagaagcttgaagcggcgtatctggacatactcctgagccagcgctcgtttgacgagggaccgggcggcgatagcccgtatggcggaagccagatcgaacgaatgatcggcacatgtgcgtttgaaccggatcagccgcgtgcggcaaaggcggcgtattcgtttgagtatttttcacttctggaaaagctcaaccacatccgtcttgtcagcggtggaaaaagcgaaccgctgacggacgcgcagagaaaaaaacttatagagcttgcccataagcaagatacgctcagctacgcgaagatccgcaaggagctggagctgaacgaagcggtgcggtttaactctgtgcgttatacggatgacgccacgtttgaggagcaggagaaaaaagaaaagatagtctgcatgaaagcgtaccacgcaatgcgcaaggcggtggacaagaacgcaaaagggcgttttgcctatctcaccataccgcagcgaaacgagatagggcgcgtgctgtccacatataaaactagcgcgaaaatagaaccggcgctggcagcggcagggatagaaccgtgcgatattgcagcgctggagggactgagctttaccaaattcgggcatttatcgatcaaggcctgcgataagcttataccgtttcttgaaaaaggtatgaactataacgatgcctgcgcggcggcaggctatgatttccgcgggcacagcaaggatgggagacagatgtatctccctccgctcggcgatgactgcacggagatcacaagccccgtcgtgcgccgcgcggtctcgcagacgatcaaggtcataaacgccataatacggcgctatgggacaagcccggtgtatgtgaatattgagcttgcacgcgaaatgtccaaggactttgccgagcgcaataagataaaaaagcagaacgacgacaatcgcagcaaaaacgagaagataaaggagcaggtcgccgagtacaagcacggcacggcgaccgggcttgatattgtgaagatgaagctcttcaacgagcagggcggtatctgcgcgtattcacagcgccagatgtccattgaacggctcttcgaccccaattatgcggaggttgaccacattgttccgtacagcatcagctttgacgaccggtacaaaaacaaggtgctcgtgctcacggaggagaaccgcaacaagggcaaccggctgcctctgcaatacctcacaggggagcgtcgcgatcgctttatcgtctgggtgaacaacagcgtccgcgattttcagaagagaaagctgctgctgaaagaagaactgacgccggaggaggagaacgactggaaggagcgcaacttgcaggacacaaagttcgtgtccagttttctgctcaattacataaatgataatctgctttttgcgccgtctgtgcgccgcaaaaagcgtgtcacggcggtcaatggtgcagtgacggattatatgcgcaagcgttgggggataagcaaggtgcgtgaggacggcgaccgtcaccatgcggtggatgccgtcgttattgcctgcaccaccgatgcgctgatacaaaaggtttcgcgctatgaatcgtggcatgagcggcactatatgccgacggagaacggcagcatacttgttgacccggcgacgggcgagataaagcagacatttccgtacccgtgggcgatgttccgaaaggagcttgaggcgcggctgagcaatgacccctcgcgcgcagttgccgatctgaagcttccgttctatatggacgctgacgcgccgccggtcaagccgctgtttgtctcgcgtatgccgacgcgcaaggtgacgggcgcggcgcataaggacactgttaaaagcgccagggcgctggcggacgggcttgcgatcgtcaggcgtccgctcactgcgctcaagctcgataaggatggggagatcgcggggtattataacaaggacagcgaccgcctgctgtatgacgcgctgaaagcgcggctcacggaatatggcggaaacgcggcgaaggcgtttgctgaacccttttataagccgaagagcgacggcacacccggaccggtggtgaacaaagtcaagctgacagagccgacgactctcagtgttcccgttcaggacggcacgggcattgcggacaatgattctatggtgcgcatcgacgttttcagagtggtgggcgacgggtattactttgtgccggtgtatgttgcggacacgctcaagcaggaacttccagatagagcggtggttgcctttaaggcgcacagcgaatggaaggtcatgtccgacggtgattttgtgttctccctctatccgaacgatctggtgaaggtaacaaggaaaaaagatgttatactaaaacgttcgtttgataatagcacgttgccagaaacaattgccagcaatgagtgtttgctgtactatgcaggcgcggatatttctactggagcgataagctgtgtaacaaacgataatgcatattctatcagaggcttgggtataaagacccttgtgagcatggaaaaatacacggtcgatattttgggtgagtatcaccccgtaaagaaagaggagagacagcggttcaacacaaagcgaggttaaaagatggcgttcagaaatatcatcatcgaaagcccggcgcgcatctctgtgaaaaacgaacagctcataatcaaaaccgacagcgagcattcgctcgcggtcgaggatatttccgcgctgcttctcgagagcagacagtcaaccataacgacagccgcgctgtcccttctggggcagcgcggctgcgcggtctttgtgtgcgatgaaaagcatatgccctgcgccgtgctcgcaccgttcagccagcacagccgtcagcttgccgtcgcggcgagccagctgtccactggggaggtgctgaaaaagcgtctctggcagagcatagtcattgcaaaaataaagaatcaggcagagtgcctgcgcctgtgcggcagggaaaacgccgcgagcgggcttgatgcaatggcggattccgtccgctccggcgacacgggaaacgcggaggcggcagcggcggcgaggtatttcccggcgctttttgaaaaaggctttacgcgcggagcggataacgggataaatgccgcgctcaattacggctatgcgatcctgcgcgggtgtatggcgcgctgtcttgcggtctacgggtttctccccatgttgggtctgcaccataaaagcgagcttaacggcttcaaccttgcggatgatatgatggagccgtttcgcccggtggtcgatcttatggtcacggcatcgtttgacgctgacagcgaactgacgccggaggcaaaacgcctgctgttcaatgtgttgaatctcgacatactctccggcggacaaaagcacaccgtggcttatgccatggagcgcacggtacacagcctgcagcgctctgtgaaccgcagagaaaacggacttatcctgccgcagcttctgccgctggcgcagcacagctatgaataagtttatgagaatgatggtcttttttgacctgcccgtgcagacaaagacccagcgccgcgaggcgacacggttcagaaattttcttctgacggatgggtatcacatgatacagtattctgtctatgcgcgcgtctgcaacggcgctgacgccgtggaaaaacaccgccggcgcataaaggacaatctgcccgacaacggctctatccgcatgctggtcataaccgaaaagcagtatgaatccattgaaatacttctcggcaggttgacgcaggcagacgatacatttcaatgtgaacagctctctatattctgaaaatcagaaaacaaagcctgtcccagccgttgccgggacaggctttgtccgatggtctattataccataccaagaaccatcagggaactacaactggaagcttgaatcagaatgggacgaggggattataccataccaagaaccatcagggaactacaacaatacgccgcatgggcggttgaaaataaaaattataccataccaagaaccatcagggaactacaacctcgtcgggctggacaagcttgagcattcgcaattataccataccaagaaccatcagggaactacaactgtgccgccgtcaatagacactggcagcaaattataccataccaagaaccatcagggaactacaacctgaggtttgggtgtttcgggctttggtgtattataccataccaagaaccatcagggaactacaaccggcgattgggcatcgtcgcttgaagcgatattataccataccaagaaccatcagggaactacaactccggcgatgacgcgcagataggcagctccattataccataccaagaaccatcagggaactacaacccctccgtttaccgtccgtcgacgtattccattataccataccaagaaccatcagggaactacaaccgtcgcgatgacaaagcccttgtggcagatattataccataccaagaaccatcagggaactacaacccctccgtttaccgtccgtcgacgtattccattataccataccaagaaccatcagggaactacaac

SEQ ID NO: 2761 - DNA, 14940 bp, synthetic construct
  variation 8449..8450: note = n is a, c, g, or t
  source 1..14940: mol_type = other DNA
  misc_feature 1..14940: note = Synthetic
  variation 5205..5207: note = n is a, c, g, or t
tgcactgcataaagtccttcaccgacaatgcgggtataaacatcgccgcggggcttcccggcgaatgcgcgctcaaccccgccgtcggcttcgagcgtgaaacggcggcgatgcccaaagacggcgcgggacgcgaggtgatcgtcgtcggtgcgggtgctgcggggctcaagaccgcagagcagcttgcgacgcgtggcttcaaggtgacggtgctggagaagaacagcgttcccggcggtcaggtcaacacggcggcaagctgcctgcacaaggataagctgcactggtgcattgacgacctcatggtttcggtcaagaagctcggcgttgacgtaaagttcgatactgcggcaacggtggaggatattctcgcgcgcaagccctatgccgtcgtaatcgcaagcggcggcgtgccggtcgtgccgcgctccatcgcgggcagcgatctgccgaacgtatgcaccgcgcctgatatcatcctcaagaagaaaaagctcaagggcagggacgttgtcgtcgcgggcagcggcatgaccgggcttgagaccgtcgaggtgctcaacgagggcggcaaccgcgtcacggtcatagagatggcaaacgagatcgcgccggggacatggttccagctcgtggacgatgagctcagccgcattgagggtcacggcacgaagctcttcaccggcaagcgcctgatgaagatactgcccgaccgcgtcatcgttgaggacgtcaagaccgcggagctgacagagatcaaggcggacaacgtcgtcctctcccttggtgtgcgcccggagaatgcgctctataatgagcttaaggatcgtatggtgaacgtctatgccgtcggcgacgccgcgcacggcggaacgatagccaacgccgtccacagtgcgtgggacaccgccaagaacattcattaagggaggagcgcagagatgaagaagaaaaacatagtcctcgccgtcgccgctgcggcagtcggtgcatacgtgatatccaaaaacgacgcggcaaagctgaagataacaaatgcgctgtaccgcgggcacagcatgataatggacgtgggcataaaagccttccccggaatgttccccacgccggagacgaagcttggctgcggcagcaggaaagagataccgggacttctgaaaaagtacgggataaacaaagccctcatcgttacaggtccgactgtcggcaggacgatagtcccgccgataaaggatgacattgagaaaagcggcatcccctgcgaggtgttcgaccggaccgaggcgaacccctccgtcacgacggtgctcgcgataaagaagcagtatcttgagaccgggtgcagcggctttctcgccatcggcggcggctcgccgatggacgcggcgaagatcgcggcggcaacggttgcaagacccaatatgccgatagtgaagatggcgggcatgatgcgcattctcgcgcccgtgccgcccgtgatatgcgtcccgacgactgccggaaccggcagcgaggtgacgataggcgcggtcatatccgaccatgacgcgcaccacaagtacgccattaccgacccatgcatcacgccgaaggccgcggtcgtcgatgcggagctgacggtcggcatgccgccgttcatcacggcgaccacgggcgttgatgcgcttacccacgcggtggagtcctacgtgacgtgcatgtacaataccgacttcaccaaccgctgctgcgaggaggcagttgccgacatcttcaagtacctcgaccgcgcgtacaacgacccgaacgacatggaggcgcgcgacgggatgctgaccgcgtcctacaaggcggggcttgcgttcactagaaccggcgtcggctacgtccacggtatcgcccacgcgctcggcggtctgtacaacacggcgcacgggttggcaaactccgtaatcctcccgatagtgctggaggattacggcgagtgcgtctatcccaagctcgcccgcctcgcggagacagcgggaataaagacggacggcagcgaacccgagcgcgcaagggcgttcatcgccgctatccgcgcgatgaacaagcgcctcggtctgcccaccggctttgacttcatcaagccagaggattatgagacgatcgccaaatgggcgctcgcggagacgaacgtaaattaccccgtccctgtgctctacgaccgcacacggctttggcacgtgctcaaccgcattgtgcttgaggcataaaagcagctatatagaccgcataatggcgcgccgcggcggcgcgccattactatgtaaataatatgttatatgctcatgccgcgcggcggcggggatcttattgagaaaccggcggtagaacgccgcgcccgtaagaccggtcaccgtttccgtcacggggaaggtcagccagaaccagttcagcccgaagcgcgagaagacatagccaagcggaacgaacagcacgaccgtccgtatcacggtcagcatcgagcttttcagacttgcgccgaccgcctgaaagaacaccgggaaggtcagcgacgcgaccatcggcagaaagctgatgccgacaaagataaacctgactttgccgatcgcaaccacctgcgcgtcggatgtgaacacgcgcagcatctgctccggtatggagacgaagcacagcgtccccagcgccatcagcgcaagcccgaacagcatcgccgtcgacagcttttttctgcagcggtcaatgttccctgcggcgtagttgtagcttattatgggaacgatgcaggtctgcatagcgctgagcgggatgaagaagaacgtctgccacttgtaataaagcccaagggcggtcacggcctgatcgcagaagcccgcgagtatcaggttgagccccagtatataaaatgtgtatgccgactgcatcagtatgttcggaatgccgaggcggaatatccttgcgatatgaccggggtagacgtcactcggtggggacttgtgcagaccctttttcatcacgacgagcgtcgccacgatctgccccgcgacggtcgccgcagccgccccggcaatgcccatttccggcagcccgaacagcacgaatatcaatatcgggtctaagattatatttgtcaccgcgccgaggatctgcgccttcatcggcgttttcatgtcgccgttcgcctgcaaaatcttcgtccagatgctctctaaaaacagcccgaagctgaaaacgcacactatcctgccgtatacgattatgtcccggataacggcttcggagtccgtggacattctcgcgtaggcgggcatgatgaaatagcagaccgcggcgaacaaaaaccacagcgcgcccgcaagcggcgtgcccaccccggcgtactcgtccgcctcatcgcggctgcccgtgccgagctttgccgccatgaccgtgtttataccgacgtccgttctcaccgcaaaggcgatcatcagaagctgtatcggataaatgatggacagcgccgtcagcccggcgtcagaatacctgccgacaaagagactgtcaacgatgttatagagcgcctgtataagctgtgccagcatgaccggcggcgcgaggcgcagtagtattttgctgattttttcagttgcgaatatatctgtctgatccattcgtatgcccccaaatccttagtggacgacggaattacaagcgcacctatggtgtttgtcaaccggcatttgccaaccgggaaaaatttatcccggatatgcatttcggcatatccgggatcggtgtatgaaaggaaaacgaaatgaaaaaagttatccgctatccaataaatcacaattttactgtcaggcggcaatgaaaacactgaccgccggttattcagcgggtggtagatgcgagacgggctttgcccagccctcttgcaataaacgccattgcatcgttcatgctgtaagaacgcacaaacttgtggcggtacatccgcttgccgaggcgctctgaaggaaccgaacgaccttcaatataaccgcagtcatagcacataaacttatcgatcttggtgtgggcatccatgaccatttctttaccgcagcaagggcacttcataatgatttcctcctgatacctgccggcacacagagcgccggtgattgatttgcgactttgtttgtcttttgtttaacttatgtgcacagtatatatccttgcctgttatttgtcaagcaataattgagaaaaaatatcacatgcgcaaagtttatttatttcgccgaaagcgcggcaaataagccccacttatgctggacattcatgcccatgtgaggtaaaatgtacaaagatttcagaggcggtgccgcataatgcagctgattttgccgcgctgttcggtgctgcttaaggatttggaggagcgtatgcgctatattgaagtcagtatcaacacgccggagcgggagcttgatgcgcgatgtgaacagcttgccgaactcggcgtcgatggctttgtaatagagaacgaggcggattttcagagctttcttgaaaataaccgccagtattgggactatgttgacgcggagctggagcggtcctacaagggcgtgagccgcataaagtgttacctgacggacgatgagaccggggaggcggtgcttgcgcgcataaaggctgcgtttccgcagacagtctccggctataccgccgatgaggactgggaaaacagttggcgcggctgctatgagccgatagaggtcggcgaaaaacttgtcgttgtgccggagtggatggacgcgccggacgatgggcgcgttcctctccgccttgaccccggcattgcctttggtactggcagccaccccacgacgaagctgtgccttgccgcgcttgagcgctatgccgcgcccggtgtgcgcacgctcgacctcggctgcggcagcggcatactcggcatcggcgcgctgctgctgggggcggaatccaacaccggatgcgacgttgaccccatggcgcctgaagccgcgatggcgaacgccgcgctcaacggcataggcgcggacaggatgcgcgtttatacaggggatattctcaaggacgcggctctgcgccgcgcgctcggcggtgggtatcagctcgtgctggcaaacatcgtcgccgacgtaataatcgcgcttgccgcctatgcgcgctcgttcatggcggagggcggcgttttcatctgctcgnnnatcatcgacgagcgcgccggcgaggtgcgcgccgcgcttgagcgcagcgggcttgaaataattgcccatacctcgcaggaggagtggcactgctatgtgtgccggtgaagcggaataatatgtaagggcgcggcggaaagcgaatttcccgccgcgcccctgcgtccgccgcgcttatcttatgcgccgtgcctcaacgtaatagcgcttgtcctcggcatgaccgacggaaaagctcttgcgcgggagtatgccgtttttgcgcacgtagctgaaaagctcgtccttgcctatcccgccgtagagaaagcccacagcgccctcctgagcggcaagcgcgcgcactgcgtcctctccatgtatatagtccacgcggacctcaggatgctcttcaatgtagccgtcgataaagcgctgcacctcgccggtctctaatccgggcacgaacacacgcccgtgctctccgcgcgtgatgtaatccaccgcgcacccattctgagccgggaacgcggcgtgcagcgcgcgcaccgcgtctgccgtgtccgcgccgaacagcacccggtatatcggctcgaagcttatcgcctcgctgtgtatattcacaagctctgccagtgcgtaatgtgctgcgtccgtgccgatcacatccgccgccgctttcgccgtggcgagcgaatggttgccgtcgccgaccgcaaaaagaagcctgtctccatctgtgccgctctcattctccaattctgagagagccgcaagtatgcgctgctgctccgcttcatctatcagccagccgcgcagatgcccgccgccgagcatcagctcaaagtcatagagcttcgagagcctggatgtgtctatctcctcgattatctcacgccgccggtcgtccatgaacaccatgatgtgcggcagctcaagcggcgcgtcgcgccgtatcgcaacgcgcggcgggatgcgcgagagcaccgttccctccgtcgggcggatgagagactttgcccccggttcgtagctatagtccgcgagggcgaacgcgccgactatgccgcgccgcactcgcccgtcgggctgcgtgcgctcggtgcagatcatcgcgtttttatactcgtcaaaaaccccgtcggcgagatagcggcgcatcgtgtcgtttatctcctttatgcgcgcttcatcgtgtccgtcgcctaaataaacctccggcagaatgagacgcagggctgacggcgcgtcgcccgctatcgcgtccgcacgctcccagtactccggctgagaggtgaactggtcgcacgcgatgcacgcccagcactcaaaatcggcttttggcagcagtatgtcagcgggaccgaacggcaaattggttaacataatatataatctccattctttttctgttttgatgaatataacacctatatgccgcgccgtcaatcatacatacgcagcaaaaccgacgattgacgcgcggcggatgctgttataaaataatagtgttaagcatattacatttaacgggagataataacatgacaataacaaactgcaccgtagaccgcggcagcgtgtatgccgacatactgctcgcaccggcggacgctgccgcggcgggttcgcggcaggaggcggtgaggaccgcccttgccgcacttgcacaggaaaagggacttgccccgctgatctatatccgtgtcaccgcaatggacgcgcagcccgacggctcgcttgccatcagccttgagggcgctataccgccggaggtcatcctcggtcagtatctcggcgttgaggtggacatcgggcactgcgaggattttgaggatgcggcgctccacgcggcggctaagaacctgcgtgtcgccgtgccggagatcatcatccggcgcaagatcgacagcgctctgctggaaaaagagacagagctgctggatagcctctcgctcaacacgcttgccgacgtccgcgcaattattgcggagctcaacgatacgctgtcgctcgaccttgacgacgaggagatatggcgcaaggcaatgaaggtcgcggagaattacattggcatgggcatgcaggacataggcgcatttgtgcaggcgtttgacggcgtgctcgatgtggacgcgcaggatattgtccgcgctgcggagcgccgcgcctacgcgcgcggcgaaatgcatgccgcacagatagccgatgaggtgtttgatgcttggcttcgcaccgagggtaagacccgcgaagcttggcgcgccgagcagcgcgagtatgccgagcttttgggccgggtcgattttctgcttgccgccgttgcggatgaagagggcgtgaccgccgatgatgaggagcttaagcgcgctgtgcgcgatcttgccgcgcagtatcagatgaacgaggacgaggtgcttgcctcagccggcgcggatgcgatacgctatcatatccgcatgacaaaggcaaaccggataatcgtagagaacgcgaaaaatatataaggcaacgccgcatcgcacggtgtgccatagtacagcttgaggaacgaggattaaatggactatctgaaaagagcggaagaactgaaaaaggaaatagtgagggatcggcgctatcttcatcagcatcctgagctgggatgtgacctgcctgtcacatccgcctatgtggaaaagcgccttaaggagatcggtcttgaggtctcccactgcggtaaatacggtctgacggcgctggtcggcgggaaaaagcagggcaaagtgctgctgctgcgcgcggatatggacgctctcggaatgaccgaggagagcgggctggattatgcgtcgctcaacccgggaaaggctcactgctgcgggcatgacaaccacacggcgatgctgctgggcgcagcgcggctgcttaaggagacggaggacgagctttgcggcactgtgaagcttatgttccagccgggtgaggaatgcgggacgggatgccttgagatgcttgccgcaggcgtgctggagcaaccgaagccggatgcggcaatgggcatgcatgttgacgcaatgctcccgcttggcacatttggctatggcatggatgcggtgttctcatccaatgatgtgtttgagatcacggttaagggcgtatcatgccatggcgcgcgtccgcatcagggcaaggatccaataaacgccgcggcgcatatagtcacggcgctggaaacgctgatcgcccgggaggcagatccctctcaggtctgcattctgacnntcgatagagagcagcaccaaggcgttcaatataatccctgacagcgtcaccatgaagggcagcatccgcacttacagcgagcatgagcagaaaatgcttgtgcgccgcaccgaagagaccgtggagtacatatccaaagcgttcggctgcgaggggatcgtgaattgggcgacgccgatggttcctctgctggttgacaatacgcttgaaagtgaaatgctttcctatctgaaagcggtgctgggggatcaggcgcgtgtctgcgaacagccggtcagaaagctgggctcggaggattttgccaaccttacggggcgtgttccgtctgcgttcttctttatcggcgcaggaccagacagagagcacggcggagcgtacagccagcataacgccagggtggttttcaacgaggatatgctgccgctgggaagcgccgctttcgccggctgcgccgccatgtggctgcgtgctcacgcacaagccggaaaataaagcgatgcaaaaatgacgacccaatgtatgagctgagccatacattgggtcgttttttttctgcgcggcggtaagccgcagcagcaaattctattctgccggtttacttgttgccatagagcgtgttgaagcctgtgaagtcaaagctcttcaggcagtccatcatcacatccacatcggcggaacggtcgttgccgatgacaaaggcgtagttgttgtagctggcgtaatagtccgtgtcgcctgagaagatctcgtgctgaagctcgtcataaaaatacatcccatagggctgatctgcacccgtgatgcttacgcttgcaaaaacctcggactcggtccgctcccggtttgagccggcggcgatgttcgactgatcgatgctgtccaccttatatagctggagcatattgatgaacggacggtcagactccgacagcagcgtgtacatcggtccccagttttccagcacatcagccgctgtgaggtcgtccagcaccggagaccattcgtagcccttgttgcgtgcaagcccggtcagcatggactccttctgctccacagatgtgaagtacggaccgaggaaggtgaaatagaacatgacgttattgcgatcaacattgtcgcgcactactatccacatccacggctctgcgccgtcgcgccggtcacgttttttgccggtctcgtcgtaatatgtctctgccgtggcgctgtcgtacacctcatagctcacgccccagcccttcggaatggtgacggtgaaaatatcgcaggtgtataactccgtctccatggtgctttccggctcttcaacgggggcggcggtcgcctcaacggcggggtgcgtctcaacggcggcgctgataacttccgttggcgcgggcacggcggcggttgtgctgccgcaggcggacgccccggcgatcatgcacagcatcagcgaaagtgcgataagctttttcattgcagttgtcatgcgtttgtcctccttgctttatgcgctgcaggtttaacctgcctgtattatatattatttagacgaaaataccaatactttgttctgcggctttgagaaaaaattttgcaagccgcacatagtaaattctgacgggaaagcgtcaagacgcgcaggggaaactgtggaaaatgtcgaaaaatctcttgacaaaagcaggaatgtattgtattatatatgcagttctttataccataccaagaactgctcaggttactatgataaggtagtaaaccgaagagctctaatgccccgtctcgcacggggcattatctctaacagcgaaaaggcaaattttgttgattcaaaacagaaatattcaaaacagaaatatacatggaacgggaggggacatatgcaccggtacgctataggcttggatattggcataacgtccgtcggctgggcggcgatagctttggacgcggaagagaatccctgcggcatgttggattttggctcgcggatctttaccggggctgaacaccccaaaacaggcgcgtcgctcgccgcgccgagaagagaagcgcgcggcgcgcggcgcagactgagacggcacaggcaccgcaatgagcgtatacgccgtcttatggtatctggcgggcttatttctcaggaacagcttgagagtctatttgccggacagctggaagatatttatgccctgcgcacacgcgcgcttgacgaacaggtcgcgcgggaagagctggcgcgaataatgctgcacctttcgcagcgcaggggcttccgttccaaccgcaagggcggcgcggatgcggaggacggcaagctgctggaggccgtgggcgacaataaacgccgtatggatgagaagggctaccgcacggcaggggagatgttctttaaggacgaggcgtttgccgcgcataagcgcaataagggcggcaattatattgcaaccgttacgcgcgcaatgaccgaggacgaggtgcacagaatttttgcggcgcagcgcggttttggcgctgaatatgcaaatgagaagcttgaagcggcgtatctggacatactcttgagccagcgctcgtttgacgagggaccgggcggcgatagcccgtatggcggaagccagatcgaacgaatgatcggcacatgtgcgtttgaaccggatcagccgcgtgcggcaaaggcggcgtattcgtttgagtatttttcacttctggaaaagctcaaccacatccgccttgtcagcggtggaaaaagcgaaccgctgacggacgcgcagagaaaaaaacttatagagcttgcccataagcaagatacgctcagctatgcgaagatccgcaaggagctggagctgaacgaagcggtgcggtttaactctgtgcgttatacggatgacgccacgtttgaggagcaggagaaaaaagaaaagatagtctgcatgaaagcgtaccacgcaatgcgcaaggcggtggacaagaacgcaaaagggcgttttgcctatctcaccataccgcagcgaaacgagatagggcgcgtgctgtccacatataaaactagcgcgaaaatagaaccggcgctggcagcggcagggatagaaccgtgcgatattgcagcgctggagggactgagctttaccaaattcgggcatttatcgatcaaggcctgcgataagcttataccgtttcttgaaaaagctatgaactataacgatgcctgcgcggcggcaggctatgatttccgcgggcacagcaaggatgggagacagatgtatctccctccgctcggcgatgactgcacggagatcacaagccccgtcgtgcgccgcgcggtctcgcagacgatcaaggtcataaacgccataatacggcgctatgggacaagcccggtgtatgtgaatattgagcttgcacgcgaaatgtccaaggactttgccgagcgcaataagataaaaaagcagaacgacgacaatcgcagcaaaaacgagaagataaaggagcaggtcgccgagtacaagcacggcacggcgaccgggcttgatattgtgaagatgaagctcttcaacgagcagggcggtatctgcgcgtattcacagcgccagatgtccattgaacggctcttcgaccccaattatgcggaggttgaccacattgttccgtacagcatcagctttgacgaccggtacaaaaacaaggtgctcgtgctcacggaggagaaccgcaacaagggcaaccggctgcctctgcaatacctcacaggggagcgtcgcgatcgctttatcgtctgggtgaacaacagcgtccgcgattttcagaagagaaagctgctgttgaaagaagaactgacgccggaggaggagaacgactggaaggagcgcaacttacaggacacaaagttcgtgtccagttttctgctcaattacataaatgataatctgctttttgcgccgtctgtgcgccgcaaaaagcgtgtcacggcggtcaatggtgcagtgacggattatatgcgcaagcgttgggggataagcaaggtgcgtgaggacggcgaccgtcaccatgcggtggatgccgtcgttattgcctgcaccaccgatgcgctgatacaaaaggtttcgcgctatgaatcgtggcatgagcggcactatatgccgacggagaacggcagcatacttgttgacccggcgacgggcgagataaagcagacgtttccgtacccgtgggcgatgttccgaaaagagcttgaggcgcggctgagcaatgacccctcgcgcgcagttgccgatctgaagcttccgttctatatggacgctgacgcgccgccggtcaagccgctgtttgtctcgcgtatgccgacgcgcaaggtgacgggcgcggcgcataaggacactgttaaaagcgccagggcgctggcggacgggcttgcgatcgtcaggcgtccgctcactgcgctcaagctcgataaggatggggagatcgcggggtattataacaaggacagcgaccgcctgctgtatgacgcgctgaaagcgcggctcacggaatatggcggaaacgcggcgaaggcgtttgctgaacctttttataagccgaagagcgacggcacacccggaccggtggtgaacaaagtcaagctgacagagccgacgactctcagtgttcccgttcaggacggcacgggcattgcggacaatgattccatggtgcgcatcgacgttttcagagtggtgggcgacgggtattactttgtgccggtgtatgttgcggacacgctcaagcaggaacttccagatagagcggtggttgcctttaaggcgcacagcgaatggaaggtcatgtccgacggtgattttgtgttctccctctatccgaacgatctggtgaaggtaacaaggaaaaaagatgttatactaaaacgttcgtttgataatagcactttgccagaaacaattgccagcaatgagtgtttgctgtactatgcaggcgcggatatttctactggagcgataagctgtgtaacaaacgataatgcatattctatcagaggcttgggtataaagacccttgtgagcatggaaaaatacacggtcgatattttgggtgagtatcaccccgtaaagaaagaggagagacagcggttcaacacaaagcgaggttaaaagatggcgttcagaaatatcatcatcgaaagcccggcgcgcatctctgtgaaaaacgaacagctcataatcaaaaccgacagcgagcattcgctcgcggtcgaggatatttccgcgctgcttctcgagagcagacagtcaaccataacgacagccgcgctgtcccttctggggcagcgcggctgcgcggtctttgtgtgcgatgaaaagcatatgccctgcgccgtgctcgcaccgttcagccagcacagccgtcagcttgccgtcgcggcgagccagctgtccactggggaggtgctgaaaaagcgtctctggcagagcatagtcattgcaaaaataaagaatcaggcagagtgcctgcgcctgtgcggcagggaaaacgccgcgagcgggcttgatgcaatggcggattccgtccgctccggcgacacgggaaacgcggaggcggcagcggcggcgaggtatttcccggcgctttttgaaaaaggctttacgcgcggagcggataacgggataaatgccgcgctcaattacggctatgcgatcctgcgcgggtgtatggcgcgctgtcttgcggtctacgggtttctccccatgttgggtctgcaccataaaagcgagcttaacggcttcaaccttgcggatgatatgatggagccgtttcgcccggtggtcgatcttatggtcacggcatcgtttgacgctgacagcgaactgacgccggaggcaaaacgcctgctgttcaatgtgttgaatctcgacatactctccggcggacaaaagcacaccgtggcttatgccatggagcgcacggtacacagcctgcagcgctccgtgaaccggggagaaaacggactcatcctgccgcagcttctgccgctggcgcagcacagctatgaataagtttatgagaatgatggtcttttttgacctgcccgtgcagacaaagacccagcgccgcgaggcgacacggttcagaaattttcttctgacggatgggtatcacatgatacagtattctgtgtatgcgcgtgtctgcaacggcgctgacgcggttgaaaagcaccgccggcgcataaaggacaatctgcccgacaacggctctatccgcatgctggtcataaccgaaaagcagtatgaatccattgaaatacttctcggcaggttgacgcaggcagacgatacatttcaatgtgaacagctctctatattctgaaaatcagaaaacaaagcctgtcccagccgttgccgggacaggctttgtccgatggtctattataccataccaagaaccatcagggaactacaacattttctttagccataagttatcctttctgattataccataccaagaacca

SEQ ID NO: 2762 - DNA, 14612 bp, synthetic construct
  source 1..14612: mol_type = other DNA
  misc_feature 1..14612: note = Synthetic
tgcggattgtgtgtcgtggaagttgaaggagtgcctaagcttttaagatcttgcgcaacaaaagcgtcagatggaatgataataaaaacaaataccaataggacaaaggaaagcagaaagaccgctttggagcttttgctttcagatcatacaggagactgcaaggcgccatgtaccttggcatgcccgggaaatacggattgtcagggatacgttggactaatcgcgaacggtcagtttagagaagccttggaacttatcaaggaacagctgcctcttcctgcggcaataggaagggtatgtcctcatccatgcgaaacagcatgtagaagacagcttatagaagagcctatatctatagcttggcttaagagatttgtagcagacatagaccttgaagacaaggatctattcataccggagatttctccatcgactggcaagaaagtcggtataattggtggaggtccaggaggactaagcgccgcatattaccttctcgggatgggtcacgatgttacaatttacgatgccatgccacagatgggagggatgcttagatacgggataccccaatacaggctacctaaagacatagtagatcaagaggttgcaatcatcgaaaagatgggtgcaaaaatgctgaacaacatgaagataggacgagatatcgactttgaatatcttcaaaatcagtatgatgcagtatatgtggcagtaggagcctggacaagctcaaaaatgagatgtcctggagaagaacttcctggagtaattggcgggatagattttttaagaaaagtgactttaaatgaaccgattgagattggcagcaaggtagcagtagtcggtgggggaaacacggcaatggatgcctgcagaacagcagtaaggcttggagcaaaagaggtttacatattatatagaagaaccagggatgaaatgcctgcagaagatattgaaattatcgaagcggaagaagagggtgtaatatttaaataccttgttgcgcctgttgagataattgaggaggatggaaaggcaaagaaggtcagattgcagaaaatgcagcttggtgagcctgatgcaagcggaagaagaagacctgtaccgattgtgggcgaagaagaaacaattgacgtagaccttgtaataggcgccataggccagggtgtggaccttgctgggtttgaaaaccttaaggcgaccaattggaatacaatagttacagatgagaccacttttacaacaagcatgaagggggtttttgcgggaggagatgcaatcaatgatggcgcaggaatagcgatagaagccattggcgatgcaaagaaggccgcaatcgtaattgatgaatatttaaaaggtcaagagatttcattcactgagccatactgggttaagagagaagatataacagaagagactttcaaagatagggaaaaggctaagagacctcacatggggcacctgtctgctgaagagaggaagaaaaacttcgaagaggttgttgcaggatatactcctgagcaggcaatggaagatgcaaaaagatgtcttgagtgtggctgcggagacgtattcgaatgcaagttgatagattattctaatagttatgacgtaagtccggaaatatacgagggagaagttcactcccgtgaacatgatgacaaccacccatttatcgtcagaaactccgacaagtgcatactttgcggactttgcgtgagagtatgtgacgaagtaatggataatggagctttaggccttgttgacagaggatttgatacagcagtcaaaccggcacttaatctgccccttgctgaaacgaactgcatctcatgtgggcagtgcataagcgtttgcccggtaggagcattgcaggaaagacttcaaatgacaaaaccggtacctgttgaacaggtagaaacaaagtcagtatgctccttctgctcagttggctgcaacgtaagcgtacaggctaagggagataagatatatagagtgctcccggataaagacagtacagtcgataaaggcctcctatgcgtcaaaggaagattcggttacgatgcatcaaaccaaaagagcagacttactaagccaatggttaaaaaagagggcaaactggtagaagttagctgggatgaagccataaggactgcagctaaaaagatgcaaagcctaaggatgctttatggcaaggatgctgtagcggtagctgtatctgacagatatacaaatgaagagatatacctggcgaagaagctggcaagggattacctgtctactgataatattacatcatttaacagaaattacggagggattgaagaagttcttggcatggacgcttcaacaaatacctttgaagagttaaaatccaccaatatgattctattggtaggtggagacataatgaaggaccataccattgccgccttaaaggtaagggaaggtctcagaaacggtgccaagcttactgtcgtgaacaacatagaaacacaggctgacgaatgggctaacagaaagattgaaacagaggacttgaccctgcttaaagagatgctcaaagctcttatagatatgggatgcgaaccgaaaaatgccgaaggatttgaagaactgaaaagctcacttgcagcagtagaggtttctagtgatgcaaaagcaatggcaaaagaatacaaagatgctcaaaaagccattatcgtatttgatcaaaattacgtaacggctggagctgcaaggctaattgcggatattgccgtagtggctggaaagataggacttcccagaaggggaataatacagctaaagcctaaaaacaacagccaaggtctttcggatatgggagtcaataaagataacaaggtaattgaaaaagccatagaagataaaaccttgaaaggacttatgatttttggagaggatgttgaaggcaaaaagactgataatctagaattcttgatggttcaagacctgtacctaacaccaactgcacaaaaggcagatgtggtaattcctgctgtcagctgggctgaatcagagggaacttttactaactctgaaagaaggattcaaaagatagcccctgcaataacggcgctgtccggaaagtcaaattgggagataatgaccaaccttacggttgtgttgggagaacaaaatccctttgcatcagttgaagacataatggaagagctatccaaggctatacctgtttataaaggagcataccttgcaaaaagcggttcaatatggccggttggcgaatctgatgtgctatatatggatggatttgctactgaagataaaaaagccaaccttttagttgtagaggaaggcaagatgttcgaaccgagaatttctacagattttgtggaaaaagagtttggaaaaattacagagacactttaagtcaaaaaacccctgccagatattttggcaggggtttgtattttaagcatctagaaaaatcttactaggaatcttcagacggtcgttgtcatttattattttgttgctaagatcaaaagaacccttcattctctcttgttcgtcatccaagtttatgcccagtccgaaaagtatcaatttaaaaatataaagcctgaattgatcgttgttaatatccatacggcccctttggcgcatccttccgatggatttaattgcattgtgaaaggaaaataggtttagttgtatcgtttgatgcgtattgtactcaggggaaaaggcgtgagtttccaagatctttaaattgaggtcgtactgataagatctgtagaaggcatcctcaatttcttccattatctcatctgaaaaagactctactataaacgattccaccttttcgtcactgaagagcatgctcatgaatacatgggtatacaccatggcgtagaacaagggatcttcatctgctttgatatatttgtttaaagaacccaaaagttcatcaaaaatttcgcttatcattttgtaagcaagtacttttttactgtcaaagtaatatttaatcaaacccagatttgttgaagattttgtagtaatatcccgtgtagtagttccgtaataacctgactcgtaaaacaaacttttggcagcctgataaatcttatctgcagcggatatctttttcatgctttcacgcctttcaattgaatatctcagttatatattctatcataatatttagcaaacatatatatttaatttgataaaaataaagttaagccaataattatatgcataataaagtaatcttattaaaactttgatatacttaaacgagaatgataatcatggatatggggtgaaaaaatgataccaagaaaagagatgaaaaaaagcgaaagtccaatcgatataaaagaaggtgtgtacgaaagatttcctgttaccaggcaggcatttgtgaccgtgagttttcaggatgcgggagaaatcggttacaatcactggatgaacaaaatgatggaaaacatggtcagaagaatgatgagcggcgaagaaggaagaaggcaagaagacaatgctcttgacttaggggcaaatgcactcaacttgcttataggagagtacggatttccgaattttcaattcttaaaatggagtcccctgtttgtgccggatatgcttgccaatcatcccgtcaatatgccaagcaatgaattatcaaatatggtgaaaaaagcagcagttttatatggagctgatctagtgggaattgccagtcttgatcccaagtgggtctattcaaaagatctattcaagtcctttgagattgtagatgaaggctccccccaagagacggaagatgccttcttaatacctaggaaggtaaacaaagccatagtaatggccgttgccatggatgacgaaatgatagaaacatcacctttggtagatgccagcaccgctacatctcttggttattccagaatgggtatcacggcggtatcccttgcggagtatattaggggtttgggataccaggcaatcccttgcatgaatgatactgcacttagcatacccttggctgttgaggcagggctaggtcagttgggtagactgggactccttataacacctgagttcgggccgaatgtcaggctgatgaaggtacttacagatatgccccttgaaaatgaccatgcaatagactttgggataccggaattttgtgataactgccatttatgtgcagagcattgtccgtccagtgctattagctttggtgagcaaagctacgatgggatatgtgataataacaactctggaataaaaaaatggtacatatcagcagaaaagtgcctgagactttggcagacaaatggagcaagttgtgcaaactgcatcgcagtatgtccttttacccggggctttgaatccatgcagtgttttgaatgtaaaaaatgtgagactaaaaccggatgtgagcttcaggtaaatacccacttaagggctaaatacggttatttggatgttgacacatggggaaataagccaaaggtgctaaagccaaggcgcagaggactatagaaaaaacttgagtgaaataaaataaaagcaaatggacatatgcttaatcataattaatcatgggaaataacagttatcggcttaaacattgataccgttgcttcgtaagatataaaactaattgattacattgcacttaatttagaagctttttgtggttgatctgcagaaagctcttttatactggtaagattaattctataaggatataaataataaaaccagtgcaagataacagttggcggaggttgtaatgaaatacaaaaatttaatagataatatgactttagaagaaaaagcctcactactttcaggaaaagatttttggatgtctaaatctatagacagactgaatataccttcgttaagaatggctgatggtcctcatggaatcagaaagcagattggtagcgcagaccatttgggtctaaatgcagggcatccctctacatcgtttcccacagcagctacattagccaacagttgggacaaaaacttggtggaaaaagtaggggaactattgggtgaagaagcaaaatcacatgacgttgacgtttggcttgggccagggcttaacataaaaagaagcccattgtgtggaagaaattttgaatacttcagtgaggatccctatctatcgggcaagcttgcagcggcgttaataaaaggagttcaatcaaaaggcatagcagcctgtcccaagcactttgcagcaaataaccaagagcttctgcgcctgacaagcgattctgtcttggatgaaagaaccttacacgagatatatcttacagggtttgaaatagcagtaaaagaaggtagacccatgtccataatgtctgcatacaacaagattaacggcgttcatgcaaatgagagctcttatttgttgaaagatctattggttgataagtggggctttgaaggatttgtggtaacagattggggtggaagtaaagaccatgtagaggctgttaaagcaggaagccatctagagatgccatcgaatgggggagtcagtgatttagaggtggtggcagcagtcaagaatggcaatctcgcaatggaagtacttgatgagcgggttgacgagcttctcagtgcagtatttaaaatcaagaaagaacagaaaaaacgagaaaatgaatttgacgtggatgcacaccatgaaatggcaagaatagcagcagaaagatccatagtactattaaagaataatgataagttgctgcccttaaaagctggtattaaagtagctgtgattggagactttgcagtaatacccagatatcagggggcaggctccagcaaagttaccccgactaagatggatgacactttggagatgattgaaaatagccatctggatttaataggttatgcccaaggattcgaacgatacgggaaggcaaatgaaagaatgaaagaagaggcattgagcttggctaggaatgcagatgttgtcttattgtatctagggcttgacgagagctacgaatcggaaggtttagatcgcaaacacatgaagattagagaaaatcagactcagctgttggcggagttaagatatattaatgaaaatattgtagttgtcctcagcgccggttctgtcgttgaaatgccttggttagacaatgcgaagtctttattgttttcctgcttggcaggacaggcgggagcaagcgcaattatcaatatcgttacaggcaggatttgccccagtggtaaacttagcgagacgtatcctattaaacatgaggatacccctacatataattatttcccgggaaatgagcttactgctgaatacagggaaggaatatacgttggctacagatactatcaaaaaaaggatattccagttagatttccttttggatatggactaagctatacgaagtttgagtattctgaccttgtatgctcaaataataaagttgcctttaaaataaaaaatgttgggaaaatcccaggagaagaaattgcgcagctatatgtagggttaaaagacagtaaaatatttagggcatcaaaagaacttaaagagttcagcaaagtttatctagaacctggagaaaaaaaggaattagagatagtccttgatgacaaagctttcagatattacaatatcaaaacgcataaatttgagttagaaaccggtgaatatcggattatggttggtgcatcttctgaggatatagcattgaatgaaactttgcatttagtgggaacaaatgctgatagtccctatgatgtggtgaagttatcagcctactacaatggagatgtgagaaacgtttctgatgaagaatttgaatcattgctgaatcgcccgattccaaaatccagttgggatactactaagaggctaacaagtgaagacaccatttctcagctttattacgctaaaggattgataggtcggcttgtttttaaaattcttgacggaatcaaaaatcgttcagaaaaaaagggagagccaaatataaacatactctatatttataatatgccttttagggcgatttctaaaatgaccgtggggcaagtagatgcggctatgattgatgatgttttagagatggtgaacgggaaattttttataggagcgtttcacttaatatcctcgtggtttaataatagaagtgaaattaaaaaattgaaaaagcagttggaaaacattaaaaaagagaacatttaatgctctaggggcaaataagaaactcagattgccatacagatctgcatcaatctaccaaggcatttattttgtctttgcaaatatccagatagaaaatcctgcaactaagtctagcgggacttttcctttgactattaaatctgttatgagaatcttgatcgtaattgaacactctactttaagtttttggcgctggtggcatcaaaccaattctcatgtaagatatcagtcatcagaggtgattttgttttttatcaacttaggtaattgtcatagagattaaaccgctcatatcaagaatgagatgacgtaatatttaaaacaagttgtaaaaaaatcttgacttagagtgtactctaggtggtaaggtatatatatggattgagaaaaaactagaggagacgatatatatggatacaaaaaaactgggatttggatggatgaggttacccatcaaagataaggatgatcaaacaagcatcgactatgaacaattaaataaaatggtagatactttcttggaaagaggttttaattacttcgatactgcttacatgtaccataactttgtaagtgagaatgcattgagagagtcgttggtaaagcgccatccgagagacgcttatacagttgcagataagctcccgattatgcttattaaagagcaagaagaattggagaaggtatttaatgagcagcttgataagacaggtctagattattttgactattatatgatacataacctaggcgcaggtcattatgaattagctaagaaatttgacgctttttcatttgttcaaaataaaaaagcggaaggcaaagcaaagaaaataggtttttcctttcacgacagagcagatttgcttgatgaaattttgaccgagaacccggaagtggacttcgtacaattgcagatcaattatattgactgggagaatgaaagcattcagtctcgaaaatgctacgaggtcgccatgaagcacaataaacctgtgataatcatggagcccgtaaaaggtggaatattgtcacaggttcctgaagaggtggaaaagctatacaaaaatcatgattcggaaatgagcgttgcatcctgggcagtaagatatgcagccagtctcgataatgtcattaccgttttaagtggaatgtcttcaatggaacagctgttggataatacaggctatatgaaggaatttaaacctcttttcaaagaagagctcgatattatcgacaaagctgttaagataatcaacgaatcgataacggtaccttgtacagcttgtaattattgcgtggatgattgcccgatgaacatccccataccaaactatttttcactgtacaatgcgaaggaacgatttaaagacaaagggtttaatattttaaaggtctattatggaaattacactaagaagtttggcaaagcctctgattgcatcgaatgtggaaaatgtgaaaagagctgtccacagcatatagaaattatcaaaagtttgaaagatgtggcaaaagcgtttgaggtgtagactgtaaattaaattcaaaaaagtttaaataatgtttacaagaaagaaaaaatgtggtatcatctaactaatctattataccaaaacttaatatggttgctacaataaggtagtacaccgaaaagctctaacgccttgcatgatgcaaggcgttatctttatgcaaaaaacttgattaaaaggaaatataagtatataattgttaattaaaggggtgaacataatgaattataaaattggattggatattggaattacttcagtgggatgggcaacagtgaatttggatagtaatgatgaaccttataaaattattgatatgggcgttagaatatttgatgctgctgaaaaccccaaagatggagcatctttagcgttgccgcgaagagaagccaggggtgcgagaagacgaattagaaggaaaaaacaccgactagatagaattagagcacttatatttagcaaggatttactgactgaagaccaattcaataatttgtttggtcacaaaaaattaaaagatatatatgagatacgagttgaagcattagatagattacttaatcaggatgaaatcactcgactattgatacacttagctcaacgcagagggtttaagtcaaatagaaagtctgaaaaactagcagaggaagaatcgggtaaacttttaaaagcagttgaaataaataaaaaactgatgttagaaaaaggctataggactgttggtgagatgcttctaaaagatcctaaatttgcggaccataaaagaaacaaaagcgatgattattcccatacggtagggagagatctagttttggaagaagtacaaatgatttttgattgtcaaagaaaatatggatcagaaatactcaatgatgagtttgagtcaaagtacgttgagatactttttacacaacggtcatttgataatggtccaggactgccaagcccttattctggggaccagattgaaaagatgattggtatgtgcagatttgaaaagaaagagaagagagctcccaaagcagcattttcagctgaatacgccaacttattacagaatataaacaatatcagagtaaacataaacggagaaagtagatttttgactggagaagagagaagagctattaaggagttggcctttaaaagtccagctttaacgtacgcaaaaatcagaaaagaattaaagttcacagaatcagttttattttcaacactaaattatggcaacaagtccattaacgatgtagaaaaaagcgcgaaatttgactacttgaaaaactaccataaagttagagtggctctggataaaattgaaaaaaaccgtatatgcgattatagtattgaagcactgaatgggattggatatgcttttacggtttacaagacagatcaaaagatagcagattatctcaatgattttaacatatccaggaaggacctagaagttttgctgcttcatgttggaggatttagcaaatttgcaaatctcagcaccaaagctttagataaaataataccatttttagaacagggctttaaatataatgtagcttgtgaaaaagcagattataactttaagggccacgacggaaaagaaaagcaacttttactgccagcagaaatcgatgaaattactgaagttacaagccctgtagtgcgtagggcaattgctcaaactaggaaagtaattaatagcattatcagacagtatggagaaagtccgacttttatcggtattgagttggctagagaaatggcgaaggatttctcagatagaaatagaatagaaaaagagatgaaggaaaatcaagctcaaaatgaaagaattaagcaagaaataagtgatcaaggagtactatatccctcgggaatagatattgtgaaattaaagctttggaaacagcaagatggcatatgcccatactcacttaaagagattcaaatagataggctatttgaagttggttatgcggacattgatcatataattccatacagcatctcgttcaatgacagttatgccaataaagttgtggttttagcaagtgagaacaggcaaaaaggaaacaggctacctttgcattacttaaaaggagataaggcagataagtttaaagtgtgggtaaataataccattagggataaaaataaaaaaatgaattttcttaaagaagatatcacggaagaagacaggaagcggttcaaggaaagaaatctcaatgatacgaagcatgtttctcgatttatgtacaattacttaaacgattacctgctgtttgcagaaaataatactggcaagaagaaaaaagtaaccgctgtaaacggagctgttacaagttatttaagaaaacgttgggggattagtaaagttcgagaagatggagatcttcatcatgcagtggatgcacttgtggtagcgtgtacatctgacgggatgatacaaaaagtgtcaagacattgtgattataaagaaaaacgatatgttcaactagatgaacatgtagttgataaaaaaacaggcgaaattatagaaaaatttccaatgccatgggaagggtttcgaaacgaactagatataaggttgatggatgatcccatgaaatttctcaatagtattggagaatttacagaagataatattaaaccgatatttgtatcaagaatgccaaaaagaaagataacaggggctgcccacaaagagacaatttttagcccaaaactaaaagatgaaggattaatattgctaaaaagaccattggagaaattgaaactagacaaagatggagagatagaaaattattacaatccaaacagtgaccgaaaactgtaccaagaattaaaagaacaattggtgaaatataataatgatgggaagaaagctttttcagaaccattctataagcctacaaaaaatggggaaaagggacctgtagtcaagaaggtcaaagtttatgaaaaagcatctttaacagtcgatgtgcatgatggaaaaggcgttgcatataatgatagcatgataaggatagacattttccatgtggaaggtgaaggatactattttatcccgatttatattgcggatcgtatgaaaaaagaacttcctagtaaagcggtagttgcacataaaccctataaggaatggaaagaaatgaacgataaagatttcatattttcattatacccaaatgatttgattagaattgaaggaaaaaaagaattgaaactatctgcaataagtattaagggaacactctctaaagagtacatatgcaaagaaatacatgcttattatgttaaatcaggaattaatagtggcgtaattacaattattaatcatgataatacatacacaatacaaagtttaggtataaaaactttaaaaactttagaaaaatatcaagttgacccacttggaaatcactataaagtgggaaaggaaaaacgaatgccattaaaataatgaggtggttgaatgggttacagaaatatttttatttcatcgccggccaagttaagctgcaagaacaggcaatttattcttaatactgacatggagtattcaattcctatagaagatatcaactgtgtgatgatcgaagatcttaggtgcaacataactgcatatacgctatcattactagctcaagatggcgttacagtttttatttgcaatgaaaaacatctgccgatagggacaatactgcccttgtggaaccactctagacaatataagattattaaaagtcagttgaatcaaaaaaagccatttttgaagcgtttgtggcaaagcataataattaaaaaaattgagaatcaagccgtttgcttatctttatcagcaaaagaaggagaacaaaaactttttgcgattgctcaaaacgtcaagtcaggagatgtaggcaattcagaggggaaagctgctagatattactttcagaagctctttggtgaagggttttatagaggtgatgattgtataacgaatgcttgcctcaattatggttatgccatcttaagaggagtagtggcaagaaacttagcgacttatggatttgaaaattctataggaatatttcatcacagtgagcaaaatagctttaatttggcagatgacattattgaaccatttagaccggtagtggatttgtatgtaaaaataaatattaatgatgatctggaggaattgacaccaaaaataaagcaaggtatattcaatcttttaaactgtaacgttttatccgatggacaggttcacacagtatcttatgggattgaacgaatggtgaagagtttgtctaactgctttattaatgatggtgaaaagcttgtattacccgagttaatgcctcttgaacagcatttatatgagtaaatttatgaggatgttggttttcttcgacttaccggtcacgaagaaaaaagagagaaaagctgcgactgcatttagaaattttttactgaaagatggctatcacatgatacagttttccatttatggacgggtgtgtttggcaatagaaaagtacaacttttggcaatcaaaaatacaatagccagtactaaccttattacttgattaatgaattcatcatgcggtagcttttgcctgtaaatatgagcatatgagaatggtgcactagtctatcaacgatagccgcagttagcttttcatcaaacaggaaacctttccatctaccaaactcaatattggttgttatgatgacgcttttagtctcataacatgtagaaatgatatcaaacaacaatctggcaccttcttggtgaagggggagatacccccattcatcaagtatgagcaaatcagcctg

SEQ ID NO: 2763 - DNA, 14393 bp, synthetic construct
  source 1..14393: mol_type = other DNA
  misc_feature 1..14393: note = Synthetic
tacgatcacgttgggcatggagatcagccgggagagcaggtcgtcgttgagaatgtggccggagcggtcctcaaagaaaacgtcggactcctcctcgtacacgtccaggcaggccgcgccgatcctgcgggccttgatcccctccagcagggcctcggcgtcgatcaggccgccccgagaggtgttcacgagcaccacgcccttcttcatccgtccgatcgccgcagcgtcgatcatgtgacgggtctgctccgtcagcgggcagtgcagggagatgacgtcggcccgctcgagcagctcgtccagcggcacgtagtcgatgccgccgttcgtcgccgggaacgggtcataggcgatgatcttcatgccgaagccgcggcagatgtcgatgaagatccggccgatctttccggtgccgacgacgcccacggtcttgccgtgaaaatcgaagcccgtaagaccgttcagggagaaattgaattcccgcgtgcggttgtaggccttgtgaatgcggcgcacggaggtcagaagcagagcaatcgcgtgctccgccacggcatagggagagtaggcgggcacgtgtaccacgtggaccttgccaaaggcagcagccacgtccacgttgttgtagcccgccgagcgcagggcgatcagcttcaccccgcagcgatacagcctgtcgatgaccgcggcgttcaccgtgtcgttcacaaagacgcacacggcctcgcacagctccacggtgtcctcgttcagcctggtctccagaaaccggaactgcatctcatgcgcggcgccatagcgttcaaaggagggcttgtcatactccttcgcgtcatagaacgcaatcttgatcatagggatcactcctttcccatagcttgcctcccctgccgcgcatttattccgttggaattactcaccacaaggaaagcattttattgttgacaaattaagaatttaatgctattgtatattcagttcttataccataccaagaactatgaggttgctataataaggtagtaaaccgcagagctctaacgcctcacatatgtggggcgttatctcattttccgaaaaaaggaggattgctatgcttccgtacgggatcggattggatatcggtatcacatcggttggctgggcgacggttgctcttgacgagaatgatcggccatatgggattatcgggatggggtctcgaatttttgatgcagcagagcaaccgaaaaccggcgagtctttggctgcaccgcgccgggcggcaagaagcgcgcgacggcgtcttcgccgtcatcgtcatcggaacgaaagaattcgagctttgattctgcgagaaaacctcctttcggaagggcagcttttacatctgtatgacgggcaattgtccgacgtctattcacttcgcgtcaaggcgttggatgaacgggtttcaaacgaagaatttgcgagaattttaatccacatttcccaacgacggggatttaagtccaaccgaaaaggcgcatcttcaaaagaggacggcgaacttcttgcagcaatcagtgcaaacctggaacgcatgcagcagcagggataccgcacggtcgcggagatgtatttgaaagatcccatctatcaagagcaccgccgcaacaagggtgggaactatattgcaacggttagccgcgcgatggtggaggatgaggtccatcaaatctttacggggcagagagcctgcgggaatcctgcggcgaccaaggagctggaggaagcctacgtcgaaatcctgctcagccagcgttcctttgacgacggccctggggatggcagtccgtatgcaggcagtcaaatcgaacgcatgattggcaagtgtcaacttgaaaaagaagcaggagaaccaagggcggcaaaggcaacgtattcgtttgagtatttttctctgctggcagccatcaacaatatcagtatcatctccagcggacaactcagcccgcttaccaaagagcagcgtgaaatgctgattgccttagcgcataagacttcggaattgaactatgcaagaatccgtaaggaactggggctttccgaagcgcagcgctttaatacggtttcctacggaaaaatggaaatctcggaagcagagaagaaaaccaaatttgagcatttgaaggcttatcacaagatgcgcagggaattcgagcgcattgcaaagggacatttcgcgagtatcacgattgaacaacgcaatgccatcggtgacgtgctgtcaaagtataagaccgacgcgaagattcgccctgcgctgcgggaagccgggctaaccgaagtggacattgatgcagcggaagcgctgaacttcagcaaattcggccacatttctataaaagcctgcaaaaagatcataccttggctcgaacagggaatgaaatatagtgaagcctgcaatgccgcaggatataacttcaaaggacatgacggtcaggagaaatcgcacctgcttcctccgctggatgaagaatcccggaacgtcatcacaagccctgtcgcattacgcgcgatttcgcagacgatcaaagtcgtcaatgcaattatccgggaaagaggctgcagtccgacctttattaacatcgagttggcacgcgaaatgtccaaggatttttatgaaagaatagaaatcaaaaaagaacaggatggaaaccgcgcaaaaaacgagcgcatgatggagcgtatccgaacagagtacggaaaagcctccccaaccggacaggatcttgtgaagttcaagctctatgaagagcagggcggtgtgtgcgcatattcactgaagcagatgtcattggcgcacctgtttgatcccgactatgcagaagtggatcacatcgtgccgtacagcatcagtttcgacgacggatataaaaacaaggtgctggttttggccaaagagaaccgtgataaaggaaatcgtcttcctttgcagtatttgcagggaaagcgacgggaagacttcattgtctgggtgaacagttgcgtgcgagattacaaaaagcgtcagcgtctgctgaaagaatccatttcagaagatgatttgcgtgcattcaaggaacgcaacttgcaggacaccaagaccgcttcacgcttccttctcaactatatcagcgaccatttggaattcgcgcagtttgccacggaacggaaaaagcacgttactgctgtgaacggcagtgtgaccgcttatctgcgcaagcgatggggtattacaaagatccgtgaaaacggtgatttacaccacgcagtcgatgcattggtcattgcctgtacgacggacggattgatccaacaggtcagtcgatttgcacagcatcacgagaatcagtatagtttggcaggagacagccgatttattatcgatcccgaaacgggcgaggtgatcaaggagtttccgtatccttggccgcgttttcggcaggagttggaggccagactcagcagcaatccgggactcgctgtgcatgacagaggattcttgctgtatatgacagagaacattccggtccatccattgttcgtttcccgcatgccgcggcgaaaggttaccggagcagcccataaagagacaatcaagagcggaaaagcacagaaggacggtttgttaattgttaaaaagccgctgacagacctaaagctggacaaagaaggcgagatcgcaaactattataatccaatgagcgaccgcttgctctatgaggcgctcaagaagcgcctgatggcttttagcggcgacgggaagaaggcttttgcagacccattctataaaccgaaaagcgacggcacgcaggggcccttggtcaataaggtcaagctgtgtgaaccctcaacgctcaacgtatccgtaattggcggcaaaggcgttgcggaaaatgacagtatggtgcgcatcgacgtgttccgggtggagggagacggattctactttgtgcctgtttacgtcgcagatacggtaaaaccgggactgcctaacaaggcgtgcgttgcacataagccctatacagattggaaagagatgcgcgaaagtgattttctcttctcactttatccgaacgatttgatgaaggttacgcacaaaaaggcgcttattctcaccaaagcacaaaaagacagtgatctgccggactgcaaagaaacgaaaagtgagatgctgtactttgttggtgccaacatttctacagcatcccttactggtcgcaatcatgataacagttatatgattaacgggtttggcatcaaaacactggagaacctcgaaaagtatacggtcgatgttttgggagaataccatcctgtcaggcgcgaaaccagacagacgtttaccggggggaatcgtcatggcattcaggaatattttgattgagaatcccgcctatgtatctatccgaaacagtcagcttgtaattcgcacagatgcagaacacagcgttgcgctggaggatatttctgcgctcctgctggaaagccgtcaaagcacgatcacaacagccgcactgtcccaattggggcagcgcggctgtgccgtttttgtatgcgatgagaagcacatgccctgtgcggttatgtatccgtttcatcaatacgtgagagagctatcggtgctttgcaatcagcttgcgatgagcgaaccgcgaaagaaacggctgtggcaacagatcgtacaataaaaaatccgcaaccaggcaacctgtctgcatctggcgggaaaaccagagcaggcagagcgcctgcagaatatgattcgcagcgtatgctccggcgattccggtaacgtagaggcaatggcggcacaatccgaatgctggtgattacggagaagcagtatgaatccatcgatattttgcttggccgtctgacggaggcagacgagccgtttcaaagtgaacaactcagctttttttgagacgaacacttccgaaatacttgcgtcagtcttgtttttttgcaaagcaaaaccgctcgaagccctgccttcaagcggttttgccgatagcctattataccataccaagaactatcagggaactataacgtattcgcccatgaccgttacaacgtctccattataccataccaagaactatcagggaactataaccatcccttcgatatgctccagaatccggacgattataccataccaagaactatcagggaactataactctcaaggcgtaaaagctcgtcagctcgtaattataccataccaagaactatcagggaactataacacctcccgcggcacgtccacggggacctgcattataccataccaagaactatcagggaactataacgtgtcgatgtttgcagtcctcccgtttgcgattataccataccaagaactatcagggaactataacctgaatgcaaggaggaattatgcgaaaaagattataccataccaagaactatcagggaactataacgacatggacggagacaccggcaaggaggatattataccataccaaaaactatcagggaactatacctgccagtccccacctccggatcatatttgattataccacgtcaagaggcaaagtcaatagacgtggtacaaagttttacataattgcattctcatatagtaactgttcagtctccctcctgcgcagggcggccagacctctggccgccgcgctgtctgctgcccggtgggacggttcggcaggtggcagggactgatcgacgcaggaaagatccctcctcttgcggggatggcagcatcctgcgtctgacgcaagccggatgacgaaagaggtgaagctcgttccgccgtacctccgggacggggaacccgtcccctacgcaggcccgcacgttccaacacgctccgccgtacctccgggacggggaacccgtcccctacgcaggcccgcacgttccaacacgctccggcgtacctccgggacggggaaccagtcccctacacaggcccgcacgttccaacacgctccgccgtacctccgggacggagaaggggatcaacagacacggcgtgaaaaaactgccctttcccgggatgggaaaaggcagttttcttattccgtcagcgaatagctgacgtccagcagctctttgatcgtctgatcctcggcgcttccgtcgagcaggacgccgagccaatggtttttattcatgtgccacgccttggtgatgcctggctgaccgaggtaggagccgccgatgatcggcccggttttcacgtcgagcaggaaggtcgggccttctccgggcagaccgagcttggaacgctcgacctccatcccgacgccaaaccatttccggttgtttgtatgccgaaaaacgaaggtctgcgggtagtccgcccaaaggtactccggcgctgcgtgataggtccgagtgatgtattggatcaattcattcacattcatagccgttcaagattcgctcgccgttccgggcgggtcctgtggggcgaagacggacgactcgctgctccggctttggggtccagcctgcgagcctcgcgtttcaccgatcgtttgctcataatacaattatatacagcgttagagataaatcaagtacgtactatcaggttatatccttaccgggagaaaagctccttttatagaaaagcagcgacagggcggtggcaatcgaccagccgatgggccatgcgcaccagataccggtggattgcagcgccgtgcgggaaagcaatacagccagcgtcacccgaaggatcaggtcggtaaaggtcgcgatcatgaactgccgcatcatgcccgctccgcgcagtacgccgtccgccgccagcttgacggaaaccacgaagtagaagggcgagaggatgcgcaaaaagacgatgccggtttttaaggccagctccgtcggttcgtccatgaaaaaccgtaccagcgcctctcccgcaaagaaatacagcaagcagaacgggacgcacagcagccacaccattttcagcccggcctgcaggccctgacggactcggttccgcttggctgcgccgatgttctgcgcggtgtaattggagatcccgttggccagcgtggtgaaggaggtgatcaccaggttattcagcttgaccccggcagaatagcccgccatcacgcctgttccgaagccgttgatcacgccctggatcaccagattgcccacggagatgaagctctgctgcaaggtgctgggcacggcgatggcagcgatctttttcagcagcgcggcagaaaagatcggcgcccagcccattcccgccgtcagcgtccgcattcgtctgagcaccacgaccattgccagcacgcagctgatcccctggcagatgaaggtggcccaggccacgccgtcaacgcccatgccaaaggcggtaacgaatagaacgtccatcccgatattcgccgtagaggacagcgccaggaagagaaagggcgtgcgggaatcgcccagcgccgcaaaggtccctgtcgccacgttgtagaagaacatgaagggcagacccaggacgtatattttcagatacagcgccgaatccgccattgcctcctgcggggtgtgcagcaaggccagcagcccgcagcagcctgccagtccaaagaccatcagcacaaggcacacagctcccgtcatcagcatagcggtgaaaacggcggttttcacctgccgataatccttggcgccgaataactgcgacaccaccacggagcagcccatgttgcagccaaaggcgaaggcaatgaaaatcagcgtgatctcatagctgttgccaacggcggcaagcgcattttctccaatgaactttccggaaacccaactgtccgcgatattataaagctgctgaaaaatgatgctgccgaaaagcggcaggcagaaccgccataataccgaggacggctttcccacggtcagatctttgttcaaagagctatgcttcccttcgcgttggatttatgacgactccatcgcgctgagaggccgcatggagcttgcagatcattcataacgattccagtatctcccggatctcgcgctccggcacgagccggaagccctcgtagcggaacttcggcgcggtcgcgcaggagacgaaggtatagccgtccggggtcaggttttccgcggagaagatggcgtccttggggatgcgcaccatggcacgctggccctgctcgcagtccggcccaagcagataggtctccttgcggcccgcatggagcacggtgatccgaacgccgcagccctcgtgatagtaccaaagctcctcgcagtcgatctgatggaactgcgattgctcccctgcgtccagcagaaaatagatgctgcccgccagcgcgcgtccgtccttctcaaagggtgctgtgtacacctcggagaaccatccgccctcggggtgggcttccagccggtaagctgttttcagttgcttggtccgttcttttgcaggattcatggtcagcagccctttccgtcgatgctgcaggccggggcgttctcccgacagacgatgggcaggccgtgctgcttcatccagccctcccaatccagggtcacggggccgtcctccgggacaagggccggaatgccgacagacccggccttcctgcagggctcgaagatcggaaggctgtcgcggagcttcaaaaacgccttgagattccgcatgctctcgttgatgtcaatatagtcgtacgccacgccgttggcgtccagatttgccttgcacacccggcagtcggggcacagaggacttccgtagataaccaacatgattccgttcctcctttacggatttgttataaaaggagctcaaagctcccgccttcaaacttgatgtcgctgcccgcctcgtccttgtagaacgagacgagctccgtcccgatcagtctgaacccgagcgcgtgcagcaatctgactgaaggggcgttgttcagggctgttcccgccgtgattctgaccacgcctctgtctctcagcgcgtcaagaagggccgcgacgctctcccttgcatagccttttccatgatagcgcgagtggaagcagtatccgacctcatagctgtcttcccgcttatgaaaaaccgcatatccgattacggcgtcttgcaaacagacggcaaaaaacagatgctccttgctttcctgaaaggacgcccaggtttcgattctccgggatacagaccgatcgtccaagtcatttggtctgtcatattgcgcgtaaatggattttgctgcatctgcccaaatcgcctgaattgctttccaatcgtcagcgcaaactcttctgatggaaagtctttctgtctgaatcatacgttcgttctccaagaatcccggtcgatcgtttcgccgtcttccatccggcaggccgggatttgtctctatcggatcgctttggaatacaggatttcctccgtgtcaaacgccggttttgaatgtccggtcatcgtgaaaccgtttgcttcgtaaaaggctctggcgcggcggttttcccggaacacccacaagacgacctcgtcgtatccggcctcccggatgtctgtcagaaccaaatccatcacctggctgccgtagcctttgtgccagttgtccggcaggctgtgaatgcagatcagttccgcctttccgcggaacgccgcgtcacggaccgcgtcccaatacgcaatgcaatgggggttcccgtccaccgagagcagatatccgtttcctttgttctcatccagaagtctttgatacatcgcggtcgcccggtcggcgtccgtgcatttcgctaaggtctcagcgtccaggatgcccgcaaacgccgccttccagctttccgtttgaatataggcgagggtctttgcatctccctgccggacttttcgtatctctgcgttcatgctcatatctccgaaaatcgtgctttccgatcactcatattcatgcctgagcgtcaggtgttcgggaagattgaagatttccgttttcaggaagatcggatagaagtattcctcctgcaaacgcgtaagcgccagccattcaaagtcatgcgtatgctgaccctcataaagtgtgaatcgttcccccttctcagccagatccgtttcagagacgtccatcagaaaatagagacagatctcgtggtagttcagttgatccacgtcctcggtgaagaagctctggttcagccataacggacggatgacctttgcccggatattcagttcttcttccacttccctgaccacggcgtgttcggcggtttcgcccatctgcactctgccgccgggcaaatagtaatacggggaacgctcgtcgtgcatcgctaagattctgtcccccgaaattatgacggcacaaactcggtaattgaatttgtcctgtcctgaaacaaaggaaacgtccacgttttgctccttcccatcaacgttcgattgcgcatggctgctccggcattggcagaagggtcatttcccgtctgtagatctctttcatccatgcatgggcggcggcagcgtcgccggacgcaagcgcgtttatcaggctgttctcatcccatctgatatccgcgagccagaacgcggatacgagggcgtagaggtacgggaacgcggctttctgttccggcgtaaacggtctgacctgttgatacccgttcaggaaggcggagagaatcacgggttcctgtcttcccgccagctccgccggataatccatcagccgggcttcaaaaatggcctgcattccggcgtcaaaaaacagattgttgtcgccgcagcgattaaagtcgaagacgcccagcctgccgtcctgggtccggtacaaattgcagtcgctgatgtcgccctgaacggcatagcgcggttcctctgcaaagggggctaaccgctgaaccagccttgcgtgttcttgcacgatcctgtgatagagcgcgccgtcgatggcaagcagctccgcctcgtgcgcggtgaaatcctcgaagctgaacagatcgtttcgtttgaacgggtcgaacagcacgtcgctgttcacgtgagaatcggttttttccgcaacgttgtgcgtcccggccagcagccttcccgtcgcctccgccgtttcagcgtccacggctttgagctcgcccgtgacaaacggttccaccgttacggtcacgtcatatccgttgattctgtaacgccgggcatagcgcccttccgaggtacaggctttcggcgtttcgatcccatgcgcgcagagcagcgcggcaaatcggctctgtgcctcgatgacctccacgggagcgtcatcctcgttcttgaagcggacgacaaaggaagccccgttttccaaatctgctctcacaatcagccgaacctgtctggatgccgggtcgtctttttcataacggtaacgctgcagctcgcaaaaggaagcgcaaggagcttctatcccaaaatccattaaaacgctttgcacgtcggattccgtaatcgtaaacatgattcatatcctttctgtcagatcgcttcccgggatccgctctgccgacgccatcgcggcccggcgctgatccggaatgcagaatcgcggcgttttctcctttgcacatgggccaatattctaacacaaatatctccgggattcaatacggaaaagtctctgctgctgaaaaaaaccttgaagctgtaaggaatttttcgaaagaattgcgaaagaatcaaaatgcgtatttgacatttccgaaacgatcccttatgataaacgcggatcatgcgggattccaaaccgaacagatgagaaagcgggtgcaaggtcatgaaaggccgtaagctattggcgctcctgctggcggctgccctcccggcagtcctcacagcctgcggcgcagcacgggagacggtaccgaccgccgcccaagctgcaagcactgcagacgcccgggaagcgcctgagaccactgcgctccgggaaccggagcaaacgacggcagcgccggaaccgtccgaggcgcagcccgttgagacgacagcagaaaggaccgtggaaaaaatgcttcaaatgacaatcggcggcacagccgtccgggtcaactgggaaaacaaccgctccgtggaggccctgaaggccctgtgcgaaagcggccccctgaccattcaggcgtccatgtacggcggctttgagcaggttgggtccatcggcgcacgcctgccctccgacgacgcgcagatcacgaccgccgccggggacgtcgtcctctattcctccaatcagatcgtcgtgttctacggctccaattcctgggcctatacccggcttggccatatcaccgaccggaacgcagcggaaatggcagcgctcctcgggaacggtaacgtgacgatcacgatcagcctggaggacgccggatcgtaattcggcgggcgcgcgtgacagaacgcagcgggagtcagaaggcttcgtaagtttgatgatctgcgggaaagcagcggaggaaaaaatgaagtacagaatcaacaaaaggaccggcgaccggatcagcgagatcggcatcggctcatcctacatgtttggtgcaggcatggacgaggccgttcgcgcgctgcgccgtgccgtggaaggcgggatcaactattttgacctggctgccggggacggaacgacctttccgatctacggggaagcgctccatgacgtgagaaagaacctctttttccagattcatttcggggcggactattcaaagggaacctatggctggtcgcttgacctcgatacgatcaagcgctccgtagacaatcagctccgggcgcttcggacggattatatcgactacggctttatccactgccaggacgagctttccgattgggagacctatcggaagaacggcgtttacgactatatccggcagcttcagaaggacggcgtcgtgcgtcatatcgggctttcttcccacacgccggccgtcattcagcgcatcctggacgacgcgagcgtggatatgctgatgttctcggtcaaccccgcttatgactacggtcagggggaatacgccaacggcagcgtggatgaacgcagcgccatatacagacgctgtgaaaaggaaggcatcgggatttccgtgatgaagcccttttccgggggtcagcttctggacgaaaagcagtctcctttcggcagggctctgacccaatatcagtgcatccggtactgtctggacaagcccggcatcctgacggtgctccccggcgcccagagcgtgaaggaggtcgaggcgctgctggcctactacgagcagccggaggaagcgacagactactccatcatcggcagctttgcgccgccgcaggccagcggcaaatgcgtctattgcaatcattgcaagccctgtcccgttggaatcgacgtcggtctggtcaataagtattacgatctggccagagcgggagattccatggcggcggagcattaccggacgcttgaaaagaatgcagcggactgtatccggtgcgggcattgcgacagccgctgtcccttcggggtccgccaaagcgaacggatgcatgagatcgccgcctattttcgatccgccgagtgacagcacgcaagcgacaaaaccctgaacgccgttacgatcaaaacgggcgttcagggtttttgttcggcgggcttcctggaaagaagccccgcaggggccggaaacgaccggcgcgaaccgcatttacgggttcgcggcccgggtcattcgtgcatcagcgcttccagctcggcgtcggatttggcggagagctcgccttctgcataaaagcgggtcagaagaacggcgatcgcttttccttcataggtgaagacgaaatcgtaatagccgggttcgcattcttcctgattcagatagaagctgccccagtaccactcgtccggattgtccgcatcctcgggataatgcagatcgcagtagtttgcaaagttcggcatcagatcggagaacttgcaggtgttgtaatacgcctgatcgtcgcggtgcttcagaatccagacgcgcagaccgtacgccgcatcggtatccgggtagaattcgacccattcgcccaattcgaaaatgcagcgcacgtcggtcagagaagcctctctgccgttgaagctgtcggcggtgccgacgctcagaccgttgatgcgcacgccgcgcaggacggacgggtctctgtcgtccaggttgatgagatcgagcttgccggtgagctttgcgccctcggcggggtcgccgttttgcgaagtgctgccggattcagtgccgggttgttgattttcaccggtgctgttcgcgggcgtgtttgggttgctgcttccggaatcgttgcccttgcatgccgccagacagaaaaccatccaggcagcgagcagcaggcagatgatgcgttg

SEQ ID NO: 2764 - DNA, 13993 bp, synthetic construct
  misc_feature 1..13993: note = Synthetic
  source 1..13993: mol_type = other DNA
ataacaaatattcgtttgattcttctttccatctctcttttctttgcttgttcggcattgcggagctcctcaatccgcgatgcagcgcaacacaacaaaccgaaaaaagcctctgcctttctcctgttggcagaggcttttttcgcgcttcggcgtattttttcgttaaaaagccgctctcgatctgaaaacgtcgggagcggttttgcgcttattttttgtctgcctgatcgagcaggttgtatcgctcgatgccggagcgcgaaacgccgaggtggcggcgcacggcggcggcagccatgtcgcggtcgccgaacttgagaatatcgcagatgaaaacatggtcgttatcgaccgtgtcgtaaaagccgtcgggacgcgaaaacagcaggtagctgcggcagcggaaaaggcggtacttcatctggtcgtagatatcggtaataaggctgttgcccgatgccttgacgacggagaaatggaactctatctcccgctcgagcagctttttgaacacgaagtccttgcccttgtgaaacgcctcgtcataggtgtcctggagcctgtgcgccatggcgtacagctcgcttagctgctcgggcgttatgttcagcgccgcctcgcccgcggcataggtctctatcatatccgtgaagtcgcatatctcgtcgtattccttcttgctgaactcggcaacgtaatagcggctgttttggatctttatataattgctcgccgcgagcttttcgagcgccgccttcaccggggagcggcttatgcccagctcctgcgcgatgctgctctcgctcacgcggctgcccggcatgacggaaaagctgattatctcctgcaatataagctcatgaacgacgtcgttgagcggcatgaacggattttcttgtcggatcttgtcaaactgtttgcgatccatgaactcaactccttcttttgtgctgtcatttcagcataccacaaatcacccgcttatgcaaaccataattcgcgccgattgcgtaaaaatatattccgaaatgccgccgagaaccgctccgaggggcgaaaccgcgcaaatatttcagcagaaaagcagagcgtggctcagctccaacgccggcagaagctgctcgggcgaaaccgtgagggtgcacacgcccggttcgagcgaggtgtcgagaatgacgatgtcgctgtgcgcaagctgcgccgcgatgtccgcaagaaggcccgcgtccacgcccgcgccaacgatgctgacgctcccgcgggaagcatcgcgcgtcacgccgcagaccgcgggtctttgctccagccgcgtcaaaacggtgcccgcgcgcttaacgaagcttgatctcagctcgacctcgacgccgtttttcatcgctgcctcgacgctgcgcgagtggagcacctgcgagccgcctcgcgcaagcagcagcatatcgcggtagtcgatgcgctcaagcttccgcgcccccgtcacgagccgcgggtcagccgtgtagatgccgtcaacgtcggagcatatctcgcatttgtccgcgccgagcgccgccgcgagctccaccgccgtggtgtccgagccgccgcgaccgagcgtcgtgatgtcctcgcgcgaatttacgccctgaaagcccgcgacgacgactgttttcccctcgccgagctcgcgcattatgcggcaggtgtcgatacccgtaatcctcgcgtcgccgtgactgaggtcggtttttatccccgcctgctgccccgtgagcgaaacgcttgcgattcccatggcggaaagctgcatcgccatgagcgccgccgaggactgctcgcccgtgctcaaaagtgcgtcgagctccctcgcgccggcgttggagtctattgcacccgcctcggaaatgagcgcatccgttgtcgagccgcgcgcggatacgacgatgacgagctgcccgccgtcacgcagcttttgcgcggcatcgcacgccgcggcgcgcagcttttgcgcatcggcaagtgagctgccgccgaatttttgtattgtaagcatatcatcacccaaataaaaagaagtagggtcattgccctacttcatcatattcggaaacgttcagcctgccataagctcaatgcccacaacgcccggcatcgaggtcagccgcaccatcagctcgtcgctgctgagcgtgagattttccggtgcgatggaaatggtcacgagcgcgacgccgtttgccggtatcgactggtttatcgtgagtatatttgcgcccgactcggtaaaaatagacaggacggacgcaagcttgccgggcttgtcgtgcagctttatgtggaaggtcatgatagcgtcgcgcttcatgtcacgaaacggcgcgatgcagtccttgtatttataaaacgcgcttctgctcaggtcaacgcgctccacggcctccgcgaccgtgcgcgcctcgcccgtttccagcagtgccttggcctccgtgaccttcacgaaaacctccggcagcgccgttgcctcgaccagataatatttgggtcttgcgttcgccattattcagcctcctgtgtgcgatacgatgacatttgtgcttgtgatacggattttaacacattgcagcgggcttatcaatagctgcgtgaaaaaaacatgagaaaaattcggaggggatggaaagtatgctgctcggtattgttttcagcatagccgcggggatggcgatgagcgtgcagggagtcatgaacacgcgcctcggcgaggggatcggcaccatggaggccaacgccttcgtgcagggcaccgcgtttgcgctcgcgctcgccgtgctgatgttctggcggcagggcagcttctcgcagctcggtcaggtcagcaagctctattggctcggcggcgtgctcggcatcgtcatcaccgtcaccgtcatgctcggcataaaaagcctcggcacgacgctcgcggtgtcggtcatcctgatatcccagcttctcgtcgccgcctgcatcgacgccttcgggctcatgggcagcgaaaggctcgcctttacatggcataagtacgcggggcttgcgctcatgacgggcgggatgctgctgttcaaatgccgttagcgggaaaatttgtgtcttgaaatatcctctgcgtatagtataattatagccatatactatttgatatggagacacacgatggagatgcacccgattttcagaaagaccgcagcacaggcccgcgcagcgggagcggaggactcgcgccgctttattgcgctgtacagagcctatcttctcggcgcgtccgaggccgccggtgcgcagcaggagctcgaaaatgagcacagcctgcgcgttctcgttgcggcgatgctctttgcgctgctgagctggtgcgtgacgctgtattttgtttttaaataagcacagaaagtaaagccgctcccccgtccgagacaggggagcggttttcacgtgtgtgctgttacgcaagcagcaactcaagctccttgcggatgtacttcatcctctcctgagctgtgccgtagcgcgtgaacacggaaacgatgtattcatcatcctcaaagcgcggccgtgcggaaaaacggctgctcagtacgtatgatttttcctcctcggcaaagcggacggagatcctgttcccgtcctgcccgataacgactccctcgccgtacttatccgccgttacgcgcacgcccgtcagggatatttccgccgcctcgtcgcagtctcgctcaagcgccgaaagctgccgctcaagctccgagagccgctcaaggcgctcggcctcacggcgtgcctgttcctgctccgccgcggcttttctgtgcgctgctttgcccgcaaacggcagcgtgagatccttgtagtaatcgtaggtgtaacagcagtacatgaaattgaacgccagcaggtgcagcgagccgtcgctgtaatgctcggagccgagcttcgaaaggtgcttctcgatcaggctctcgcgctctctgagcgccgcagtgagctcctcgcacagcttgtaatagttcggcaggctgaagctcgttcccgagccgatatcccacccgaaattgacgtaccttgccatctcacgcgccacgctcgccttgtaaacgaagttaagatcggggtcgttcatggcaaggaacacggacgcggagtgccgatcctgcttgtatgaccagtttgtggggcagtactttttgcgcaggcactcatagccgtcgatgaacctatccatgttgtcctgcacgacggcagcgtcgccgtgcgcgtcggcaaacagcacttcgcggaacaaccgctcgacctctttcgattcatattcgcagagctttatgatgcccgtgctggggtgcatccgtgagccgtcgatgaacagggaaaattcctttttcgccgccgtgaagcggtctgcaaatgtcgcaaacgtgccgtccggcttgaaccattgctcgcgccagcaccgcatcgcgcgccacttgaacagctcgtcgtggcttcctctgtcgtaaagcctgtcgaggtcgtcctcgtagcgagccataagcctgtccaaattctctttgttcatcctcccgcctcccgcgttttgttttgtgggggtgccgcaaacggcagcgtccccacaaaaaccatcataccataattctcctgctttgcaagtgcacatcgtcggacgtcgtgttttttcacggcagacaaacggggtggacgggttagcgcattttcacttcgtcgcgccttgcttcaggcgcagggtgaggctgtcggcgagcatggcgatgaactcggagttggtcggcttgcccttgatgttcgacacggtgtagccgaaaaatctttgcagcacctcaatgtccccgcgatcccacacgacctcgatggcgtggcgaatcgcgcgctccacccgcgagggcgtggtgtcaaatttcttcgcaacggtggggtacagcaccttcgtcacggcgtttatgatgtccatatcattcaccgcaagcataattgcctcgcgcagatattgatagccttttatgtgtgcaggcacgccgatctcgtgtatcatatcggtcacgagcgcctcaagattcacgtcctgcggcgtgaaaatcgcctccgatttcgcctcgccgatcattcgcacgcgctcaagcagcacgtcgatgtcacagggcttcggcacgaaataatccgcccccaaagcagagcactgacccacgatttcgcccctgtacatcgcgctcacgacgacggctttcgtcgtggggcacacttcgggcaggcgacgcagaatctcgattccgtcaagctccggcaacgccaagtccagtacgagcaggtcgggctttagctcctcgacgagcgcgagcgcctccgcgccgttgtccgtgccgccgacacactcggtgcgcttctcgtggtttaaaatctctgcgaacaggcgtctgaaatcggcgtcggcgtccgcgatcaaaactcgtgtcatggtctccatttaacttcctcccaatatttcctcatggcgcggctttgcacaatttcgggcaaaaggggcgcctttctcctttaaatttaccacattcccaactctgtggcacaagaatattgtcgagcgcgttgtaatatttttgttacttttcgacctttcaccccgaaaatgacataaaagttacattttcaacccagtttcaaccaattcgtgtcgaaaacttcacggaattatttggaattgcaccgccgagcacgggcacatcaacaggcattttgggaaacaacggcacgctttatatgctaaaaagccaccgcagtccatacttttaagaaaactgttgcaatttgcagcgccgtgatgtaatatatatacagttcttataccataccaagaactatttaggttactataataaggtagtaaaccgaagagctctaacgcctcgctttatgcggggcgttatctctttattgcaattttgtaccgaatggtgtaatatggcagcataagcaaaaaggaggtctacccatgctcccatatgcaatcggacttgatataggcataacctcggtcggctgggctgcgttagctcttgacggcaacgaaagaccctgcggaataatcggaatgggctcgaggatatttaccgcagccgaacagcccaaaaccggcgaatctctcgccgcgccgcgaagagccgcgcgcagcgcaagacggcggctgcgcagacatcgccacagaaacgagcgcatcagaagcctgctggtatcaagcggagtcgtcaccccaagcgagctggactcgctttttgacgggcagcttgaggatatctacgctttgcgcacaagagcgcttgacgagcagctctgcggagccgagctcgcaagaatactcctgcacatatcacagcggcgaggatttaggtcaaaccgcaaaggcggcgtgtcaaaagaggacgggctgctgcttgatgcggtcaacgagaatgttgcccgtatgcaaaagcatggttaccgaactgtcggcgaaatgttcttccgcgacgaggtgtttaaggatcacaaacgcaataagggcggggaatacatcaccacggtgaagcgggagatggtcgccgacgaagtcagagcaatattctcggcgcagctcagtcttggctcgacggcggcaagcgaggagctggaaaaccgctatcttgacattcttctcggtcagcgctcatttgacgaggggccgggcggcaacagcccatacggcggcagccaaatcgagcgcatggtcggacggtgcacattcttccccgacgagccgagagcggcaagggcgacctattccttcgaatatttctccttgctggagaaggtcaatcacattcgaatcatccgcggcggcgaggtaagcaagctgaccgatgagcagcgcagcaggacgatcgagcttgcgcatatggcaaaggacgtgtcctacgcaaagctccgcaaggagctcgggctgagcgacaacgagcttttcaacatacgctaccctaacgattcaacggtcgagcaaacggaaaagaaggaaaagctcggctctatgaaggcttaccatcaaatgcgcaccgagatcgacagaatttccaaggggcgctttgcgatgatgccgcgtgagcagcgcaacgcgataggaacggcgctctcgctgtacaagacctcggataaaatcagagcctatcttgagtctgccggacttgacgagcttgacattgccgccgcagattccatcggcagcttttccaagttcggtcacatctcggtcaaggcctgcgatatgctcatccccttccttgagcgcggaatgaactataacgaagcctgcgcagccgcaggaatagatttcagagcccacaacgcgggcgagagagcgatgtatcttcacccaaccgaggacgactacgccgagataacaatccccgttgtccgcagggctatctcgcagaccgtaaaggtcttgaacgcgattatccgaaagcagggcggcagcccgacgtttataaatattgagctggcgcgggaaatggcaaacgatttttccgagcgcaataagctcaagcgcgaaaacgacgaaaacagagcaaaaaatgaacgcttgctcgagcgcataaaaaccgagtacggcaagagaaacccgacagggctcgatctggtcaagctccgtctgtacgaggagcagggcggagtgtgtatgtactcgctcaggcagctttcgcttgaaaagctgtttgcgccaaactacgccgaggtcgatcatatcgttccgtacagcataagctttgacgacagccgcaagaacaaggttcttgttcttaccgaagaaaaccgaaacaagggcaacaggctgccgcttcagtatttgacggggcagcgcagagacgacttcatcgtttgggtcaacaacaacgtgaaggatccgcgcaagcgcaagctgctgctgaaggagaatctgacggatgcggaggcggcgggctttaaggagagaaaccttcaggacactaagacgatgtcccgcttcctgctgaattacatagccgacaatctggagtttgccgagtcccggtgcgggcgaaaaaagaaggtcaccgcggtaaacggcgtcataacctcttatatgcgcaaaagatggggcataacgaagatcagggaagacggcgatcttcatcacgctgtcgatgcggtagttatcgcctgcacgaccgacgcgatgatacagcaggtgtcgcgctatgcccgattccgcgaatgtgagtatatgcatacgtcctccggcagcatagccgttgacagcggcaccggcgaggtgctccgcaccttcccgtatccgtggcatgatttcagaaaggagcttgaggcaaggctcgcaaacgaccccgcgagggtgataaacgatctgcgccttccgttttacgccgaaagcggactgcctctgcccgagcctgttttcgtttcgagaatgccggagcgaaaggtcacgggagccgcgcatttggatacggtcaagagtccgagagagctcaaaaacggtcttttgatcatcaaaaaaccgcttacggagctcaagctcaaaaacggcgagatcgacggctactacgatcccgacagcgaccggctgctgtacaatgcgctgcggcaaaggctgatcgagtgcggcgcggacgcgaaagccgccttcgccgacggattccgcaagccgaaaagcgacggcacgcccggtcccgtcgtaaagaaggtcaagatatgcgagtctgcaacgctcggcgtacctgttcacggaggaaaaggagttgccggcaatgattccatggtcagagttgacgtgttccttgcgggcggaaaatacctgctcgtgccgatctacgttgccgatacgctgaagccggagcttccgaacagagcggtcgccgctcacaagccgtattcggagtggcgtgaggtctccgatgacgatttcatcttctccctgtatcccaacgacctgatctgcgcaactcacaaaaaaggcataaagctcagcgtgtgccaaaagggcagctctctgccgcctacagtcgtggaaaaatcgctcatgctgtattataagggcaccgatatttcgacaggcgccataacgtgcatcacgcacgaccacagctatgaggccagaggtatcggcgtaatgacgctcgaaaagctcgaaaaatacaccgtggatgtgcttggcgaatatcacaaggtcaaaaaggaagtaaggcagccgtttaacatgaaaaggagctgattatggcattccgcaatatcatcatcgaaagccccgctcagatctctttgaaaaataagcagcttataattaaaaccgacagcacgcacagcgtagccgtcgaggatatttctgcgcttcttatcgaaagcagagcctccagcatcaccgcagccgctttgtcccacctcgggcaaagcggctgcgccgtttttatatgcgatgaaaagcacctgccatgcgccgtgcttgagccgttttcgcagcacagcagggccctcggtgttcttaaagctcagcttgaggcgacggagcctctgaaaaaacggctttggcagcagatagtaatttcaaaaattgcaaatcagtcggccgtgctgcgtctttgcggaaaggacagggcggcggacgcgctaatgcgaatgtccgaaaccgttaaatcgggcgacccggacaacgttgaagctcttgctgctcaaagatatttccccgcattgtttgacgagggcttttcaagggggagcgagagcgtcatcaactcggccttaaactacggctacgcgataataagaggctgcgctgcccgatgccttgccgtttacggcttcgtccccgccctcggtctgcatcacaaaagcacgctcaacggttttaaccttgccgatgacattatggagccgtttcgcccgctcatcgacctcttgacatactatcttatcaccgagaacgaccttgagctcacgcctcagctaaagcggcagctgtttaacagtctgaacctcgacattatctccggagggcagcatcacagcgcctcttatgcgatagagcgccttgtccgcagcctttcccgctcgcttttcgacggcaaggccgtgctgcgcctgcccgaggtcattgagcttgggcagcataaatatgaataagtttatgaggatacttgtcttttttgacctgccggtcaaaagcaaaaacgagcggcgcgctgccacccgtttcaggaattttttgcttaacgacggataccatatgatccagtattccgtctatgcccgcgtttgcaacggtatggacgcagttgcaaagcaccgcacaagaataaagctgaatttgcccgaaaacggctcaatacgccttttggtcataacggaaaagcagtttgaggcgatcgatatccttctcggaaaattaaccgaggcagatgacgcatttcagtgcgagcagctgtcgattttttagaaaaaagtaccgccttatcaattgataaagcggtactttttcgatagcctattataccataccaggaactatcagggaactataacttttattacgttatcatcctgatagcatctattataccataccaggaactatcagggaactataacgcctttggccttgtacctgtttcattttcaattataccataccaggaactatcagggaactataactgaaacgccgtggtcgcagtacatcatgcgattataccataccaggaactatcagggaactataacgggtctgtgtgctatatgtcgcggtgttgtattataccataccaggaactatcagggaactataacgtattgtgcagcgccattcatagcgacagaattataccataccaggaactatcagggaactataacactcgccgcgtacatgtgcaaggaacgcgcattataccataccaagaactatcagggaactataactactaatacctcaaccaactaaaccccataaattataccataccaagaactatcagggaactataactcagtcccagcttgagcgtgatgctcgtggattataccataccaagaactatcagggatctataacgcgagtgcgttgaatgccttgccgctctgcatatacagactttattgcttggcatttccggtgagcagcttatataccgtctcaaaaggcagcgggttaaggtgagccagctcatttcgagcttctttgaaatcagccgtgcccattccgcgctgtctcgcgtccgcccggcatagcttcccgccaaataatacagcagcccgatttccgcagcctccggctccgctatgatctcgccgaaagccgtttcctttggaagctcttgcctgatctcttcgtggtggtccttaacaaactgcatccgaaagcgttcaataagcggaaatagcgtgcgtatttggctttcccaaacgcggtgccgcagttcctccggctctatttccgcttcgaacggtgtaccgtcactgcgggttgcttcttctgatattcggtgaacgtacgatatagggtcgtttgcaaactccacaccgtcgctgatacaccgcgcgcaaagctcaacatcgtccgcgcagactgtcgaaaccagctcggctaaatatggcttgaggcgattgtcggtcggagcagacgagctggccaatgcacaaaatgtgtatttatcataggcagatatctccgaagagaaatctatgcaccgaatatgtttgccgctcattgtcggctcatctccgtgcatctcgaggagaaacagggcgccttgccggaattccggaagatttcggttgtattcccggataaaagacagccacgagctcagcgtgcgagcatccacattttttacccatacgatcgtcgaattgagagtaattgcgtcctgctccgcaagaaatgctgcataggattttcctacgcggtatttcatgcggatttcttttttgcagtatgtttccagcagatttttccccgcgcattgcgtcccgtcggcataagatatactccttgggatcccgttgttcacaattccctcgcaaatgatgtcggcaaaagtttcgtaccacggaacgtgctgtgagagccggaggattacgctgtcgccgtccgtcaaagcatcgatgacctttcggcataagagtgacgctttagtgatttgttcccaccaaattctgtccataatcactcctccgttgaataggctattattttgtcatcgatatcaccgggcaagcccatcatttcgcagaagctgagacgcgtgaaacgatagcttccgtttcccaccttttgcagaacgttgagctcacgcagctcctccatcagcgcccttatctcctcaacggacagagcggaaatcttccgcaagccgtaatcatttgcaatagcccaaaggctctgcggactgcatccgctttgaggcttcatattgtgataatggaaggctacaaggagggcgatctgataatagtaatcgtcatcatcgaccttcagagtaatttcaaatttctctcgaatctgatcctcaagtgttttgtcggccaaaaccttcttaatgtgctcctcgcggatcaaatacggcggtgtgtctgcttcgttgtatccggcgtaatcatgccgcatcgcttcaatcagcttggtacagtagagctgaagcaagcctgggaagtagtttgtagttccgaaaatattcgaaatcagcatatctgtcttgctgtcatcctggaaccggaaaccgaggtaatgaagagggacctgcaaaagctctctggcatcggacgccttgaacggagtgactgtcagggaactcaggtgcgtcagcacgctgttgttgcctaaggcggcatctctgttgaaccgcacaacattgcgtaagccggcaacaacgaatttaaaccgtcccgttccgacgctctgtatgtctttaaggacatcaaacggcatatagttgatctgtggtcgtatgcctgcagcagagagacatagaattgcgacagcgagcaattactgataccggcgagatgatatcggcgcatcagctccattgagtaattgcgaaacaactgagagggcgtaatgagcagcaccttgtcccagccgatttctccgacgctgtcgcgaaggaagaacaggcgatgaataagacactgcgttttgccggatccggcgcacccttgtacaacgaagcttctgttaagatcgtatcgtataatatcaaactgctctctctgaagcgtcgctattatattgcggagctttgcatcggagcgattttcttcaagtctgcgcgccaacaccgcatctgcggtaggcagctcaaacgtttcgtcagaagccatgcgaggaatcagctgcgtaatgccgagaatttgacgcctgtctatcttcacattgcgaatcagggtcacggtcagttcctcttcaaacggctccctgtccggtccgacatcatgacgaacggaaaatgtctcagccttgcaattctgatactcgtgaaagagcgttgtaagcatgggcctgtctttgctctgcttaaacggaaccagatatgcatccgcaccgacacagataacctgatcgaggtcggcgcagtcagacagcagcatatgctcaaccgcgccgtcctcgttacgaagacccatgtgagcgaaataaggcgaggagtataccgctaaatatgctttgcgcagctcctctttctgctcccggtgtttgcttgcctgactgtatgccataaaacgatcctgatcatcatatgccccggacaaaacatatttatgtgactgttcggcgagcgcggttaagtcggcaagctcattttcaaaatgagaatacactctttctttcagacgttcttcctgttctcgcatttccatgatgtcaaccactccatcttattctcgcatttatacgcagctttgcgccggcgaccaagtccctttgaaatcc

SEQ ID NO: 2765 - DNA, 13978 bp, synthetic construct
  misc_feature 1..13978: note = Synthetic
  source 1..13978: mol_type = other DNA
atcgccttgttttacatcgtcaccaaggccaacatttacagtggtaacctttgttccctcaagtatttgaaaattgctttgactacccgattctataactgcgttcgtttcaaaaaattgctcgacgctacctttatctacctttgcaagtgacacgggagtacctttgtcgctaaatttaaaatagcaagcaatgccagtagaggccacggctataactacaataactataaatgttttattttttaaaagtttcaaaaatttttctttcattataacacctgtttttcgtaggattttataaaataaagagactaaaagtcaaaatactataaaattataacatatattgaataaaagtgagtgtataatttgttaatagtttgttaatatagagggttgtcgaaacatttttgcaagcaaataaaaataattataatatagatagtttatttataagtttgcattatagatgtttacaaagttattattatatgttattgtataattagttcttatatcataccaagaactatcaggtcactacaataaagtagtacactgaaaagctatgacgacttgctatttttagtgagtcgttatctttttgtcccaaaaacaggataaagaaagttttatacatctaaaagatttgtttttaaataagattatcgtataattagagatatacaatattttggtaggagatgtataaaaatgtcttatagcgtaggattagatattggtattacttcagttggatatgctgtgctagaattggatcatagtgacgagcctaaaagaattataaagtttggctcaagaatttttgatgttgctgaaaattcgaaagacggctcctcccttgcaaaaccgcgcagagatgcaaggggagctagaagaagattacgcagacataagcatagattagatagaataaagaatttaattgtaaatgaaaatatattaacccaaagccaattagactgcttatatgatgggcaattaagagatatttatgaaattaggtttattgctttagatgaatcccttagtgatgaagagtttgcacgggttttaattcatattgcccaaagaagagggtttaaatctaatcgaaaatcagacgcaaatgaaaaagaagctggaaagcttttaaaagcagttaaggaaaatgaagagttgcttgagtcaaaagattatagaactattggagaaatgctatacaaagatattaaattttctgaaaataaacgcaataagagtgaaagttattctaacacctttagcagagatttagttttagacgaggtgcagaagatatttgcaaagcaacgcaatttagatatgtcttttgcatctgaagaaatagaagagaaatatacagaaatcttaatgtcccagagggcgtttgatgaaggcccaggtggcaaaagcccttatggtggtaatcaaatagaaaaaatgattggaaaatgcacatttgaaaaagaaaatggtgaacttagagcgccaaagtctagttattcttttgagcttttctcattattgcaaaatgtaaacaatcttagaattgttacatatcaaaacagccgttctttaacaaatgatgaaagaaaattgctgatagatttgtctcataaggtggcaagcttaaattatagcagaattaggaaagagttaaatctaactgaggaagagagatttggctcaatcaactatggtaaaaaaactatttatgaagttgaaaagaagactaaatttgaacatctaaagtcttaccataaaataagaatagcttttgacaaaatatcaaaaggatatattaaaacttgtgataaacaaaggttaaatgatataggatatgttttgtctgtttataaaacggataaaaatattaaagaatgtttaagcgaacgaggagccacaagtgaagaaattgaggcggttttatctttgtcaggtttttctaagtttgggcatttgtcaattaaagcttgtaacaaattgataccgtatttagaagaagggaaaagatatgacgaagcgtgcacattagcgggatatgattttaaaagacacaaagtttttgaaaagcaaaaatatttaccgatagttatagatgagtttgataatatcactagcccagttgttagaagagctgtatctcaaaccataaaagtttttaatgcaataataagagaacaaggttgtagccctacttttgttaatattgaattatcaagagagatgtctaaaaattacaaagagcgtgaaaaaattaaaaaggaaatgaacgaaaataaagtagtaaatgacagaattaaagaacgaattgagaaagaatttaataaaatcaatccaacagggatggattttgtaaagcttaaattatgggaggagcaaggaggcatttgcccatactcattagaatcaataaaagtggagagattatttgaagttggatatgtggatgtagaccatataatgccttatagcataagttttgatgatgggtataaaaataaagttttagtaaaaactcgggaaaatcgtcaaaaaggaaatagattgccacttcagtatttagaaggtaaaaagaaagaagattttatcgtttgggtaacaaacaatgtaagaaattatcaaaagcgtcaaatacttttaaaagaaaactttacagacagcgatttaaatggatttaaagaaagaaacttgcaagatacaaaatatataagtaaagttatgtataatttaataaatgattacttggaatttgcaccaactgtgactaataaaaagaaaagggtaactgcagtcaatggcgtagttacctcttatgcccgcaaaagatggggtattcagaaaattcgtgaagatggtgatttgcatcacgctgtagatgcggtggttgttgcttgtgtaactgacgggatgataaataaaatctcaaaatactcaaaatatcaagagatagagtatatgcaacacgataatggttccgagattataaacttgcgaacaggtgaagtaatagatagatttccattgccgtggaaggattttagaaaagagttagatatccgcttatgcaataatccaaagcaaatgttaaaagaagtccctttgtctaattatgaaggtgtaaacttagatgagataaatccgtgttttgtttctagaagaccgaggaggaaagtgacaggtgcagcacataaggaaacaattaagagctcaaaatttgaggatgaagggtatgtaattttaaagagaccccttagcgatttaaaatttgataaaaacggggaactaaagaattattacaatccatcaagcgatacaagactgtataacgcacttaaagagcaattagaaatgtttggtggtgatgcaaaaatggcttttgcaaagccgttttataaacccacaaaatcaggcaaacaaggaccactagtaaagaaagtgaaactgttagaaaaatcaaacttaaatgtatcggtgcataaaggaaatggcgtagctgaaaatgatagaatggttcgtgttgatgttttctttgtagaagatgagggttattattttgtcccaatttatgtaccagatactttaaaagaaactttacctaataaggcttgtgttgctaataaaccaaaggattattgggtggaaatgagtgatgagaattttatattttcactttatcccaatgagttattaaaagtaaccggaagaagggatatgaaattatcattaattaatagtaaaagctcgcttcctaaacaactaatcgttagtgaaataatgttatattattcaggattagatagttcaacaggagcgataacagctatcaaccacgacaatacttataaaattcgctcaataggaaaaactgtaaaatcaatagaaaagtatcatgtagatatgcttggaaactattataaagttggaaaagaaaagagacagtattttaaataactgaaggtgattaagaatggcctacaaaaatattgttttagcaagctcagctactttgagctctaaagacaatcaattaataataaaaagtgattgttttaataaatcgataccaatcgaagatattagctgtgttatggtagagagccattatgtgtccattagttcatatgtgttgtcaaaattttcagactatggtgtaacgttatttgtttgcaataaagagcatctcccaaccgctgttatgctaccaataaacactcattcaagacaactaagaatgataaatcttcaatataatcaaacaaagcctttttttaaaaggctttggcaacaaatcataatatcaaaaatagaaaatcagtctagatgtcttgagttttgtggaatagaaggacacgaaaaaataagagcgttaaggtcaagggttcaatcgggggatacaactaatgttgaagcaatagttgcctcaaaatactttaaaatgctttttggtaaagattttacaagaagtattgagaatacgactaatgcagcattaaactatggatattcaatattaagaggcgtcatagcaagaaatttagccacatatggatttgaaacttcgcttggtattcaccattgtagcgaattaaataactttaatttagccgatgatataatagaaccttttaggcctgttgttgatttatttgttgctttaaatataggtgaaaatgaagattttacgcccgaaattaagcataatttgttcaatttacttaatgtagatattaagtcgggtgataaaaatcatagcgtggcttatgctattgaaaaatcagtccaaagtttaagttcatgctataataaagtgaaagaagagctagttctgcctgagttggcagagctgagactccaccgatatgaataagtttatgagaatactcatattttttgatttaccagtaacaagtaagcaacagcgaaaggtggcaactcaatttagaagctttttattaaaagatggatatacaatggttcaatattctatttattctcgtgtttgcaatggctatgatgcagtatcaaagcacaaggaaagaatatataaaaatcttcctgataatggctcagttagattacttgtgttaacagaaaagcagtattcatcgattgaaattcttgtcggaaaactaaccacaggcgaagggccagagccgtacgaacagctatctatttattgaaatttgatatgtaaagagtgcatatacagagcttatttgttattttaaaacaacaaaaaataccgccagacttctcgtctagcggtatcttttgtccctattatatcataccaagaaatatcaggggactacaactggatttgtattttctacgatatagataaaattatatcataccaagaaatatcaggggactacaactaataaaagcatttttatctaagttgcgaaattatatcataccaagaaatatcaggggactacaacctttttgcaacacctccttaatgtatttctaattatatcataccaagaaatatcaggggactacaacatcccttgtgtgttctcttttccagtttaaattatatcataattaagcaaggaattaaaatcacaaaagagcaagacatcgaagaaatcgttgcaaattcttgttttatagaatagctggagacggcgaaaaagtgtttctaatgggaacaacaagttttattttgatagtgaaagtgttattttttccaaattaaattaaatacataaacggtgaaaagccgatatctaactatgatattcgctatagcttaaagcgatttttagtgtgtttttgatggttaacatataaaaagggccttacaaaagcgcaaaattctttagtgaatagtattagaattttattacgcttataaaagtagatttttattttttgcttccataacgaaacatagatttttgcaacatattcatcgaagtgttgcccttgatattatttttcctcaaaccattttataatctcatattactcttttgtagtaggtttttctctcaaatattaagtttaccttatccgaaaacagttcggaatactttcacacccatttaatacagaattataaccacagcttttgcacaaaactttaagactgttgttgttcacattatagattgtagtgatttttccattgcagtctggacatctcaatgattttatttctttttctgaaccatcaaacaaaatatccacaacatcatcccaagtcatagttccactcctttatttttaaaaattcatttttacttggagctattatatcatttttattaacacggataaatgttttagttattttaaatgcattaaactataataactttacccataccactggcgatgtttacaaagtgtaattatgctatatacattgcacattcaggtgtttttacagtaaaaaagaagctaccctataaaaaataaggagcttcgtttttattttaaaaaaagttttcacttaaactgcgcgagtaaccttgccagaacgcaagcaacgagtgcagacgtacaccctgcgcggagaaccgtctacaactgctttaactctttttaagttgggcttccaagttctatttgagcgcctatgagagtgagaaacagcaattccaaaggaaacgcccttatcacagaattcacattttgccattttgtcagcacctcctttacaatcataacagaaacatattatcaaatttggtgacaaaaagcaagcgaaatttcaaattagtataatttttgattttcctattgctttttaaagtttaatattatataatgatttccagacgaacatttgtgcttatcattgtttaataacggaggttataatagtggctgataataaaaagaaagcacttgatacggctcttgcgcagattgagcaaaaatatggtaaaggagctattatgcgccttggacaaaacgactctatgaatgtagaagcaattccgacaggttctatagcacttgatgcagcaacgggaattggtggtttgccacggggtagaattgttgaaatatatggtccagaatcatcaggtaaaactaccttggcccttcatgttgttgcagaagctcaaaagatgggaggggaggcggcttttgttgacgcagagcacgctcttgaccctgtatacgcttcaaatttgggtgtagatgttgattcactgctcgtttcacaaccagataacggcgagcaagcacttgaaattgcagaggctctcgcacgctcgggtgcaatggacgttataattattgattctgttgcggctctagttccaagagcggaaatagagggcgaaatgggcgactcctatgttggtttgcacgcaagacttatgtctcaggcacttcgtaaacttgcaggtgtaatagcaaaaactaatacaattataatatttataaatcagttgcgtgaaaaaataggcataagctatggtaacccagaaactacaacgggtggtcgtgcgttaaaattctactcatcaattagaatagatgttaggcgaattgagcagctcaaagcaacgggtaacgagtttgtaggctcacgcacaagggcaaaaatagtcaaaaacaaggttgcacctccatttaaggaagcagagtttgacattatgtatggtaaaggtatttcaagagagggtgaaatacttgatattggagttaagcttgatgttgttaaaaagagtggtgcgtggttctcatatggagaaacaaggcttggtcaaggcagggataatgtaaaggatttgctgtctagagatgaagaattaagaaaatctattgaagatgaaattaaagaaaatcaagccaaactagccgagcaattaaaagcagggtataaaaaccctaaagaaaatgcaggcaaaaaaattcccgaaacggctgcaactgcaaaggcaaaattagatattgcggttgatgatgaataatgaaaattacagcaaaaaatggcaagggcaacaaaattcatattagtgccgatggcgaatatgtggcaactgttgattctgatttttggtattcaagcaaaattataaatggcgatgatattacgcaagacgaactaactgcatttctcgaggcggttagttttcgccgtgcttacaatagggctcttgatattatatcaaggcgtgaccactgcaaaaaagagcttgtaaaaaaacttgagcaaaaaatggtggataagcaagtagcgcaagatgttgtaaacgctattgaagagcttgggcttataaacgaagaagaatatgcaataagactttcgcaagagcttttaagacgaaaaggaatgagtgcttttagaattcgtcaagaattaataagccgtggaattccccgtgaaattgcggaaaatgccgtggaagaacttgacactgacgagaaagagtgtattataaacttactaaatactaagttttcgtctagaaatttgtctgatgaaaaagagcttaggcgtacaataaatgcgttgatgcgactaggatatcaatatagcgatataaaaaatgcaattgaggaacaggagtttgggagcaatgtataaaatagggatgatttctcttggctgtcccaaaaatcaggttgatgcagagcttatgctggcaaaacttgaacaggcaggctttgaaatagtgaatgatgcgtttggtgcagacgcagtaattataaatacttgcggatttattgaggatgcaaaaagggaagctatagaaaatattttggaaatggcccagcttaaagaagatggcgaagttaaaaaagttattgttactggttgcttggcacaaagatatcagcaagaagtgatagaagagattccagaaatagactctataataggtataggggcgaatgaaaatattgcacaaatttgcaaagatacaatcgaagggaaaagcattatagattttccaccaaaggaagaattgccactaaatggtcaaagattactcacaacccctcagcattgggcatatcttaaaatagcagagggttgctcaaattgctgtacatattgtgcaataccaaaaattcgtggtcgttttagaagcagagctatggaagatattatagaagaggcaaatgctttggctcaatcgggagttaaagagattgttgttgtagcacaggatactacacgctatggccttgatatttatgacaaacttatgttgccaacccttctggataaactctgtgaaatagacggaatcgagtggattaggctactttactgctatccagactttttgagcgacgagttaattgacacaatagcaaaacaagaaaaagtattgaaatatatagacttaccgctccaacacgctgactcaaaagttttaaaaatgatgaatagaactggctcaaggcaagagcttactcagcttatttcaaaaattagaaatagaattccggatgttgtgattagaacaacttttattacgggctttccgggggagacagcgcagtcttttgagaatcttgccgaatttgtaaaagagataaaattcgacagactcggttgttttgcatactcggcagaagagggaacgcccgccgctgagttcgaaaatcaggtggacgaaggtgaaaaaaatcaccgcggagagttgattatgcaagcacaatatgatatatttatggatagcaacgagcagtgcataggaaaaaccttcaaagtgataacagaaggatacgatgcatatagtgatagttatcacggcagaagctatagagatgcaccagatattgatagcagagtgttttttacttgccaaaatgcgttgcaaaatggtgattttgtagatgttcaaattttaggcgttaaggagtacgaccttttaggtaaagcaatagaaaagtaaacgggaggtagcaatgaacacaccaaacaagcttacgatttttagaatggttatgaccccagtttttcttgcggcaattattatggatatcccccatcggtatctttggggaataattactttttcaatagctgccattacagatgcacttgacggcaatatagctagaagaaaaaatcagattacagtgtttggtaagttgacagacccagttgcagacaaaatgctaacaacagcagcattgcttgcttttatgcaattaggactttgtaacatttggattgttctagtaattttaactagagaatttgcggtgacttcaataaggcttgttgcaagcgcacaaggagttgtaatacctgcaaatatttggggaaaagtaaaaacaataagccaaatggcctttacaattcttataatgctattaaaagagcttgagtatataggccttatccctacgactgcaccacttgcacttgtttcaaatattttgcttggaattacagcgattttaacagtagtttcaggtgctatatatattatagagagtagcaaaattatagacttttcaaaatagcattaatgtggtacaataaccgcaaatagttttacgcttaattttctctgtcatttaaatgtgaaagacaaagcataaaaaatattttgtaaatatatgtgtgtaaattttaatattataaatgcgttttatcaggataagtatccatttttaaagcatacaagagagggaaacataatgctgagagtattccttatgtttttttggagaaatgcacctgttagcacatattgggaacagctttttaaaaggcttagtatctttatgcggttgtcgccgttatcgatttttgagttataaattcagagtggaaccgcgaaatatcgcctctgtcacctattggtgatgggagcgattttattttttatagatttatttggaggtgctttatatgttcaaaagattaaaacaagatatagcctgcgtaaaggatagagaccctgcagcaaggtcaactattgaggttcttcttctttatcccggacttaaagcaataagaatgcatagaaaagcacaatggttttataataaaaaaatgttttttatcgcaagatatatttctcagcgagcagtgaaaaaaacgggtatagaaattcacccagccgcaaaaattgggcaaagattttttatagaccacggtacaggtgttgttattggtgaaaccacagaaattggtgacgatgtaacaatttatcaaggtgttacacttggcggaactggtaaggactgtggcaagcgtcacccaacaattggtaacaatgttatgataggctctggagcaaaggtgctaggtccgtttaaaataggggacaatacaaatattgctgctggtgccgtagtgttagaagaaattccgccaaattgcacagcggtgggtgtgcctgcaagagttgtaaaaagggatggaatgagagtggataaccttgaccaagtcaatgttcctgaccctgttgcacaggagtttgcaaggcttgaaaatctaataaatgaactagcgttaaaactggaggaaaaataaaatgcaaatctttaacacgctgacaagaaaaaaagaggaactaattccaataaaaaaaggtgaatttaaaatctatgcttgtggtccaacggtgtataactttatacacattggaaacgcaagaccaatttgtgtgtttgatgttcttcgccgttatttagaatatagaggtaatgaggttacctttgttcaaaactttacggatattgatgataaaataattaaaagagcaaatgaggaaggcttgtcttttgaagaagtttcaaaaaaatatattgaagaatacgaaaaagatgctaagggtatgaatgttatggaagctacaattcacccaaaggcaacagaaaatatagacgagataattagcattataaaaacccttgtggataaaggttatgcatatcctgtgagtaatggtgatgtgtatttttcaacaaacaagtttgaagaatatggtaaactttcacaccaaccgttagaagatttagaggcgggtgcaagaataaatattggagagttgaaaaagcaagcaatggattttgtgctttggaaatctgccaagcctgatgagccttattgggattccccttggggcaagggcagacctgggtggcatattgaatgctctgcaatggctcgcagatatttgggcaatacgattgacatccactgtggtggccaagatttagtttttccgcaccacgagaatgaaattgcacaaagtgagtgttgtaatagtgagccttttgcaaattattggatgcacaatggctatataaatgttgataatgttaaaatgtcaaagtcacttggaaacttctttaccgttcgtgatgttgcagaaaaatatggttatgagccaataagatatcttatgataagctcacattatagaagcccaataaactacagtgtagaggtaattgagcagtgtaaggcggggctgtcaaggctttatacttgtcgtgatgggttggatttcgcccttgaaaattctagtgaaaaatcaaatcctatggacgcaaaaataatgcaggatttgtcatcacgccgtgagcagtttataaaagctatggacgatgacttaaatactgcggacgcacttgcagcagtgtttgatttagttagagatataaacattaatattttaaatgaaaattcatcgcaagagctttgccagtttgcaattgacttgtttgacgaactttgcggagtgttaggccttgtttataatagaaaatcacagtctattgatgataaaatagaagagcttattgcgaaaagaaacaaagcaagaaaagacaaagactttaaacttgcagatgaaataagagacgatttaaaagctcaaggaataactcttgaggacacaccacaaggtgtaaaatggcatagagaataaaaaacaccctcctttgtgaacaatacaataggagggtttactttttattttatccattctaaaatgcgttttgtagaattaccgtcacaactattcataaattctttgcaaaacgaatttactttttcggggctgaaatcattttgagtttttaaaacagattcaataatttcgcttgtgtttgcaacaatatcaccaggtacaaagtcgcgataagggtaataaaagcttcgttctttgtcatattcttcaaggtcatatgcgaaaaaaatcataggacgcgcaagcaaagagtattcaaaaattagcgaggaataatcactaattacaatgtcgcttgcgcataaaagcgtggaaatatctattcctttaggagaattgaaaacaaaatcatcaaactcctcatcaatacttgaaccacaatctataaatggatgaaatttgttgataataacatattcatcacttaaagatgattttagcagttcgtagtccatttttgcatcggtataagcaagttttacattggcacctctaaaagttggagcgtacagtattatttttcggtcaccaatattcggtattttatctgtaagctctagccttgcttttgccttgaaatcatcatcaaaatacacatcagttcttggaacaccaacagctttaattatgctctcatcacagttaaaagcttgtgcataaaaaggaataacagactcagaagatacacaaacttttgagtaacagttgtgtaaagggtaacgccttaacgcttttttatcagctccccagtcattttcgacggttgaatatccccattttttaaaagcaccgcaagcgtgccaaagctggataactgttgtgtttcgccgaggcttgcaagcaaaggcgggaagataactatcagtcaaaataagagtaccacaacgagcatagtatttgcaaaaacgcataaaactaaagtataagttaaacatatcacgcattttttttccagttatttcaggggcaaggcaaaaaacaaatttgtatccctcacgctttttaagctcatcataaatacactgcat

SEQ ID NO: 2766 - DNA, 12600 bp, synthetic construct
  misc_feature 1..12600: note = Synthetic
  source 1..12600: mol_type = other DNA
ccgcgggtgaccgctctgtccctccccggccccaccaacatcgtgtgcaggggcgaggccaccgacgaggactgccgcttctgcgcggcggacggaactgaataaaaaaggagcggcagtccggctggactgccgctcctttttgtgtatgcccgtcacacatcccgggcacacaggtctgccggcgtctcccggcggacggccacatagctctcgccgtcacggagcatcaccaccggcggcatgggcagccggttgtagtgggaggccatggaaaagttgtaggctcctgtggtgcataccgccacgatgtcgccgcgtcccacagaggccggcagcatcacatgctcctggatgatgtcgccgctttcgcagcagcggcccaccacagaggcctccagctcccgcggctccgtcatcttgtcggcgggcaggcaggtgtagccggcgcggtacagggcgaatcgggggttatccgccatgccgccgtctacggatacatagttcttatagccggggatcttcttcaccgtgccgcaggtgtacagcgtcatgcctgccgccgccacgatgctgcggcccggctccatgtggatctccggcatccggatatccagccgggcacaggcggctctgacagccgccgccacgcggcccaccgtatcgtcgatgtccagctccgggtcgccggccagatagcggacgccgtagccgccgcccaggtccagctgccgcgccgtatagccgtgcttatcccgcatggacgcaatgaacgtcagcatgatctccgccgcgcgctcaaagacctccgcatcgaatatctgggagccgatgtggcagtggaagcccaccagctccacatggggctgagccagcgtatagcaggtgatctcctccgcctgccccgtttcgatggcgctgccgaacttgctgtccacccggccggtggacaccgcctcgaaggtgtgggggtcgatgcccggtgacaggcgcagcagcaccttctgccgcaggccgcggcgggcggcctccgcctcgatggcgcgtatctcctcggcgttgtccgccacgaagtaccccacgcggctgtccatgccgtaggcaatgtcggcgtccgttttgttgttgccgtggaagtaggcgtcccgcaggtcgtaccccgcctgaagcgcggtgtatatctcgccggaggacaccacgtcgatgcccatgccctcctcgcgcatgatctcgtacagccgcttgaagcagcaggcttttcccgcgtacagcgggcggccgtcggggccgaagtgcctgcggaaggccgcctgatacagccggcaccggcggcggatgtccgcctcatccatcaggtacagcggcgtaccgtaccgggccgccagcgccgccgtgtcctgcccggcaaagtacaggtgcccgttgtccccgacggtgatgttattgtgcagcatttctgccataggcgtttcctcctttgtaagaggacagctctgccagcgtcatgccgtacttgctctccagcacgcggcagaacttctctttgtccataaagtcgcggtattggcggacgaaccgctggtacagcaccacgcggtcccggctgccccgcaggaacatgaccacgcccagcaccaggcagatgcccgccgcacaggcgcccaccgggagggtccgccacgccagataggccgtcagggccgaggagagcagcaggatgaccagcagcggtatccagcgcccggtcagcagacgccggtgatcctgccgggagtacacaccgccgtccgccatggcgccggaaaaggggatgtagaccgtgaacatctccagcgccttgacgatgctgtacgccacgccgaaataggcggtcaggcacagaagaatgatccgcgttgccgcaagcagtcccgtacccgtcatgtccgcgccctcagacccacggcctgcatgccctgctcccggtggcgctcccacatggtgcggcgggggtaggacaccacaccgttgttgtcccacgggtcgttgcagatgtagtgctcctcatcgtagcccaccagcagcaggcagtgctcgttggacacccacatgaacggctgaccggaggggatcagccggtaccaggggccattcacggtggggcgcatgttgatgctgcaccacagcagcaccggcatgccgttgtcgatgtaccggcggcacagctcgtcgatctccgtgctggtctcgtcgatcacgtcataccgctcgcctgctacgcggcacagcgccttgaccatcaccggtgcgtagcagcccagcgcctccgggtcccgtgggtcgcccacaaagcactggcgcgggtcggagccccacagctcatcgccgcgtttttcaaaaacgccgcgctccagcacatgatccagaaagtcgggaatggtcaccggatagcccagatagcgcagcagcatcaccgccgaaacgctctcgcagccggtgggcgcctgtcccgactggtccagatagggaacatcgatctttttcatacgcggctccttctgtcagatcttatccgccggctccgcggcgctggcggcgtattttttcaccgtcaggcggttgagcaccaggatctccgcgatcaccagcgccacgccgatggccaggggaatccacggcgtcttcatgatcgccgccagaatgtagcagatcacgcagtcggcgctgaccgtcagaccgtagtacatctgggtcttgacgtgattgatgtggttgcactgggcgccggtggagctcatgatggtggtgtcggagatgggggagcagtggtcgcccatgatggcgccggcgcagatggaggcgatcacgatgaccagcatgctgttggaggtggtatccgcggcgaagatgggcacggccacggggatgaggatgcccatggtgccccagctggtgccggtggcgaacgccaggataccgcccatcaggaacatgaacatggggaacagcgtggtcagcgtctcacggcccgcaaagatgccctgcacgaaggaggagacatccagcatgcccacaaaggccttcaggccccaggcgaaggtcagcaccagcagcgcggggatcatcagcttgaagccctccacatagctgtccacatagcccttgaaatccacgatcttccgggggatgaacatgatggccatcagcagaagcgtcagcacgcagccgaagctcagtgccagcggcgcatcggtattggcgaatatattggtgagggtcaggggaagatcgccctccaggcagctgcggcggcccaggatgaccatgccccacaccacggtgccgatgaggcagaacgtgggcagcagcagatcccagaccgtgcccttggtgctggtctcagccgccacctcggcctgcacggcggcgtagtcgtcgccggtggtgaacagatcgcccttggcggcgttggcctcgtgctcgtacatggggccgtaatccttggccatcagggccgtgccgaacaccatcaccagcgtcagcagcgcgtagaagttataggggatcgcctgcacgaacagcgtgaagccgttgaccgtggtggtgtactcatccgggatgtaggacgccacggcggcggcccaggagctgatgggcgcgatgatgcagatgggtgcggcggtggcgtcgatcatgtaggccagcttggcgcgggacaccttgaaccggtcggtaatgggcatcatgatggtgcccaccgtcaggcagttgaagtagtcatccaaaaagatcaggcagcccagcacagaggtcatcaccagcgcgcttttcttggacttgatccagcgggcggcccagtcgccgaaggcgcgggagccgccggagcgggcaaacaggatcacgatggtgcccagcagcacatcgaagaagaatatcttcaggtcgatgttgtccatcagcgtcaggaacagtgtttcaaacacgccccaggggtcgaaattcgtcaccagcatggcgcccacaaggcagcccgcaaacagggaggaatagacctccttcgtcaaaaacgccagcacgatggccaccagcggcggcagcagcgcccaggcggtgccggcgaaatgcggcgcgccgtcggcgccgtcaccggcggcaagcgcaaaggtgcccaacagaaagaccgctgccagcatcacaagcgtgagcaccagcgtccgtctgaaaggccgttttctgcctaaagacttcctcataatgcgtacctctctttcacatacacaagtcgttttgcaggcgcggactgcccacacccgatccatatgcggcagcaggtatcctgcatgccgcatacccggccgccgctcctgccctgcattgtaggtatctatgctcagtttgtcaaattattgtcattgtccggaaaaccggacgcgcattccggatatccggactgtttttcccttcgccgggacacggcaccatcccggcggatgccgtgctccttcagcttttcatagaacacggtgcgggacagaccaagaagctgcatggcctgctgccgggcgccgccgcattgggccagcgtctgctggaggatgcggcgctccgcctgcttgagctgctggcgcagggtcagcgtcaccggcgccgcgtccaggtggatgtgctccggatagatgatgtccgtatcgcagagcaccacagcgctctccagcaccttctccatctcccggatgttgccgggccagtcgtaattcatcagcttgctgaacgcctcgccggacaggaaccgctccggcaggccgtagcgctgccggatcttttcgataaggcttcccgcaaggagatagatatcctccttgtgctcccgcagtggcggcagctccagggaaaacgcggacaggcggtagtagagatcctgccggaaccgtccctgctccgccgccgtgcgcaggtcgccgtccgcagccgccagcagccgcacatccggcgcctcctccggcacggacaggcagcgcaggagccgggcctgcgcccccggcgacagtctgtccacgccgtccagaaacagtgttccgccgttggctgccgccagcaggccgccgctgccgaacagcgcctcctccagcgcggcggggagcatggcggagcagtccgccttcacaaacgggccgcgccggggctgcacgcgggcgatatcctgagccagagcggctctgcccgtgcccggctcaccggacagcaggatgctgcagtccatctggctcagccggtacgcgcggcggaccagcgtccgcatgacagcggaatcccctgccgcggagcgcatctccccgctgacatccgatgcggcgatgcgctccgtctcccggtatttccgctccgccgccgcgatggcggtgttgcgctcaatgatggaggtcttcaggtcctccacattgcggaatttgacgatggcaccggaaatgcgcccatcgccgtcgcgcataggcaggatggacgcggacagcgccgagccgttgatctcatagggcatatccacaaagctgggcacctcccccgtcagcaccttctgtaggtgctcctcaaacagcgcgccctcaaaaaaatcccggaagtgataaccggcaacgtggatctcctgctccgggcttttggcgatataaccgccgccacgcagcaggctgccgatcccctcgcggcgggcggagtagcccttttcctcccagaacttcacctgccgggtgtagcggtccagtaccaccagctgtccgatgcacatgaaatagccgatggtgtagacattctcccgcaccgtcaccgacacctgtgcgctgtcgatctggacggagatggggaccccctgaaacgtcacgtccagccgcagctcatccgcgctgccgctgtgcaggtacttgcagaccggcttgacgccttcgccgccgaatacccccaccgcggcgatcatgtcgccggggcggatccggcggtcacggatgcagatggtctccagctccgccgctgtcagggctccgtcgtcctgtcccatggcggtggtggcgaggatcaccatatcgccccgcagcagccgccccgccggatgggcatggcggctgtggttgaacaggccgaagctctcctttgcctgccggttgatatgcgtcacgatgccctgccggtccatagtgaacatggcgtgagacgagcagtccatcacgctttgcaggatatccatgtttccaccgccctccgctatgtttttatatatcttagcggagatcgtccgcctttacaatgccggcgccgtcaagcatccgttacagattcgcggcacggcatggaagccgcccgcggagcgtgggaaacggcggggatatattctcgccgcgcgggtcataggatagggcaaaaccggaaaggggcggatacaacatgaaaaagatcagggtgttcctgctgcggcggtggtatacggtgggcggcgcggcgctggtgctggcggcggccattttctatgtggtgaactatcccgtctccgtcagcgcggcggccagcacgcggcagctgcccatttactcggtggagcgcacgcagaaggtgtgtgccatcagctttgacgccgcgtggggcaacgaggatacacagacgctcattgacattctggagaagttccatgtaaagaccacattttttgtggtaggcgactgggcggaaaaatacccggagtcggtgaaggcgctgcacgacgcggggcacgaggtcatgagccactccaaccaccacgaccactacaacagtctgtccgccgaccagatcgtggcggacgtcaccgccagcaacgaacggatcagcgccgtgaccggcgtgacgcccacgctgatccgctgcccctacggcgagtacgacgaccatgtcatcgccgccatccgttccatgggcatggagcctatccagtgggatgtggactccctggactggaaggattatgacgccgacaccatctgccagcgggtgaccagcagagtgcagcaggggagcatcgtcctgttccacaacgccgcgctgcacacgccggaggccctgcccgccatcctcacctgtctcatcaacgacggctacaccgtggtgcccatcagccagcttatcctcccccagccctacaccatcgaccacacagggcgtcagtttgcggcggagacgacggccgtagaataagcagaaaaatgtacaaagctcttgcaatttgtcaaaaatcgtgctatactaatcatagttctttataccataccaagaactatgcaggttactatgataaggtagtataccgcagagctctaacgccccgcgtaagcggggcgttatctctatccgtacttctgaggagggcatgctatgtatccatatgcgatcggctttgacatcggcatcacatccgtgggttgggcagtcgttgctttggacgtagaggacaagcctttcggcatcatcaacatgggctcccgcatttttgatgccgccgagcagcccaagacgggcgcctctcttgcggcaccgcggcgggaggccagaagtatgcgccgccgtctgcgccgccaccggcaccggctggaacgcattcgtcacctccttgtggcggaaaacgtcatttcgcaagcggagctggacaccctctttgagggaaggctggaggacatttacgccctgcgtgtcagggcgttggacgccgcagtatccaacactgacttcgcccgcatcctcctgcacatcgcgcagcggcgcggtttcaagtccaaccgcagatccggcacatcgaaggaggacggtgaactgcttgccgccgtaagtgccaatcgcgcacgcatggtcgaaaaaggctatcgtaccgtgggcgagatgctgctgaaggacccgcagtaccgcgataaaaagcgaaacaaaaatgtccaatacattgcgaccatgggacgggacatggcagaggacgagatccgtgccattttcaaaacccagcgcgggctgggacagtcctttgcggcagaaacgctggaggagcagtatcttgagatcctcttgagccagcgttcctttgacgagggtcccggcgatggcagcccctatgcaggcagccagatcgagaggatgatcggcaagtgcaccctggagccggaggaaccgcgcgcagcaaaggcatgctactcctttgaatatttcacactgctccagaacatcaaccacctgcggctgatccgcggcggcgagagcagcccgctttcggatgcgcagcgggaggagctcatcgcattggcgcacaagacaaaggatctgaacttctcccgtatccgcaaggagctggacatccccgcagatacgatcttcaatacggtgtcttataaaaacgcagatgcatatgaggagactgagaagaaaaccaaattctgctatctcaaggcatatcaccagatgaaggcggccttcaataaattatccaaaaaccattttgacacccttacccgccagcagaaaaatgagctggggcgtgtcctatccacctacaagacttccgccaatatccgcccgcgcctggcggaggccggtctgtccgagccggagatcgacattgccgaaacgatgagtttcagcaaatttggccacatctccgcgaaggcctgcgacaagctgatccctttccttgaaaaaggcatgaaatacaacgatgcctgtgcggcagccgggtacgatttcaagtcacatggcggtgagcctctcacacgtctccttcaccctgcggaggacgatttttccgacatcacaagtcctgtggtgcggcgcgccatctctcagaccgccaaggtcctcaatgccatcatccgggagcgcgggtgcagtcccacctttatcaacatcgagcttgcgcgggaaatggcccgtgactttgcagagcgcagcaagatgaaaaaggacatggacgccaatcgtgcccgcaacgagaagatcatggagcgcatccgaacggaatacggcaaagagacccccacgggacaggatctggtgaagttcaagctgtgggaggagcagcacggcgagtgtgcttattcccaaaagcacctctccatcgagcacctctttgacccggactacgccgaggtggatcatatcgttccgtacagcatttcctttgatgacagctatatgaacaaggtgctggtacttgcggaagaaaaccgcaacaaaggcaaccgcctcccgctgcaatatctgcagggcagacgccgggaggatttcatcgtctgggtggagaacagcatccatgatcccagaaaaaagcggcgtctcctgaaggaaacggtcacctctgaggatgagaaaaagttcagggagcgcaacctgcaggacacgaaaaccatgtctcgctttcttctgaactacatcagcgatcatctggagttttccgcctttgccacggggcgcaaaaagcacgtcactgctgtcaacggtaccatcacatcctacatgcgcaagcgctggggcatcaccaagatacgggaaaacggcgatctgcaccacgcggtagatgcgcttgtcgtcgcctgtacaacagacgggatgatccagcagttgagccgctattccgcactgcgggaatgtgcatatgtacaaacggagaccggcagcgttgcggtttccatgcacaccggcgaggtcctgaaacatttcccctatccctggccggagtttcgccgggagctggaagcccgattgggagacgatccccgccgcgccgtcatttcacagcggttccctgtatatgtaaacggcgatattcccgtgcgaaagctttttgtatcccgcatgccccgccgcaaggtgacgggtgctgcacacaaggagaccgtcaagagtccgaaagcgctgaatgatggcatcgtcgttgtaaagcgtgccctgaccgacctgaagctcgaccccaagaccggggagatatccaactactacatgccgcagagcgaccgcctgctctatgaggcactgaaggaggaactgaaaaagcacggcggtgatgggtccaaggcttttgccgcgcctttccataagcccaaaagcgacggtacgcccgggcctgtcgtcaacaaggtcaaggtatgcgagcctacgacgctgaatgttcctgttctgggcggcaccggcgtggcggataacgacagcatggtgcgcatcgatgtgttccatgtagaaaacgacggctacttctttgtgcccatctacattgccgatacgctgaaagcggagctgcccaacaaggcatgcgtggcacacaagcccttcgaacagtggaaggagatgtccgacgagaactttgtcttttctctgtatccaaatgatctgttgcgcgcgacccataaaaccaggttgaagctggcaaaagcgcaggaagatagcacacttcccgatacctatgaaaccaaacaggaaatgctgtactacatcagcgcagatattgctgcagcatctatcacctgccgcaaccacgacaacagctaccggatcagaggcatgggcatcaagacgctggaaaatctggagaaattcaccgtggatgtgctgggcgaataccacaaggtcgaaaaggaaccgcgcatggcatttagcagaaagtgaggtttgggtatggcttttcggaacattatcgttgaaaatcccgctgcgctctccctgcgaaaggaacagctcatcatccgtaccgacaatgaccactctgtggccattgaggatatttccgcgcttctgttggaaagccgtcaatccacgatcacagcagccgcactgtcccgtctggggcagtgcggctgtgccgttttcgtctgtgatgaaaagcacctgccctgcgcagttctggcaccgtatcagcagcacagccgcggactgtctgtcctgcgcatgcagatgaacatgaccgagccgatgaaaaagcgcctgtggcagagtatcgtcaaggccaagatccaaaaccaggccatctgcctgcggctgacggggcacaccagtgaagcggatacgctgctcgccatggccgggcatgtgcgttccggcgacagcgggaatgtggaggctgccgccgcacagctttactttccggcactgttcgggcagggttttacccgcggagaggataacggcatcaacgcggggctgaactacggctatgcgatcctgcggggctgcatcgcgcggtatctggccgtatacggttttctgccgccgctgggcctgcaccaccgcagcacactgaacgctttcaatctggcggacgatctgattgaaccgttccgccccgtggtggaccttttggtgtcgcgcagcatgagtgaggcggatgaactgaccgctccgcaaaagcgtctcctattcaactgcctgaatctggacattctttcgggcacacagcatcacagcgtatcctacgccgtagagcgggcggtgcaaagcctgggccgtgccgcagaacggtccgacacggaactgatactgccgacactgctggagcctgcacagcaccgctatgaataagtttatgcggatattggtattctttgacttgccggtcaaaacaaaggcccagcggcgagaggccacacggtttcggaactttctgctgacggatggatatcatatgctccagtactccgtttatgcccgcgtctgcaatgggatggacgctgtggagaagcatcgtcagcgtgttaagcagaatctgccggacaacggtgcgatccgcctgatggtcattacggaaaagcagtacgaggccattgacgtgcttttgggaaaattaacagctgccgatgagccatttcaatgtgaacagctctccattttttaaagaaaaaatccgctcaaggcgttgccttgagcggatttttcggtagtctattataccataccaagaactaccagggaactacaactacgggattatgacgcttgccatctatgccaaattataccataccaagaactaccagggaactacaacccattgtcacaccaatattgccgtggatgtattataccataccaagaactaccagggaactacaaccgcgcggttcctccggctccagggtgcacttgattataccataccaagaactaccagggaactacaaccaatacggtctgccacgatccggcaaatccattataccataccaagaactaccagagaactacaacctgcggatggtgtcatagacctccgccgctattataccatagccatgcgcactttggaacgataacatttttgagatgctcattgacaattcccttatccacgtctatactgtcggtcggatttatgagatctcgaaccgcaatacacaggagatgtacgataaatggactactatcttttgaccgatctggctgccaccatgggctaccatctggctatgtccggcgcggagacgttccgtgtggaggacaccatccaccgcattctgcgggcttacggcgtggaatgcgaggtgttcgccattcccaactgcgtatccgtcagtctggaggcggccaacggcaagccgctgatgctcatgcggcgcatcggcttccacgggaacgatc

SEQ ID NO: 2767 - DNA, 11999 bp, synthetic construct
  source 1..11999: mol_type = other DNA
  misc_feature 1..11999: note = Synthetic
ccagcttgaacatcgtgcctacggcggacacgttggtctgcaaaaagccgtagtcgatgtagttctttgacacgtcctgcgggtcgtccagcaggtgatggaaatcctcctcgccggtgcgcaggcacacggtctgcgccagatcctcctgcatccgcaggccgcccagcagcgcccgcagcacgccgccgctctcatagaccagctcctctacgctgagacggttctgggtgtagttgacgtcgctggcgctctcaaagcggtacgccgcgtagccacgcagcgtgccgccgtcgtcgtaccagcccatgcgccgcacctgtatatcgtctctggcggcccgcacctcctcgtcgaacttctccaccatgccgtggtttttcgccgcgaagcgtcgctggcattccagcacggcgtcgaaatcctccggctgcaaaagccgcagatgccgccgcgcctcctcatccggcctcggcagcgccgccgtcggcaggcggtattcgtagagcttcccggcgaagccgtagcccatccggcggtagaagtcgatgcggaacggcagcagcagcgtcagcagcgcgccgttttcccgggcatagtcctcaaaataccgcaccatggccagcgccgcaccctttttcttgtggagcggatgcacctccagcgccatcaggccgcaggcaggctgcatctgtccgaagaaattcatggagaacaggatgagcttcatggtaccgatgagcgtatcgccctcgaaaagccccactgtgcgggtctgcctgtcctcccgcagctccagaaggtgcttctcccggtagtgctgccggcacgcggcgtccagcgccttgtacgccggataggcgttcaggtagatatccagataggcctcgatgtcgccctccgtcagaggacggaacgcccacttgcgggcagctttctcgttgtgcataagccgtactcctttcgccgcgtgccgcgtaccacgattataccgccattcccgccgcttggcaacagaaatgccggtgctggatgggcgtttggcggcatacaatggcactaaaaaactgaaaggggcgcggatgcgatatgaaaaaggtaaaggtattcctgctgcggcgttggtacatggtgggaggcgcggcgctggtgctggcggcggcgatcttctatgtggtgagctatccggcctccgtcagcaccgccgcctccacgcggcagctccctatctattccgtggagcggagccagcgggtgtgtgccatcagcttcgacgccgcgtggggcaacgaggacacccagacgctcatcgatattctggagaaattccacgtcaagaccaccttctttgtggtgggcgactgggcggagaagtacccggaatcggtgaaggcgctgcatgacgcaggccatgaggtcatgagccactccaaccaccatgaccatttcaacagtctctccgccgatcagatcgtcgcggacgtcaccgccagcaacgagcgcatcgccgctgccagcggcgtgacgcccacgctgatccgctgcccctacggggaggacgacgaccacgtcatctccgccatccgctccatgggcatggagcccatccagtgggatgtggattccctcgactggaaggattacgacgcggacaccatctgccggcgggtgacctccaaggtgcagccgggcagcatcgtgctgttccacaacgccgccctccacacgccggaggcgctgcccgctatcctcacctacctcatcaacgacggctacaccgtcctccccatctcccagctcattctccccccgccctacaccatcgaccacaccggccggcagtttccggcggaggaattgtcttaaaaaatgtcaaaatgtacttgtttttccaaaaattcgtgttatagtgataatagttcttataccataccaagaactatgcaggttactatgataaggtagtacaccgcagagcactgacgccccgcttttgcggggcgttatctctatccagaaaaaaggagggcgcgttatgatcccctatgcgatcggctttgatatcggcattacatccgtaggttgggcagtcgtggctttggacagtgaggacaagccgtatggcattatcaacatgggttcccgcgttttcgatgccgccgagcagcccaagacaggagcttccttggcagcaccgcggcgagaggccagaagtgcacgccgtcggctgcgccgtcaccagcatcggctggagcgtattcgccgcctccttttaacagaaaatatgatctcccaagcagagctggataccctctttgcagggaaactggaggacatctatacattgcgcgtcaaggcgctggacgcaccggtttcgcgtaccgaatttgcccgcattctcctgcatattgcacagcggcgcggctttcgctccaaccgcaaagccgaaaccgcgaaggaggacggcgagctgctggccgccgtcagcaaaaaccgggctctcatggttgaaaaaggctaccgcaccgtgggagaaatgctgctgcaagacccgctatacgccgcgagcaagcggaataagggcggccagtacatcgcaacggtaggacgggacatggtggcggaggaagtattctcctgagccagcgctccttcgacgaaggccccggcgagggcagtccctatgccggaagccagatcgagagaatgatcggcaaatgcacactggaggacggcgaacagcgcgcggcaaaggcaacctactccttcgagtactttacgctgctgcaaaatgtcaaccatctccgcctgctccgcggcggcgagggcagcccgctcacccccgcccagcgggaggctctcattgcgctggctcacaaggccaaagagctgaacttttcccacatccgccgggagttggccattcctgcggacaccaccttcaacgcagtgtattataagaataccgacgatgcggaggaagcggaaaaaaagacgaagttctcctatctcaaggcgtaccaccaaatgcgcacggcctttaacaagctgtcaaaaaaccacttcgacacccttacccgcgcgcaaaagaacgagttgggacgtgtcctttccacctacaagacctccgccaaaatacgcgccgcgctgctgcctgccggactgtcggatgcggagcttgacatcgccgagacactatccttcagcaaattcggccacatttctgtaaaagcctgcgacaagctgattccctttctggaaaaggggatgaagtacgacgaggcctgcgccgccgccggatacgacttcaaggcccacagcggccgggagcgcacccagcttctccatccgacgccggacgaccttgcggatatcaccagccccgtcgtgcggcgggcagtggcgcagaccgtcaaggtgctcaacgccatcatccgcgagcgcgggtgcagtcctacctttatcaacctggagctggcgcgggaaatggcgcaggatttcacagagcgcaatcaggcgaaaaagagcatggatgataaccgcgcccgcaacgagcgcctcatggagcgcatccgcacggagtacggcaaggagcatcccacagggcaggatctggtgaagctcaagctctgggaggagcagcacggcgaatgcgcctactcgcagaagcacatttccatcgagcatctctttgagccggactatgcggaggtagaccacatcattccgtacagcatttccttcgatgacggctataagaacaagattctggtgctggctgaggaaaaccgcaataagggcaaccgtctgcccttgcagtatctacagggtaagcggcgggaggacttcatcgtctgggtggagaacaccattcgcagcacgcctaaaaagcagcgcctgctgaaggaaaagctcacatccgaggatgaaacgcaattcaaggagcgcaacctgcaggataccaagaccatggcgcgatttctcctgaactacatcggcgaccatctggcctttgccgactttgccgccgggcgcaagaagcacatcaccgccgttaacggcgccgtgacctcctatatgcgcaagcgctggggcatcagcaagatccgggaaaacggcgatctgcaccacgcggtggacgcactggtcattgcctgcacaacagacggcatgattcaacaggtgagccgctatgccgcgctgcgggagtgcgaatatgtacaaacggagggcggaagcctggccgtttccgtgcataccggcgaggtactcaagagcttcccctacccatggccggaatttcgccgggagctggaggcccgcttgggcgacgatccccgccgcgccgttatttcccagcgcttccccgtctacctgaacaacgatattcccgtccgcaagctctttgtgtctcgtatgccccggcgcaaggtcacgggcgcggcgcacaaggaaaccatcaaaagtcccaaagccctgcaagacggtgttgtggtcacaaaacggccgctgacaagcttgaagctggacaaaaacggcgagatcgccaactactatatgccgcaaagcgaccgactgctctacgaggcgctgaaggaacagctcatgaaatacggcggggatggggcaaaggccttcacgcagcccttccataagccgaaaagcgacggaacgcccggccccatcgtcaacaaggtcaagctatgtgagcctacgacactgcacgtccctgttctgaagggtaccggcgtggcggacaacgacagcatggtacgcatcgatgtgttttatgtggagggcgaggggtattacttcgtacccatctacatcgccgacacgctgaaaaaggagctgccgagcaaggcgtgtacccgcggaaaaccttatgtggaatggaaagagatggagaccaaggatttccagttttcactttatcccaacgacctgatgcgcgtgacccacaaaaacaagctgaagctgacaaaggcgcagaaggagagtacgctccccgacacatacgaaaccaagcaggagctgctgtactatatcagtgcaggaatttccgttgcggccatttcctgccgtacgcacgatgccgcttacgagataaaaagcatgggcatcaagacccttgaaaagctggagaaattcaccgtggatgtgctgggcgagtaccacaaggtagaacgggagccccgcatggccttcaacagaaagtgaggttttgtcatggcttttcggaacattatcgttgaaagccctgctgtcatctccctgcggagggaacagttgatcatccggaccgacagtgaccactccgtggccattgaggatatttctgcgcttttgctggaaagccgccagaccaccatcacaacagccgcgctgtcccgcttgggacagtgcggctgtgccgtttttatctgcgatgaaaagcatctgccctgcgcggtcctgacgccgtatcagcagcacagccgggggttgcccgttgtgcggatgcagatcgccatgacagagccggcgaaaaagcgcctgtggcagagcatcgtcaaagccaagatcttaaatcaggccatctgcctgcatttgaccggccacgcctcacaggcggaggccctccgcgccatggcggaaagggttcgttccggcgacagcgaaaatgtggaggcagccgcggcgcagctctatttccccgtgctgtttggggaaggctttacccgcggggaggacaacggcatcaacgcggagctgaactacggctacgcggttttgcgggggtgtatcgcgcggcatctggcggtatatggttttctcccctcacttgggctgcaccaccgcagcacgctgaacgcctttaatctggcggatgatctgatcgagccgttccgcccggtagttgaccttttggcagcgcgcagcataaccgaggacgaggaattgtcttccccacaaaaaaggctcttattcaactgcctgaatctggatattctctccggcaaacagcatcacagtgtgtcctatgccatagagcggctggtgcagagcttaagccgctctgcggaacggcccgaagcaggtcttttactgccaacgctgctggaaacagagcagcaccgctatgaataagtttatgaggatcatggtgttttttgacctgcctgtcaaaacgaaggcacagcgcagggaggccacccgcttccgtaatttcttgttggcggacggataccatatgctgcaatactccgtctatgcccgggtctgcaacggcatggatgcggcggaaaagcaccgccagcgcgtaaagcagaatttgccggagaacggcgcgatccgcctgatggtcatcacggagaagcagtacgaggcgattgatatacttttaggaaaattaacggaggcggatgacaaatttcaatgcgagcagctttcgattttttgaaagaaaagtcgctcaaggcaatgccttgagcgacttttccggtagcctattataccataccaagaactaccagggaactacaactgcgcatcacgcgccccttgtactccttgaattataccataccaagaactaccagggaactacaacatgatctatctgcgcttttcacattggcaaattataccataccaagaactaccagggaactacaactgaagattttctgtctgaattgctattcaaattataccataccaagaactaccagggaactacaactctgtacggacttcaaggcactcaggtcaaattataccataccaagaactaccagggaactacaactgcggccttcgggggaggtgcctgccatcgattataccataccaagaactaccagggaactacaactggtgccgtgatacatgaccagcagccggccgtcctcgtcacgagcgagggactttgcgaaatactcggcctgtcctacggtgagcagcgtaccctgcgtgtccgtgaccatccgcttctcccgcggcgtggacagcttggacgggtcgaccagctggctcttgatctgataggtccccggatccatctcaacgtgcccggtaacaggatccaccgtcgttttgggcgccatgtgctcgtcgatcatcttcacaaccttttcgccgagcttaattatctcatcgtcatcgtcgaagccatcgtcgtcgaaagagtattcgtcgagctccgtatcatcgagatcaatgatgtcgtggatatccccctccgggtgtgtgaccttctccgcgtcggcctccttgaccttcgcgctgacaatgggcagctcaccgccgtcccagtagacctgccacccctcgtccttgtcgtcgctgttcagcatggactctatgtcgccagccggcgcgatcaccagcgtagatatctcgccggtggcggcgtccatgatgtcgaagccgttgtccgcagtggagattacctcactgacgcccaccttgtcataggcgttgtgaatggcgaacttggccacctccgcagacgggaaggtattggtcagcaggtagtaggactccacgtcctttgccccctcaatcgggtggtcgtaggcggcgtcgaaggcatccagcagatcggtcatgtgcgtcagcttatcactgatgccctgaatcgctttcttatcctccttgggaagcgcctcgtagtcatcggggagcatggcgtattcacgcgcatccttgatacgatagatggccttgtcgcttttcccatacgcttcgtccagctgtgtggcaagctcgccgagaccgcctacggacaggttgtccgcgttgtagtacacaaggctcttgttgttcatcgccttctgcgcgaagtaggccggactgcccacaacgaaggctgtcttgatgaagttgtccagccggggcaaaccgctggtgcgggagtagtccacaccctcgttggccggatggctggggtaaagcggcagcttcagaacgcggttgttgttggtggggtccttcatgtagacctctaccatctgctcggcggaccgttctcttgcccgcttgcgccgtgcgatgatgtccttctgtgcggcggtcagatcccgccgcttcatggcctcgtcatactccagcgcggccatgcgcttctcgttggccttgcccttgtcgtcacccttcgtaatgaacagcacgttgtcatcgaagtgctccatcacctgccgcagcgtatccagtgtcaggtctgcctcgtggcccaccagtgcatgaccggcggacagaccgaagtgcaggtctgccatgccaatggtcttcatggtgctgggactgtggggcagcgccagcgacaccgtgttgagataggacttcgcgtctgccagctcgtcccgcttaccgttcttcagcgcttccttgtactcctccagcgcctcccgcagattgtccagctgctcatccatggagtatccggcgttcagcatggcacgctcgtccgcaccctcgttgatccagctgttaaaagcggattggacagttttagacattctggtgaagctctctgcgtcgctgcaccagttgccccggttcacaccggcgttcaggtcgcacagcagctcctcatacacccgcttcatcacgtgcttctggctcttggtgtcccgcccgtacatcttgatgtacggctcgtaggcacttctaaaagcggaaagacgcccttccccggccacaacgctggagatcgctgctatctgactgtctcgcagcgccgcatcccgcttgaagatgatgtgccccagctcgtgctcatacgtctccgtggcgctgcgcgtgccggtcagagatacgaatatctcgttgccccgctgcgcgccgttggcctccttgccgctggccagcgggaacatatctttgatgaaccgcagctccggagccgcaccgccccgggtgaccgtggcatttctggccttgaggagccgcagctcacccaccagcttttcgcccagatacttggcgcccttagccttcagcgtgtaaatggaaacacccgggcgtatctcctgctggaggaacgcatccgggtgctcttcatatacagttttgacggcggcgcggtttacttctgctcgtcctttatcagtccggctttgacgaacgctgcgtgcaggtcgtcggccattttcttcgactcctcttttgagagtcttgcttcttccatctccggcgacatcttgtccccgtacttggccttcagctcctcttgctgcttcagaaacgtttctaccagactctccggtacgctcaccggctgacccagatagtccgtcatctcgtacatccactcgtccgcgtacggatcgtccatctcctcgtccggctccacgctcatcagctcgtctctgttcagctcgtccttcatacgcggtgtcctcctttactgtgtcagatttcttggtgagggcgtcaaacagcttgcccaagtcggacttggaatccgggaagccctgctccttgaccgcctgaatgaaggtgtcccggtcaacctcgatagcctgaccgttcacaccggcaagctccagcgtcctcgtaccatcagtatactcgtgaacgacgccttgcgcaagatggttgagcaaagtttcctgcgccgctttctggaggccctcgttcatccgggtctccgccgtcttaccggcgcccttctccttgagacgctgacgcagtgaggcagttgcctcctgacccagcgtctccttgcctccctgcgtccggagcttctccaccgtcgcggcgtccggcagcacaccgttcaccatgttcaggatggacatggccgccggactgctgcgcaggaggttctcgtcgtagaacttcacgtgctcgtcgacggcatactgtgccgccgcctgaaggaacacgtcgttgctctgactgacctgcgactgggtggcatagtagccgatggccttggccatctccgccgcctgcgcctcagacacatggaagtcctccaccagctgctgctttgctttcgctgcgttcgcggcggatttggtctccacctccgcctgcgccacggcctctgccacagcccgaagcgtcgcgccatctgaggtcttgcccgccttggtgttctgcttcagggtctccatggccttggtgatattcttgttcaccttcccggcctgctgcaccacgtccagctctaccgcccggttcagcagcgcggcagacgactccgtatcagagtagacctgcgaggcgatcttgttggtgcggacggcgctcttggtgcggatggtgttctgcacactgccgccaataccgccaagcacaccgccgacggcaaagtcgtacaggacgttctgcacggcgtcgccaaaggagtcgtatccgtccagcagcttgccctcctgatccttgaagccaaacgcagccgagacgctccagttcaggatatccgacacggcttcttctgcaccttcacccaccatgtcctttgccgtgcgcagcgcccaccgcttggcctcgttggtggtcatggatttaatgaggtcgtccaagccctcatccgcaaggcccttaccgtagattttcccaccgaaggcgtcaaacaagccctcagaaagcatctcaatggccgcgccggaggcacccttggcaaaggtctttacgcccttcatacccagcacctcgtcgtccgacagcccggcctcgtgcgctccgtaggcactgtcaccaaacgcccgaacaccgagagcagacataccgagacccggcacgaccgcgttcagaagggcgtcaccggccagctgggggacctgtgatacggcgtccagcgcaaagctgcccagcccactggtgcccttcttggccttctccagcttggccgctgcggacttggagtgcttctccgcgtcctcgaacgccttctgcttctgctcctcgcgccgcttcttccgctgctcggtcagcttctcgtattcggtctcccacgtcgtaccgttctcccgggccaagctcatcgccagacctatctgaccagccccggcgcccatgctggcgcccatgctggggtcgccgttcgtcggtgagaacagggcatccacctttttatacgcggacagtgtcgactctaagccgctcgacagtgcgttccaagcacgagaccaaaagggctggctctccttgtcttcctgctcctcccggaaggtcttgctgtaattggggttcagcggctcgtggtgcaggatacccctcttgccggagtcaaagcgctcctccagcgaccggttatccgtccgggtgtacttaccctctgagaccgtgctgttgaacttcttattattataccataccaagaactaccagggaactacaacgcattttacaaaattctgtgtaagaaccagattataccataccaagaactaccagggaactacaactcctctccggtgtggtgattttctatctctaattataccataccaagaactaccagggaactacaaccctacgtgcggctcatcaatgccgccatgcattataccataccaagaactaccagggaactacaacgctcatagcccagacctacggagatcagcaattataccataccaagaactaccagcgcacacgccaccgcatgtcgaagcggcatccaacggcgcaaccctgttgcggcacaaagacttgccgctgtacagacgccacaccatcacaaaagcgcgtgcgatactcgcacgcgctttctcgtaaacacggaggtctataaccgtacttcgacctccgggaaaagttttctcccgctgccggcgccgtagtttcctgatgcccacaactttgaacaagggctgcataaccaataacaaaaagaataacccgcctccctcgcaacattgaacacagtgggagaccattgcttttcataaaaacggcgcagacagtggaacggaacggtttttactccgccagctcgaaggtatcccgctggttcacggcatccagcgccagctgcgcccgagacagctcatcggcag

SEQ ID NO: 2768 - DNA, 11301 bp, synthetic construct
  misc_feature 1..11301: note = Synthetic
  source 1..11301: mol_type = other DNA
cttgcaatccagtgaatgatttgctatactgtagatagttcttataccataccaagaacgattttggttactataataaggtagtaaaccgaaaagctctaacgccccgcctttggcggggcgttatcttttgtgccggaaagagcaatagcggttatggccgccccttgccgtcaattgttataatttcggttgtaaagctcccgcaaaatatgttataatcagatcaaaccagaaaggaaggtgcagatatgctcccctatgcgatcggactggatatcggtattgcttcggttggctgggccgccgttggccttgacagcgaggaaaatccatgcggaatccttcaaatgggcagccgcatttttgatgcggcggaaggcgaaagaggaaaatcattggctgcgccccgccgcgaggcgcggagcgtccgccgccgtctgcgccgccatcggcatcgcaacgagcgcatccgtgccctgcttctgcgtgagggggtcctgacacaggagcagatggacacactgtttgatgggaagctggaggatatctatacccttcgtgtccgggcgttggatcagctggtcacgcccgaagagttttcccgtattctgatccatctggcacagaggcgcggctttcgctccaaccgcaaaagcggcgccgccgagggcgaggacggcaagctgctgaaggcggtgagcgagaatgaagcgcgcatgaagcagtgcggctatcggacggtcggtgaaatgattctgcgcgataaagccttcgccgaccacaagcgcaacaagggcggcgcctatctggccaccgtcgccagagcggccgtggaaaaagaagcgatggcgatctttgccagtcagcgcgagaaaggcgcctgctttgccgcacagcagcttgagaacgaatatatcgaaatccttctcagccagcgctcctttgatgagggaccgggcggagaaagcccttacggcggcaaccagaccgagaaaaaggtcggcacctgtacgctggagggaagcagcgagccgcgggcggccagggcctgcatttcttttgaggagttcacgctgctggataagctcaacaatctgcgcatcgtcagcagcggcagctccgccgcgctggatgaggagcagcgggccaaggtactggagctttgcttcaaaaaggatgctgttgatttcaaggcgatcagaagctgcctgaagcttgaaccggagcttcggttcaaccttgtgaactactatgggaaagacaagacccaggaggaagcggaaaagaaaacaaagttcagctacctgaaggcctatcaccgtatcaggaaggaatttgaaaagagacagccgggtcgatacgagacgctgtcgcgggagcagctcaacgaaatcgggcgtgtcctttcgctgtatgagacgactaaaggcattcagacggccctgaaggattccggcctgaccgaggctgaccttgaaacggttgatgcgatcggaagcttttccaagttcggccgtctttccgtcaaggcgtgtgaaaagctgctgccttacctgcggcagggcatgcggtataatgaagcctgcgaggcggccggctacgatttcaaggcgcacagcgggcaggagcggacgatgcttctgccggcgccggttgaggagtacgataacctgaccagccccgttgtgcggcgggccggttcacagaccattaaggtggtcaacgccatcataagggagcagggcggcagcccgacctatgtaaacattgaattggcccgcgagctttcccgtgattttaatgagcgggagaagatccggcgcgacaatgagagcaaccgcagtgccaatgaaaagctgatggagcagctgcggaaggactacggccgcatcaacccgacggggcttgatctggtcaagctgcgcctctggcaggagcagcatgggtgctgtgcctactccgggaaaaacatcccggccgagcatctgtttgacgagaattatgccgaaatcgaccacatcattccctacagcatcagcttcgacgatacgcggtccaacaaggtgcttgtcttggccggagaaaatcgggataagggcaaccggctgcccatgcagtatctgagcggggaaaaacgggaacgctatatcgtgtgggtcgagcgttttatacgcgatccgcgcaagaaggccaagcttctcaaggagcaattcacggaggaggatgaaaagcgcttcaaggagcgcaacctgcaggacacaaagaccatggcggtctttttgaaaaactatatcgaggatcacctgctgtttgccccgtcgagccgccgcatcaaaagggtaacagccgtcagcggcgccgtaacgggcttcctgcgcaaaaggtggggcattgccaaggtgagggccaacggcgatctgcaccatgcggtcgatgcgcttgttattgcctgcaccacagacgggatgatccggcgggtgacacagtacgcaaatagccgcgagacccgctatcagtcggcacagagcgccagaaaccgggaggaattcccccagccctggccgcacttccaccgcgagcttgaggcccgtctggagcccgatccgcaggccgttatcgcgcagctgcgcctgcccttctacatgaatgggaacgtgcccgaagtcaggcctctctttgtgtcgcggatgccgcggcggaaggtgcacggtcccgcccatgaggcgaccgtcaagagcgcccgtatgctggaggacggctacacgctgaaaaaagttgagctgacggccttgaggctcgataaggacggcgagatcaaggattattacaatcctgaaagcgaccggctgctgtacgacgcgctcagagccagactggatgaatgtgggggcaatggcgaaaaagccttcaaggatatggaattccgcaagccgaagcgcgacggaacgccggggccggtcgtgaaaaaggtcaagcgcatggaaaagagcacgctgaatgtctcgctgcccaacggcggtgtggccatacatgacaaaagggtgcggatcgacgtctttcttgtgccgggcgatggatactattttgtgccgatctatgtggccgatacgctgaaggctgagctgccggacagggcgagcgttgcccataaagaatacaaggactggaagcagatgagggaggaggacttcatcttttcgctctatccgaacgacctggtgaaggtgactcacaagagcgggatgacgtttgcgcgcgccaacaaggaaagcaccctgccggagagctatcagacaaagtcggagtttgtctattacaagtcggccaatatttccaaagggtcattaaccgttatcaatcacgacaatacctatggcatcgacagcctcggcatcaaaacgctgcggggccttgaaaaatataccgtcgatatgctgggcaatgtcagccccgtcgggcgggaaaagcgccagccgttctgcttcaaaaggaggggctgagcatggcctaccgttctgtgctgatcgagagcgatgtccatctatcggtaagaaaccggcagctcgtcatccgggccgaccaaagtgttgatatgatccacaatcgccttgtcatgcgcatccgtatcggcagtctgacgaaatgtcgaacctgcactgaacgtcgtttccttggcccaatcctcggcgactcggcgaccctgcgctcgcaacacctcctcgtaacgcgagcgcgtcgggtcaaacgtcgtgaaccctctcaacaccgtgaccagcggatgcccgaaatgcgtgtcggtcgtgaaatacctcatgacagtcgccttcccttttcggcgtgcagcaatcgtttcccatcctaggcgcagccggcacctgtcggttcgtgttgccataatgaggcgcattgcaggggaaccagtgaacgcaagctgccagccatcgtgacggcgaacgggttgagaaaggcgctgtgcctgacccttggaacctgttggccaacaccatcgaagggagcaaacgatgtcttttgacgccgccgcattcggcccgatcaccttgaaccacctgccgccgttcgcccagcgcctacgacatgcagtacacgtggaaacccgaatgggacgtgtgaggcgcacgatggatgagcggtgggcgcgtgctttgcgcgccaagggcattgatattgacgaggctgacggtgctggtgggaaacgggcacacgacggcaaacggcataccgacatcacgggtactggtcgacgctccgagacccagccggctgccgggctccgcggtcgatccaataccagtacgaatctgccggggccgaaggtgacggcacgcgccacgccattcaaggccaccggtcataagggcggcatcagccggcaggggaattgagctgatcgcagaaccatcgcgcgatgaatgggcgtggccaacacattccgccattgttgaaccgcttctacttggaccggtacctctttgaacggagatattccatattgaagctattccggcatcatatggcacgtaggaaatcccggatatcggcgatttcctcatcacagatggcatgggccatgccggaatactcgcgataggtcagatgcccggcccgttcaaggacctgatgggccgtttgctggtcgggcagcggaatcgtgcggtcctgcgcgccatacgccaggaagaatcgggtaggggagtcaaacgccgcctgttcctcgcccatgaacgaaggactgagcaggatcgcggcatcgaacaacgtcggatgtgccttgaccagacgatacgacagataaccgccttgggagaaaccgatcaatatcttcctgcgatgggcgaatgccgaggcgtccagcagtgaagccaccgcatccccgaccgccgcgcattcgcgttggcgctcgtccacgccgcagccgtcgggataccagtaattgccgcccatatagggcctcgcgtaggtggcgcggaacgagatatagctgggtacggcggcaattgcggccggggccgcatcggctcgcgtcggcgcatatacggcgtcgagaatccgcaccatctcgctttcgtcgttgccgtaaccgtggaacatcaggaaaatggggtcattgccgccggcatcgatctggcttgtcatctgcattcgcatcgtcatcacctcaccagcgagcttacatgcattagacttgtagcgattgacccaccgagcacgcaaggagcaagttatggagccgaggcgcgggcctctcaccgcaggcgagaaagtgcagttcaccgaccgcaagggcaagaagatcaccgatcagcttgtggccggcggctccacgcagaccgagcatggcctgattctgcatgacgatgtgatcggcaagaccgaaggcaccgtgatcctcaccgtgcatgccaagcgcgaggcacaggtcaatcaggtctaccccgagaaagacaagaacaagccgtggaaatcgtcgcgcgccatcggcggctgggagtatgcggtgatgcgcccgcgactggccgattatgtgctgtcgatgccgcgcggcgcgcagatcatgtatccgaaggacatcgcccaagttattcagctcggcgacatccgctccggcatgcgcgtgcttgagtccggtgccggctcgggcgcgatgagtgtgaacctgctggacgccgtgggcgagcgcggccacctgaccacgatcgagctgcgccccgaattcgccaaagtggctcaggccaatgccacgctgtactacggcgaggcccccagctggtgggacctcaaaaccggcgacttcgattccgttgccgccgaactgcctgagcattggttcgaccgcatcatgctcgacatgctcgacccgtggaacaggctcgagcaggcataccgcgtgattgcccccggcggcgtgttggtcagttacgtaactaccaccacgcagatgagtcgactggccgaagccctgcgcgcggccggttgctggaccgagccgcagatccaggaatcgttcgaacgcacatggaaggcccagggcctcgccgtacgccccgaccaccagatgatcggtcataccggtttccttgttatctcgcgcgccatggcctccgggttcgaggcgctcagaaagcgtgatcgcgtgaccaaggacacacagaccgacatcgactcgctcaccgacgaacagcgtgaggcgcagatcgaggaactggaactgcgcgacatctccgaccacaaactacgtaaggtgttgcgcgacctcgaccgtcaggtgggggaacttggcaacacgcacgaataaccgccaaacgatgagtttgtgaacgctcacacacctctatactggaagcaacaccacaccgccacaccgccacaccgggcagacggttcgtgaagggagccacggatgggcatcaagctgagtaaagtcgccaaaacagcgaagaaatacgaccatatcctcatcatcatgaggcatgccaaggccgagccgttcggcgacaagggcgactcggagcgcgagctcaccgacaaaggtctgaaacaggcgaaggcagtgggcaagggcatcgagtcgttgggactggtgcccgaccaaatctcctgctcgtccgccacccgcacgcgccagacgttggaccgcatgcttaagacctttggcgacaagccgatcgtcgactaccgcatcagcctgtatgacgggggagtgcaggcggtgttcgacgagctcgcccacgtcaaggccaagaaccgcgtgttcatgatcgtgggccacgagccgactgtgtcgatcagcgcccaatggctcgcctccgccgactccgacggcgaacgactcgacctgctgaatttgggactttcgcccgcgtccatcgtgatcatgggatcgaacaaaccgttcgacgaatggcaggtgcacagcggcgaactgctcgcggtcatcaatgtgaaagacttcgactaaagcggatataaattccatctataacgacactctacggccatttataagggccggaatccggatgttttgctaccctaagtcgggttacgaacgcatacattggaggattcatgtccactctgacttccgtctccggcttcccccgcatcgggcagaaccgcgaactgaagaagatcatcgaaggctactggaagggtgccaacgacctcgccgccgttaaggccaccgccgccgaactgcgcgccaagcactggaagctgcagcaggccgccggcatcgacctcatccccagcaacgacttcagctactacgatcagatgctggacaccgccatccttctcaacgtgattccgcagcgttacgcacgtctctccttcgacaaccaggaggacacgctcttcgccatggcccgcggctaccagggcgacaagggcgacgtgaccgccctgccgatgaagaagtggttcaccaccaactaccactacctcgtgccggaaatcgactccgccaccgacatcaagctcaacagcaccaagccgttcgacgaattcaacgaggcgaaggcgctcggcatcaccaccaagccggtgctcatcggcccgtacaccttcctcaagctcgcccgcaatccgcaggccgaggagctcgactacgacaagggcctcgtcaacgcggtcgccgcggtgtacgccgaagtcgtcgccaagttcgccgaactgggcgcgcagtggatccagatcgacgaaccgtacctcgtgctcgacaaggagccgggcgatgtcgaactgttcaagagcctgtacgccaagatcctgcccgcccgcgaaggcaaggtcaaggtgctgctcaacacctacttcggccacatcgccgacgtgtacgagaccgtcaacctgctcggcttcgacggcatcggcctggacctcaacgaaggccgcgaggagaacctcgaagccgtcgccaagtacggcgtggcctccaacaccaccatcttcgccggcgtgatcaacggccgcaacatctggcgcaacaactacgccgtgagcctcggcctggtcgacgcgctgaagcaggtcaccgccaacgtggccgtctccaccgcatcctccctgctgcacgtgccgttcagcaccgaaggcgagaccggcatcccggccgaagacctcaagcacttcgcgttcgccatccagaagctcgacgagctcaaggaagtcgccgccctggccgacgccaccgaggacgagaagaaggcatccgccgtcctcgccgccaaccaggctctgttcgacggcacccgcgtggccgccgacccggccgtcgccgagcgcatcggcaagctgtccgacgccgactacgtgcgtcagcctgcccgcgaggagcgtcaggccctgcagcgcgaggccctcggcctgccgctgctgccgaccaccaccatcggctccttcccccagaccaaggagattcgcgccgagcgtgccaagctgcgcaagggcgaggtcaccaaggaagcttacgacgagttcatcaaggcccagatcgacgccgtcatcaagaagcaggaggagatcggcctcgacgtgctggtccacggcgagttcgagcgtaacgacatggtcgaatacttcggccagaacctcaacggcttcctgttcaccaagaacgcctgggtccagtcctacggcacccgttgcgtcaagcccccgatcgtctggggcgacgtgtcccgcgccaacccgatcaccgtggaatggtccgcgtacgcccagtccaagaccgaccacgtgatgaagggcatgctcaccggcccggtgaccatcctcaactggtcctggccgcgcgaggacatcacccacgaggagcagaccaagcagctcgccctcgccatccgcgacgaagtgctcgatctcgaggccgccggtatcaaggtcatccagatcgatgaggccgccctgcgtgagaagctgccgctgcgcaagtccgactggcacgtcaagtacctcgactgggccgttccggccttccgtctggtgcactccgccgtcaagccgaccacccagatccacacccacatgtgctactccgagttcaacgacatcatccgcgacatcgacgcgatggatgccgacgtgatctccttcgaagcctcccgtggcgaccttgtggtgctcgccgccatccacgacgccaacttcgaaaccgaagccggcccgggcgtgtacgacatccactctccgcgcattccgtccgaacaggagatcaaggaccgcatctacgagatcctgaagaagatggacgtcgaaaaggtgtggatcaacccggactgcggcctgaagacccgtggcaacgccgaaacctggccgagcctggagaacctcgtcgcagcggccaaggccgtgcgcgccaaactcgccaagtaaggccggcataggcataaacaggcaagatttccaaggaatcacatgcattcgccaatcttctcgctggaggtgttccctcccaagcgcaccagccctgtaggtaccatctacgatacgttggatggcctgcaggggctggaccccgacttcatctccgtcacctacggcaccggcaaatcgtctgaccgcacgctgaccgcacgcatcgcgcatacggtgaacgaatacggcattccggccgtggcgcacctgaccgcgcaataccttgacaaagacgacgtggacgaggcgctcgacctgttcgaccaggccaaagtctccggcgtgctcgctttgcgaggcgaccgtgtggaaggagccgaaccggcgggagtgttcgaccatgcgagcgatctggcggcctacatccgcgagaagcgtccggatctcaagatctacggcgcctgctatccggaaaagcacccgcaggcggccacgcttgaggaggatatcgacaatctcaagaagaaggtcgacgcgggcgtaagccacctcatctcccagctgttctacgacaacgaggatttccttcgattcgtggacaaggctcgtgccgccggcatcgacgttccaatcgaagccggcatcatgccggtgatgaacgcgaagtcggtgctgcgcatgtcgaagatgtgcgaatcgcgtgttcctgaaaaacttgccgtcctgcttgacaagtgggggagcgacaccgcgctgcttaaagaggcgggtatcgcctacgcgtccgaacagatctgcgacttggcggcacgcggcgtcgacggcgtgcacctgtacacgatgaaccatccatgcgtcagccggcgcatctggtccaacgtcaaaccattcttcgtctgattcagacgatgcaacaaacacgaaagggatgatttccggcaactgtcggaaaccatccctttcgccatacttacggatatgaacgattactatgggaaccatggcttcttctacgcatcagtttggggtgctcgatctgattcgggcgggattgcaggatctggacacggcacgcacgctgcttgacgagttgcgcgccgacggcatcgacgacgaccggctatgcctgctgatgaaaacattggaacagacctgcgagcccgacatcgcgctacgcaacctcgtcgacatcatcaaagcgttgcaaagccaaggccgcgacttccaccaggtcatcaccgacgacgccggactcgtacgactcgtcaccgtgctcggcgtgtccgacgaaatgggcaagctcatgcgcttccgccccgaactcgtcatggccgcagccagcgactcatgcgaaagccatctgtacaaccacgcgcaacgccgcgcgcatgtcctcgaagcggtcggtgccgacccggccgacaatcgcatgccaaaagccacgaaaccactcgccgaagcggcgaccgcgctacgacagacctacagaaaacagctcgccgccatcatggcgcaggacgccaccgcggacgacccaatcgaaatacaaccgagaatcagccaggaactgtccgatcttgccgacgcggccctggaaggcgcgctcgccatcgcccgcgacgaagtggacggcagcgaacacgtgcgcttcgccatcatcggcatgggcaagctcggcgcacgcgaactcaactacgtatccgacgtggacctcatctacgtggtggaaccggcggacgtggacaccaacggcatgaccctcaaccgtgtcggcaccaaaatggccaccaccctgcagcgcgtatgccaatccgtcatcatgggcgtcgccgaacctacattgtggcagatcgatggcggactgcgccccgaaggcaaggacggcccgctcgtacgcaaactcgaatcgcacgaagcctacta

SEQ ID NO: 2769 - DNA, 10603 bp, synthetic construct
  source 1..10603: mol_type = other DNA
  misc_feature 1..10603: note = Synthetic
gagcgccctgatcctgctttgcggaaggacgcaacagggaccgggatgcgagggagcccgtgggccgggctgagagggtacccaagtaccgaccgccggagggagggatccctctgccgcatcctgggaaccgtacaaaaaaccggctgtcgccaagaaagcggcagccggtttttgtgtgcatgaaaggagaacgtaccgtgaaaaattggaagaagatgttgggggtgctgctggccggggccctggtgctgggcggctgtggcggcacgaaaaaggaacaggcggttgggagcaagaccatcccggaattgaagatcgccatttctccctatcaagatgcggataccctgcggaccaagaccgagcccctggggaagatgctccaggccaaactgaaggaaaagggctatgaggtgcagaaaatcaccctgaatgtgggcacttcctacaatgccgtgggggaggcactcagtgcaggcagtgcggatgtgggcttcatttccggggccacctatgtgctctgcgaccgggatgtggatgtgctgctgacggcgctccgggaaggcatcgacaaggacaccacggatctttccgtatggaataacggccagccggacaaattcaccaaaaacctggtgaagtattatcgctccgccctggtggtggggcccagccccaagggacaggctctcctggccaaagtgaagcggggagaaaagcccacttgggaggaactggacagcctgaactgggcggtgatgagccctgcctctgcttccgggtacctgtatccttccctatggctgaaggaaaactacgggaagaccctgaaagacctgtcccatgtggtccagtccgattcctataccacatcaacggctcggctggcttccggccaggtggatgtgatggtggcctattcccatatccgggtcaaaatggaaaaagattggcaggtcaaactgggggggaccgggtccatctgggatcagaccgggatcatcggggtcacggggaaaatcttcaatgatacggtgagtgtgagcaagaccagcaaagtgatgcaggatccggccttccgcaaggcactgggagaagccctgatcgaaatcgggaagacagaagaagggctgaaggtgctgaagaccatcggccacaagggctatgactgggcccaggcctccgattacgatggagaacggaagatccggaaggaacttcaatgaacccgacggtactggaattgaaagccgtttcccaagcctatgaaaaaggacatcccattctccagggggtgtccctttccgtaccccagggttcctttgtttccttgatcggccctagcggtgccgggaagaccaccctgctccggctgttcaatggcatggtacggccgctctccggtgaagtatgggtggaaggccgccggttcgacaccttgaaagggaaatggcgccggtaggtccagcagcaggtggggatgatcttccaggatttctgcttggtggaagagagcagctgcctggaaaacgtactttgcggggccctggggcggatcagcctgtggcgggccctgtggagaaacttcccagaacgggaagtgcagaaagcccggcaggctctggatctggttgggctgggcggacgggaagataccttggccagcagcctcagcgggggtcagaaacagcgggtagccattgctaggactttggtccaggaagcgtccgtcatcctggcagatgaaccggtggcttccttggatccagggacgggaaaagccatcctggaactgctccggcagctgcaggaaacccaggggcttaccgtggtgatgaacagccacaatgtggagcaggccatggcattttcccagcaggtggtggggctccggcaaggccggatcctgttccaagggccggcggatgtctgggatgaggaaaagctccggggattgtacaggagggaatcatgacccaaagataccaaccgcggatgggatggatcctgctgctggggctgacggccggatctctggcagaaatcggctggaatccggcattactgggagaacggggcggccggttctttgatattgcccgggccatgctgcccccggattggggatttttccgggaggcagctgggcctcttctcagcactgtgcgcatgtccctggcaggttctttcttgggcagttccctgggccttttgggagctgtgctgggcagccgttggaccaatccccatggctggatccggatccctttcctgtgtgccatccagctgctgcggacggtgccggccttgatcctggctcttttgtgcaccttcctggtgggactggggaacctggccggtaccttagccctgaccctcagtacctttggggtaatgacccggttgggatatgaagatatggaaacattggactggaaaacagcccgagccctggaagcctccggctgcggccggggaaaagccttctgccgggctctcctgccccggctgctgcccgggtatctgaccaacgccctgtacctgtgggaatccaatgtgcgccaagcggccatcctgggctatgtgggagccgggggcatcgggctgctgctgaaccagcagctggcctggcgggcctatggccgggtggggaccttgctggtactgctctacggtgcggtgctggtgtcggaaagtctcagtgaagccctgcggaaagtcctgagaggccagtggaggctccggtcttggatgaaaaaaggcctgggtatcttgggaatgctgctgctcctgggttctctgggaaccttggaaccggcaggaaatggcggcatgggtgcggcccgggccatgctggagggacttttggaaccggatccttcccttctgttttctctggaaaaagatgctgtgccctggctgttgggagaaaccttctgtatggctttcctggggaccttgggagggggcttggcggctgggttcctggctctggcatccagcttccggttcctgccagtgggggccgctttggtgcctcggctggtcctcctgggtatccgtacggtgccggtctttgtctacggcctcatgtggctccgggtcactgggcccgggccttttgccggtacccttactttgctggtgtgcagcatcggccttttggccaaacggttccagattgggctggatagtacggacccacggccttttgctgccagccgggccatgggtaccgggtgggctgccgccttccggtggacgatcctgccccagctgaaaaaaagcggagcggctgccctgctgtacagactggacgtgaaccttcgggaggcttccatcttaggcctggtaggagctggaggcatcggcaccccgctgatcctggctctccagcagtacaaatggcaggaagccggcgcctttctttggggcatggctgccttggtgctggcggtggaatggggaagtgaaagatgcaggagatgaaaagcggcttactgcttttcatctcctgcatctttttaccgtctaccaaccgattcctgtccccaaatttccccagctcttttgttatactggaggaaaagaaatcccattataggaggtacgggccatggagagcaatatggaacaaagagagatgcaggcaggggaaaaaggaatagggagggaagagacaggggaactggaccggctgttcctggaccttccgccccgggaggcatatcctctgatcctggcgaaagcctgggaaggcagcggccgggctcttttcctcctagcgctgtacctggacgggggatacgggacattcttcctggataagggcctggcccgggcttatgcttccgccgctgcccaggccggagatccggtagcacctgcttttggggcactgaaagacctgcccaatgtgggagaatccgtccgggtgtttgtccggcagagagaaaggatccgggccctggcagcagaaggagacttcctggcccagtactatctggggatcatgtacgcctacggggaaggagaggacccttcctatgaagacgctctggcctggttcgagcaatccgctgcccagggctttgcggccgcccagctggccatgggttcctttctccggttggtggatgggggaaaaaatggcagctggcgggagaagcggctggaatggtatcaaaaagctgcagcaaaaggctatgcagaagcccagctgcggttggcccaggaataccggctgcgcttccatgctctggaccaggccaggatctggtacgaaagagccgcccgccagggccatcccgctgcctgtgagatcatggggaccttctgggcaaatgggtacgtaggccgggcagaccctgcccaagcactggcctggtaccgcagagcttaccacagaggcagccgtaccgcctgctttgccatcgccagcctgtacgaagaaggccgaggcgtcccccaatcctggcagcaggcggcactgtggtataaaaaattttgggaaagataggaattgtactgaaatttggataggaaagagtgtatgatgtaaataagaaataatcaaagcaatttgcaaaataaaaaaatatgatacaatattcttatatttctttactttccatggtaagtgcgctataataaacttggttgtaccaaaccaatgatcagtgggttactatgataaggtaacacaccgaggagctctgacgccttgccatttggcaaggcgttatctcttttatggggataaaatacaaagaagggtgggcaagattatggcatatggtatcgggttggatataggaattggatcagtaggctgggctgtcctagcattggaccatgaagaaaatccctggggaatcattgatttgggcagccggatctttgatgcagcagaacagcctaaaacaggggcttcgctagcgctgcccagaagggaagccagaagtatgcggcgccgtctgcgtcggcgcagacaccgtctggaacggatacggaacctttttatcaaatgcggactgttgacaacagaacagctggatcatttgtatgacgggaaactagaagatatatatactctccgtgtcagagccctggatgagcgactgacagatgaagaattggcacgagtcttgctgcatctggcccatcgccggggatttaaaagcaatcggaaagcagaatcccaaagtacagaagcaggggaactgaaaaaagccatcagcctaaaccagaaaaccatggaagaaaaccactatcggacggtgggggaaatgttctgcaaagatccccgttatacagaatacaagagaaaccggggtggaaattaccttaacacggtggaccgggccatggtggaagatgaagcccgcaaaatcctggaaacccaggaaaagctaggaaacagaaaactgaacggggattttcaagaatcttttctttccatcctgctgagccagaggcagtttgatgaagggcctggaggaaacagccactacggaggaaatcagatcctgaacaaggtagggacttgtacttttgaagatggaagtaatggagagccagcagaaaagagatctcccaaagtctgttattcctttgaatatttcaaccttcttcagaaagtgaaccatttgcgtctgacctcttctaaagacaacagaggactggataaagcagaacggaaaagggtcattgcgcgggcaaagaacgaagcagatctgcgtttaggagaaatcaggaaagttttacagattccttcggaataccggttccagggtgtttcctacaacacaaaggaactccctgaggaaactgagaaaaaaacgaaattcaattatttaccgttctatcatcagatgcggaaactgctggaatcaaaagcccagtttgatatcaggaattattctttggatgtgttggataaaatcggacagatccttgccttttataagggagatgatgccagacggaaggaactggagaaactgcaacttgctccgaaagctgtcgaagctctgttggagatgaatggaaccaccaagttctcccatttgtcactgaaggccatccgaaagattacacctttcctagaacagggcatgacctatgataaagcctgcgaggcagctggatacgattttcgggcccatcgggcgaataagtcttttttgcttccggccaatgcaccggaactggaagatatcaccaatccagtggtccgccgtgccatcggccagaccatcaaagtggtcaatgccattatccggaagcagggaagcagtcccttgtatgtcaatgtggaactggcacgggaaatggccaaagattttcaggaacgggtaaagatcaaaaatgaaaacgaagccaatcaaagccaaaacgatacgctgatgaaggaaatcaaagaaacttatcaaagaatgaatccttctggattggatcttgttaaatggaaattgtggaaggaacaggacggcaagagtccttattctcaaaactctattgtgtcagaacggctgtttgaaacaggttatgtggagatcgatcatatcattccttacagcattagttttgatgacagctataaaaacaaggtactggtgttttcttgggaaaatcaggataagggaaaccgtttgccctatcaatatcttctgcaaaagtatggacagggagcggcggatcggtttaaggtttgggttaacaacaatgtccgggattatcggaaacggcagagattgttgaaagaagaaatgacggaagaagaaatttccggctttaaggaacggaatctgagcgataccaaatatatttctcggttcatgtataacttcattcggaaccacctggaatttgccccttcagaaacagggaaaaagaagagagtgctggcagtaaatgggagaatcacttcttatctgcggaaactctggggcatacggaaaatccgtgctaacggggataaacatcacgctgtggatgcagtaatcattgcctgcactaccgacaaagaaatccaggacttgactgtttattcggaagaacgggaaaaaaagtatgaagcggacgagaatggaggtcacttggtgaatacatctacgggagaagtgttaaagaggttcccgttcccatgggacggcttccagcaagagctggaagcacgctgctctgttcatcccgaaagagaactggctggtttgcctttctatatgaacaaagatttgaatgacatcaaaccgatttttgtttcccgaatgccccggagaaaggtgaccggggctgcccatgaagctaccgtacgttgtgcacgacaaattgaagatgaaattgctctttcaaaaacagctttaacagatttaaaactggatgaagatggagaaattaaaaactactataatcccgacagtgatcgacttctatatgaagctttaaaagaaaaattgattcaatgtaaagggcaagctaaggttgcttttaaagaccctttctataagcctaaaactgatgggacgccaggcccgttggttaaaaaagtaaaacttaaagtaaaagctactttggcggttcctgtagaagggaaaacaggagttgccgataatgatagtatggtacgagtggatgttttcaaaatcgaaggtgaggggtattacttggtacctgtttatgtagctgatacagtaaaaaaagaattgcctaaaaaagctattatcgcacataaaccttataagaaatggaaggatatggatgaaaaagattttttgttttcattgtatccgaatgatttgatttatgttgaaagcaaaaaggagatgatatttaaaattccaccccaaaagagaaaaaacagcactttagaaccagaattttcttgccataaaattttcgggtattatcagggcacagatagatacgctggagctatagacatattaacagacgatggagcatatcttgatcatggacagggagtgaaaagactattgaaaataaagaaatatcaagtggacgtgttaggaaatatccatcttgtaaaaaaagagattcgaaggaagtttatcattaaacaaaaagctcgataaggaatgaggcaggctttgccatgggatatcgtaatattgtaatagcatcggctgccagcgtgtattgtagggacgaccaactgatcattctcaatgaggaaaacaacaaggttcccatagaggatatcagtgccattgttttggaaaaccggcagagcaaaatcagtctggcagcgttggaacagttggtttccagtaatgtgacggtatacctgtgtgatcaacaacatttgcccagcgccgtgatacttcctttttatcagcattctaccaatgcggcggtcattgagaggcaggaacatctttctgttcctcaaacgaaacagatctggaaacagattgttgtggccaaaatccagaatcaggggcgctgcctaaaggaaaggggggataaggaaggagcccattatttaacggaattggccaaaacggtgaccagtggggatgtccataatgtggaagccgttgcggcccggtattattttcgacgggcatttggagagcaattttccaggacgggagatgatggaagaaatagtgcattgaattacgggtatgccattatgcggggactgattgccaggctgcttacggcctatggattcatggtcattcggggaatccatcatggcaataagtacaacagtttcaacctggcagatgattttatggagcccctgcgtccaatcgttgatttgtttgtattgaataatatgtcaaaagaggatatgttgacgccggatttgaaacatgccctggtcaatctcttgggggtggatgtagtgtctggaggacaaatgcacagcttgaattatggagcggaacggatggtccagagctttatgcggatttgccagcaggacgagaaagatttagtgattcctgaactggttcagctgagacagcatcaatatgaataaatttatgcgtatacttgtacttttcgatattccggtaaaaacaaaataccaacggcatgtagctacgaaattccgccatttccttttgaaagacggatattatatgctgcagtattccgtctatgcccgtatctgcaatggtcctgatgccgtggaaaaacatcggcagcgtctgatgagggccttgccggataatggatccgtcaggatggtggtattgacggaaagacagtatgaagcgattgatgtattggtgggaaaatatctgcctgaagaaaaatcctatgatgcagaacatgtttccattttttaaaaacaatcgagtaaggtttcaaaaattcctcactggagggatttttgaaaaaagtgaaaagcccttgtgccagatgacacaagggcttttgctgatctcgattgtaccaaaccaatgatcagcagggaactacaacggtcctctcgctgtgtgagtgtatccattaattgtaccaaaccaatgatcagcagggaactacaactgaacagcgtgtacaggcagcatggagcaaattgtaccaaaccaatgatcagcagggaactacaacctgtcataccgtcgatttttttcgcaagggattgtaccaaaccaatgatcagcagggaactacaacacttattttgtcctggagcatccggatcctattgtaccaaaccaatgatcagcagggaactacaaccaaccagccccataacaatatgccaccgtaattgtaccaaaccaatgatcagcagggaactacaacagtaatccatgagcattttcaatgtgtccattgtaccaaaccaatgatcagcagggaactacaacagtagtagaagaagacattaaagccgatttattgtaccaaaccaatgatcagcagggaactacaacgcaatgttccttcaaacaggtttttctccaattgtaccaaaccaatgatcagcagggaactacaacaaatactaatccggtttgtcaagcgactgcattgtaccaaaccaatgatcagcagggaactacaacaaatctgccggttccttttgctcaggagctattgtaccaaaccaatgatcagcagggaactacaacacccagtgcaaaagtttgcaattcattaaaattgtaccaaaccaatgatcagcagggaactacaacttggctgacttcagtaatcatatgagacccattgtaccaaaccaatgatcagcagggaactacaacataaaaggagtgtgaacaatggcttttgatattgtaccaaaccaatgatcagcagggaactacaacgcaaccgatgagataagccttgattccgtcattgtaccaaaccaatgatcagcagggaactacaacacaagtctctaattcttctactatttttacattgtaccaaaccaatgatcagcagggaactacaactcgggcccggagcggggctaaggatgccccattgtaccaaaccaatgatcagcagggaactacaaccttttctatataaaggagcgtagaacaaggattgtaccaaaccaatgatcagcagggaactacaactcattctattcccc
